United States Patent Application Publication US 2026/0337666 A1 - sequence listing, part 4

SEQ ID NO: 4462 - DNA, 4980 bp, Homo sapiens
  source 1..4980: mol_type = unassigned DNA
agtaaagataaacttgcagagaccacaaggagaaatattcccaaatctcattgtaatgtctcttctttcccacagattaaaggttatacaaaacttaaaagaagcagcaattctattcgcttgttattggacttgaaactccctttgacctcggaaactgaagatgaggttgccatgggaactgctggtactgcaatcattcattttgtgccttgcagatgattccacactgcatggcccgatttttattcaagaaccaagtcctgtaatgttccctttggattctgaggagaaaaaagtgaagctcaattgtgaagttaaaggaaatccaaaacctcatatcaggtggaagttaaatggaacagatgttgacactggtatggatttccgctacagtgttgttgaagggagcttgttgatcaataaccccaataaaacccaagatgctggaacgtaccagtgcacagcgacaaactcgtttggaacaattgttagcagagaagcaaagcttcagtttgcttatcttgacaactttaaaacaagaacaagaagcactgtgtctgtccgtcgaggtcaaggaatggtgctactgtgtggcccgccaccccattctggagagctgagttatgcctggatcttcaatgaatacccttcctatcaggataatcgccgctttgtttctcaagagactgggaatctgtatattgccaaagtagaaaaatcagatgttgggaattatacctgtgtggttaccaataccgtgacaaaccacaaggtcctggggccacctacaccactaatattgagaaatgatggagtgatgggtgaatatgagcccaaaatagaagtgcagttcccagaaacagttccgactgcaaaaggagcaacggtgaagctggaatgctttgctttaggaaatccagtaccaactattatctggcgaagagctgatggaaagccaatagcaaggaaagccagaagacacaagtcaaatggaattcttgagatccctaattttcagcaggaggatgctggtttatatgaatgtgtagctgaaaattccagagggaaaaatgtagcaaggggacagctaactttctatgctcaacctaattggattcaaaaaataaatgatattcacgtggccatggaagaaaatgtcttttgggaatgtaaagcaaatggaaggcctaagcctacatacaagtggctaaaaaatggcgaacctctgctaactcgggatagaattcaaattgagcaaggaacactcaacataacaatagtgaacctctcagatgctggcatgtatcagtgtttggcagagaataaacatggagttatcttttccaacgcagagcttagtgttatagctgtaggtccagatttttcaagaacactcttgaaaagagtaactcttgtcaaagtgggaggtgaagttgtcattgagtgtaagccaaaagcgtctccaaaacctgtttacacctggaagaaaggaagggatatattaaaagaaaatgaaagaattaccatttctgaagatggaaacctcagaatcatcaacgttactaaatcagacgctgggagttatacctgtatagccactaaccattttggaactgctagcagtactggaaacttggtagtgaaagatccaacaagggtaatggtacccccttccagtatggatgtcactgttggagagagtattgttttaccgtgccaggtaacgcatgatcactcgctagacatcgtgtttacttggtcatttaatggacacctgatagactttgacagagatggggaccactttgaaagagttggagggcaggattcagctggtgatttgatgatccgaaacatccaactgaagcatgctgggaaatatgtctgcatggtccaaacaagtgtggacaggctatctgctgctgcagacctgattgtaagaggtcctccaggtcccccagaggctgtgacaatagacgaaatcacagataccactgctcagctctcctggagacccgggcctgacaaccacagccccatcaccatgtatgtcattcaagccaggactccattctccgtgggctggcaagcagtcagtacagtcccagaactcattgatgggaagacattcacagcgaccgtggtgggtttgaacccttgggttgaatatgaattccgcacagttgcagccaacgtgattgggattggggagcccagccgcccctcagagaaacggagaacagaagaagctctccccgaagtcacaccagcgaatgtcagtggtggcggaggcagcaaatctgaactggttataacctgggagacggtccctgaggaattacagaatggtcgaggctttggttatgtggtggccttccggccctacggtaaaatgatctggatgctgacagtgctggcctcagctgatgcctctagatacgtgttcaggaatgagagcgtgcaccccttctctccctttgaggttaaagtaggtgtcttcaacaacaaaggagaaggccctttcagtcccaccacggtggtgtattctgcagaagaagaacccaccaaaccaccagccagtatctttgccagaagtctttctgccacagatattgaagttttctgggcctccccactggagaagaatagaggacgaatacaaggttatgaggttaaatattggagacatgaagacaaagaagaaaatgctagaaaaatacgaacagttggaaatcagacatcaacaaaaatcacgaacttaaaaggcagtgtgctgtatcacttagctgtcaaggcatataattctgctgggacaggcccctctagtgcaacagtcaatgtgacaacccgaaagccaccaccaagtcaaccccccggaaacatcatatggaattcatcagactccaaaattatcctgaattgggatcaagtgaaggccctggataatgagtcggaagtaaaaggatacaaagtcttgtacagatggaacagacaaagcagcacatctgtcattgaaacaaataaaacatcggtggagctttctttgcctttcgatgaagattatataatagaaattaagccattcagcgacggaggagatggcagcagcagtgaacaaattcgaattccaaagatatcaaatgcctacgcgagaggatctggggcttccacttcgaatgcatgtacgctgtcagccatcagtacaataatgatttccctcacagctaggtccagtttatgacaaaagttatctgaaggacttgctgtttataatataagcaacatttagctagttgttttgaagacacccagtactaagtaatattgttgttcaagtacatcttattactggaataaaaatgttttttgcttctttaggaatggcattatacagtacttcctcaaagcaaatctagctttgtctgaagtttctttggaaactctgcaatgcactgaagacatctgtaatatgatgttaccaaagcagtttacatatgtccttatatgcatattttttattatatatttagtgttttatagaattttttaaagttaacatataatgtagatattaattttttcctcggctgtaaaatgctatgggcaacacaatcatgcaattataatttgaaaatatttcctttaaagacagagtttgaaactcatcttggtaaataaattgcaaattactcgtacagttttacaaggatctcatggcagaacagcggaagacttggtccgtaactcaaggctgttgtatgcaaactactcttctagtggttaatgcacttgacatgtacagtatgtttcccatgccgttgtgattttgacatgtacagtatgttttcatgccgttgtgaattttgttgttcaacccaacttgagatggtttcaggaatggctgcaatctcaaaagctcaatgtactgcccaagaggcaccttgtgcaatattcccatccctgaatttagcattgtacaggaagattttcttttcactcaactgagttagcattgtctttgtggtagcattatcttagacattaaatttgaagtaacatatatcctgtagtaacatagacccaaagttactatagtcaaccaagtctttcaaaggataaaagatcattttattatctttaactgtatctattttgaatgtaaatttaaaaaaagtaattctctgtcaatggattcgtaatttctttacaaaatttcttatatataatatgtgtatctctgtaataatagagcccttcttttgaatcaaaattacatatggactttggaagattgctcctatttcaacaaatagttgctgcaagaatttttaatatgactctataaaagctctttagtacaattgtatggtttcttgatgattctgttttgcaataggtagcctagttgctttatatgctttaccttctaggtcttaaaatcacacattggaaaatgacaatatcaacaaaactgtattcttatgaaaagaactatttgttacaatgagaaaggttttgtgagtaaaccctactggacagtgacataaaaggcaatggaattttctataaacattttctcatgtaaacatgctgccaccttttcttctttctcagagaactcaaatttgctatagtttgtcatttttgcttacaaataatataacttttcaaccttctagttatatttatccaataaagtcataatcgggattccatttgtgtaaaaactagggtggtaaccggaaaaaaatattgtcagtatttcaagctgtgttcctttcttagtttgatatggttacttctatgttgaaataaaatttaaaatcacatgcaaaaaaaaaatcagcaaaataataaaatgaacgaaaaaaaatgacacccagggagttcccaaccccagtgtaaatgatatttaccagtgatctagcatatgtaatcttttttaaaggtattgttaataaatattctgtcatttgt

SEQ ID NO: 4463 - DNA, 572 bp, Homo sapiens
  source 1..572: mol_type = unassigned DNA
cagccgcaggaggcgccgcacctacttcccaatataaccaactacggcgtgggggagcggaactgcgagaaggcggcagccaaagtgccattaaagctcggggcggagaggatgcgttacctgggtcccgtctgctgcgagaggcagggcaagctggaggattccctctgaatgattaagaactccgcaattcgcctctgccacaggctgcaaaggacccgaggaaccgctctctctgaactgtgctgatgggcaggaggatgggagacaggaattgagagtcacagaggaaggacagtggagtctggcatcttattgtcatctctaggtatccatggaagattgcttccaggaccctccccagcaatggaaaccaaactcaggagaagttcaagtactccagtcagcctttcacatccatggtttctgcatccacagttgggtgaatccacagatgtgtaacccgtagctaccactggctgactgcacttgacttatatatatttgggctcctgtatatccctattgtcaattgtctatacagcactggtaaaaaaaggactgaaaatcaa

SEQ ID NO: 4464 - DNA, 3144 bp, Homo sapiens
  source 1..3144: mol_type = unassigned DNA
acttcccaatataaccaactacggcgtgggggagcggaactgcgagaaggcggcagccaaagtgccattaaagctcggggcggagaggatgcgttacctgggtcccgtctgctgcgagaggcagggcaagctggaggattccctctgaatgattaagaactccgcaattcgcctctgccacaggctgcaaaggacccgaggaaccgctctctctgaactgtgctgatgggcaggaggatgggagacaggaattgagagtcacagaggaaggacagtggagtctggcatcttattggtgtctttaaaggattgccatttaatgccattcaagatctactaagcatcatttttgcatgactactgcaaaaggattactttacagataccagttcctttgtcaagagcatactttggaccctgttttcagaaagcagggcactctttaatgaagaaacaccagagctgttaaacacattgagacacagaagattctagtgactgaggatggcttcctcttggaaactaatgctgtttctgtcagtcaccatgtgtctttcagagtattcaaaatctcttcctggtctctccacttcatatgctgctttgttaagaattaagaagagttcatcttcatctctctttggttccaaaaccagaccacgatacagcagcccttcattaggaacactgagtgcttcttcacccagctggctaggggcagctcagaattattattcccccatcaatctttatcattcctcagatgccttcaaacaagatgaaagtgtggactatgggccagtttttgtgcaagaaccagatgatattatttttccaactgattctgatgaaaagaaggtagcattgaattgtgaagttcgtggcaatccagttcccagttacagatggcttcgaaatggaacagaaatagatctggaaagtgattatcgctacagtttgatagatggcaccttcattataagcaatccaagtgaagcaaaggattctggtcattatcagtgtttagcaaccaacactgtggggagtattcttagtagagaagctacactgcagtttgcctatctgggaaattttagtggccggacaagaagtgcagtctctgtgagggaaggccagggtgtcgttctgatgtgctctcctccgccacattcaccagagatcatctatagctgggtatttaatgagttcccttcctttgtggcggaagacagccggcggttcatctcccaggagacaggcaacctttatatttctaaagtccaaacatcagatgttggcagctatatttgtctggtgaaaaacacagtgacgaatgctagagtccttagtcctccaacgccactcactctgcgtaatgatggtgtgatgggagaatatgagccgaaaattgaggtccattttcctttcacggttacagctgctaaaggaacaactgttaagatggaatgctttgcacttggcaaccccgttccaacaatcacatggatgaaggttaatggttatattcctagtaaggcacgtctgcggaaatctcaggcggtgctggaaataccgaatgtacagctggatgatgcaggcatttatgagtgcagagctgaaaactcacgtggaaaaaattcctttcgtggacaattacaagtatacacctacccacactgggtagaaaaactgaatgatactcagttagacagtgggagccctctccgatgggaatgtaaggctactggaaaacccagacccacgtatcgttggctgaagaatggagtacccctctcacctcagagtagggttgagatggttaatggagtattgatgatccacaatgtgaatcaatcagatgctggaatgtatcagtgtttggctgaaaataagtatggagccatttacgctagtgctgagctgaagattctagcttcagctcccacttttgcactgaatcaactgaagaaaacaataattgttaccaaagaccaagaagttgtcatagagtgcaaaccccaaggctctccaaaaccaaccatctcttggaagaaaggagacagagcagttagagaaaacaaaagaatagctattcttccagacgggagtctacggatcctaaatgcttccaaatcagacgagggaaagtacgtttgccgaggggaaaacgtctttggttctgctgaaattatagcttcgctatctgtaaaagaacctacaaggatagaacttactcctaaaagaacagaattgacagtgggagaaagcattgtccttaattgcaaagcaattcacgatgctagtttggatgtcactttctactggactctgaaaggacagcctattgatttcgaggaagagggtggacattttgaaagcatcagggcccaagcatcctctgcagatttaatgatcaggaacatccttctgatgcatgctgggagatatggctgcagggtacagaccacagcagacagtgtgtcagatgaggcagaacttcttgttaggggtgagtatgctaatagtgcagtctgaagacatgatcaccataaattatcatacaaaggaatttaaatgcatggactttgagcacatcagtactgtgcattttactttcaattttacaatatatgttattttcgcttaaccttttgcctttgaaaaaattacatggaaaactcctccttagtaacagatgaaaaccaccaaactaacttcagagtccaaaacacctttagtagtaagttgtcactaagtgtttaacctaatgccaaggaaataatctaaacagttgagctactaagtcacttggactacagagataaaatttgtgtgtgtgtatatatgttttgcaaatgaaaagctagtggaacccccaggcatttttttcttctactacttctaagttgggcttccaaaaacagaaaaactgcatgtgtaagatggtggcatttgcaattgttaagtgacaaggatttttttaaagtctgaaaatgtcaacatacaacctctctatgcagaaatgacagttaaatggtttccagttatgaaacagtacaccaaattctgcaatcctaggaagctacatcttaagcaaatgactagagcacccatttcctttagcacagtattccacagtatggg

SEQ ID NO: 4465 - DNA, 4303 bp, Homo sapiens
  source 1..4303: mol_type = unassigned DNA
aattcgcctctgccacaggctgcaaaggacccgaggaaccgctctctctgaactgtgctgatgggcaggaggatgggagacaggaattgagagtcacagaggaaggacagtggagtctggcatcttattggtgtctttaaaggattgccatttaatgccattcaagatctactaagcatcatttttgcatgactactgcaaaaggattactttacagataccagttcctttgtcaagagcatactttggaccctgttttcagaaagcagggcactctttaatgaagaaacaccagagctgttaaacacattgagacacagaagattctagtgactgaggatggcttcctcttggaaactaatgctgtttctgtcagtcaccatgtgtctttcagagtattcaaaatctcttcctggtctctccacttcatatgctgctttgttaagaattaagaagagttcatcttcatctctctttggttccaaaaccagaccacgatacagcagcccttcattaggaacactgagtgcttcttcacccagctggctaggggcagctcagaattattattcccccatcaatctttatcattcctcagatgccttcaaacaagatgaaagtgtggactatgggccagtttttgtgcaagaaccagatgatattatttttccaactgattctgatgaaaagaaggtagcattgaattgtgaagttcgtggcaatccagttcccagttacagatggcttcgaaatggaacagaaatagatctggaaagtgattatcgctacagtttgatagatggcaccttcattataagcaatccaagtgaagcaaaggattctggtcattatcagtgtttagcaaccaacactgtggggagtattcttagtagagaagctacactgcagtttgcctatctgggaaattttagtggccggacaagaagtgcagtctctgtgagggaaggccagggtgtcgttctgatgtgctctcctccgccacattcaccagagatcatctatagctgggtatttaatgagttcccttcctttgtggcggaagacagccggcggttcatctcccaggagacaggcaacctttatatttctaaagtccaaacatcagatgttggcagctatatttgtctggtgaaaaacacagtgacgaatgctagagtccttagtcctccaacgccactcactctgcgtaatgatggtgtgatgggagaatatgagccgaaaattgaggtccattttcctttcacggttacagctgctaaaggaacaactgttaagatggaatgctttgcacttggcaaccccgttccaacaatcacatggatgaaggttaatggttatattcctagtaaggcacgtctgcggaaatctcaggcggtgctggaaataccgaatgtacagctggatgatgcaggcatttatgagtgcagagctgaaaactcacgtggaaaaaattcctttcgtggacaattacaagtatacacctacccacactgggtagaaaaactgaatgatactcagttagacagtgggagccctctccgatgggaatgtaaggctactggaaaacccagacccacgtatcgttggctgaagaatggagtacccctctcacctcagagtagggttgagatggttaatggagtattgatgatccacaatgtgaatcaatcagatgctggaatgtatcagtgtttggctgaaaataagtatggagccatttacgctagtgctgagctgaagattctagcttcagctcccacttttgcactgaatcaactgaagaaaacaataattgttaccaaagaccaagaagttgtcatagagtgcaaaccccaaggctctccaaaaccaaccatctcttggaagaaaggagacagagcagttagagaaaacaaaagaatagctattcttccagacgggagtctacggatcctaaatgcttccaaatcagacgagggaaagtacgtttgccgaggggaaaacgtctttggttctgctgaaattatagcttcgctatctgtaaaagaacctacaaggatagaacttactcctaaaagaacagaattgacagtgggagaaagcattgtccttaattgcaaagcaattcacgatgctagtttggatgtcactttctactggactctgaaaggacagcctattgatttcgaggaagagggtggacattttgaaagcatcagggcccaagcatcctctgcagatttaatgatcaggaacatccttctgatgcatgctgggagatatggctgcagggtacagaccacagcagacagtgtgtcagatgaggcagaacttcttgttaggggacccccaggcccacctgggatagtaattgttgaggaaataaccgaaagtacggccacactgtcctggagcccagcagctgacaaccacagcccaatctcctcctacaaccttcaagctcgcagcccattttccctgggctggcaaacagtaaagacagtcccagaaatcataacaggggacatggagtcagccatggctgtggacctaaatccctgggtggaatatgaatttcgagtggtagccaccaaccctattgggacaggagatccaagcaccccatctcgaatgatccgcacaaatgaagcagttccgaagacagcacccaccaatgtaagcggaagaagtggaagaaggcatgagttagtcattgcctgggagccagtatctgaagagtttcagaatggggaaggcttcggctatattgtggctttcagacccaatggaacacgtggctggaaggaaaaaatggtgacatcctctgaagcttccaaattcatttatcgagatgaaagtgtccctcctcttactccctttgaagtgaaagttggcgtttataacaataaaggagatgggccttttagtcaaattgtggtcatctgttcagctgaaggagaacccagtgctgctcccacagatgtcaaggcgacaagtgtgtctgtgtcagagattcttgttgcatggaaacacattaaagagagtctaggaagaccacagggatttgaggtatgaacagaatgattgaaaataagccttattgtttcttctgacatcacattctcctaaagagaggttttggtgacacctcagaatttcaacagaatttcttagaaattttgctctatgttaaagaaactaagaaatactattttactgggatgtgttatgttgctcattaactggtttatttttcagtacagtagcttccgtagcactatgcaaagatgtttttaaaagatgaaatagagttttagacaaaagcaggagctacaggtagatatttaattgtatccaatttactggtcattttaaaagtttttgtgtcttcctttctaataatttaatgtataaatacaagttttccttttgtactttattggtatctcttaccctcagtgctgaattatcaaattttgcttggaatttaatgatctgtattgtatctatgtattcagatagtttttttggtcccttaaatgttgctatttttaaacatagttattccagccttataatggtgaacatttcatatcaaatgaataacatcaatgaaattttagcctccgcagagaatagcagattgtgagtagtctgtgaacatgaatattttatgataacaaggtttggcttctcacacagctcttgttcttgttcttgccttgcttggccagtcatggagaggaattagggggataatgtctaaaagaaaaaaagaattagcatctgacccaagactttagttgcatttaaaaaaatttattcttacttttcctctgcttcagttcccattaagagaaaatcatcttgtgtcttgaacaatgatcaagtataggacttgtatactaacatggtttccaggctgaaacatatttttaattctatttgagttttcaaataatgcccaacaattatttgattaacatacagctggcattaaataatgatttctatgataaaaaaatttatacaatctttctaagagttacagcaagaacaatttatgggaaaccattacctacttatacaatatcatggacttatttctacaatcttgcttcaattaattatttggaatgataatttagtatctcattatgattgcatgtttaatgtgatgaatatttctgtttctcccaatccatgcttcagggaccatgtttgttcatcattaaatctcagcaaatgataatatatatatttggcccataactgaccacaataaatatgttgaatgaataaa

SEQ ID NO: 4466 - DNA, 3800 bp, Homo sapiens
  source 1..3800: mol_type = unassigned DNA
gaactgtgctgatgggcaggaggatgggagacaggaattgagagtcacagaggaaggacagtggagtctggcatcttattgggcactctttaatgaagaaacaccagagctgttaaacacattgagacacagaagattctagtgactgaggatggcttcctcttggaaactaatgctgtttctgtcagtcaccatgtgtctttcagagtattcaaaatctcttcctggtctctccacttcatatgctgctttgttaagaattaagaagagttcatcttcatctctctttggttccaaaaccagaccacgatacagcagcccttcattaggaacactgagtgcttcttcacccagctggctaggggcagctcagaattattattcccccatcaatctttatcattcctcagatgccttcaaacaagatgaaagtgtggactatgggccagtttttgtgcaagaaccagatgatattatttttccaactgattctgatgaaaagaaggtagcattgaattgtgaagttcgtggcaatccagttcccagttacagatggcttcgaaatggaacagaaatagatctggaaagtgattatcgctacagtttgatagatggcaccttcattataagcaatccaagtgaagcaaaggattctggtcattatcagtgtttagcaaccaacactgtggggagtattcttagtagagaagctacactgcagtttgcctatctgggaaattttagtggccggacaagaagtgcagtctctgtgagggaaggccagggtgtcgttctgatgtgctctcctccgccacattcaccagagatcatctatagctgggtatttaatgagttcccttcctttgtggcggaagacagccggcggttcatctcccaggagacaggcaacctttatatttctaaagtccaaacatcagatgttggcagctatatttgtctggtgaaaaacacagtgacgaatgctagagtccttagtcctccaacgccactcactctgcgtaatgatggtgtgatgggagaatatgagccgaaaattgaggtccattttcctttcacggttacagctgctaaaggaacaactgttaagatggaatgctttgcacttggcaaccccgttccaacaatcacatggatgaaggttaatggttatattcctagtaaggcacgtctgcggaaatctcaggcggtgctggaaataccgaatgtacagctggatgatgcaggcatttatgagtgcagagctgaaaactcacgtggaaaaaattcctttcgtggacaattacaagtatacacctacccacactgggtagaaaaactgaatgatactcagttagacagtgggagccctctccgatgggaatgtaaggctactggaaaacccagacccacgtatcgttggctgaagaatggagtacccctctcacctcagagtagggttgagatggttaatggagtattgatgatccacaatgtgaatcaatcagatgctggaatgtatcagtgtttggctgaaaataagtatggagccatttacgctagtgctgagctgaagattctagcttcagctcccacttttgcactgaatcaactgaagaaaacaataattgttaccaaagaccaagaagttgtcatagagtgcaaaccccaaggctctccaaaaccaaccatctcttggaagaaaggagacagagcagttagagaaaacaaaagaatagctattcttccagacgggagtctacggatcctaaatgcttccaaatcagacgagggaaagtacgtttgccgaggggaaaacgtctttggttctgctgaaattatagcttcgctatctgtaaaagaacctacaaggatagaacttactcctaaaagaacagaattgacagtgggagaaagcattgtccttaattgcaaagcaattcacgatgctagtttggatgtcactttctactggactctgaaaggacagcctattgatttcgaggaagagggtggacattttgaaagcatcagggcccaagcatcctctgcagatttaatgatcaggaacatccttctgatgcatgctgggagatatggctgcagggtacagaccacagcagacagtgtgtcagatgaggcagaacttcttgttaggggacccccaggcccacctgggatagtaattgttgaggaaataaccgaaagtacggccacactgtcctggagcccagcagctgacaaccacagcccaatctcctcctacaaccttcaagctcgcagcccattttccctgggctggcaaacagtaaagacagtcccagaaatcataacaggggacatggagtcagccatggctgtggacctaaatccctgggtggaatatgaatttcgagtggtagccaccaaccctattgggacaggagatccaagcaccccatctcgaatgatccgcacaaatgaagcagttccgaagacagcacccaccaatgtaagcggaagaagtggaagaaggcatgagttagtcattgcctgggagccagtatctgaagagtttcagaatggggaaggcttcggctatattgtggctttcagacccaatggaacacgtggctggaaggaaaaaatggtgacatcctctgaagcttccaaattcatttatcgagatgaaagtgtccctcctcttactccctttgaagtgaaagttggcgtttataacaataaaggagatgggccttttagtcaaattgtggtcatctgttcagctgaaggagaacccagtgctgctcccacagatgtcaaggcgacaagtgtgtctgtgtcagagattcttgttgcatggaaacacattaaagagagtctaggaagaccacagggatttgaggttggttactggaaagacatggaacaggaagatacagcagaaacagtcaaaactagagggaatgagtctttcgtcatcctaacaggattagaaggaaatacgttatatcacttcacagtgagggcttacaatggagctggatatgggccacctagcagtgaagtgagtgcaaccaccaagaaatcccctcctagtcaagcacctagcaacctcaggtgggagcagcaaggctctcaggtttctctgggctgggaacccgtcataccattagccaacgaatctgaagttgtgggttacaaggttttttataggcaagagggtcacagcaacagccaagttattgaaacacagaaacttcaagcagtagtaccactcccagatgctggagtctatattattgaagttcgagcatatagtgaaggaggagatggaacagctagttctcaaattagggtaccatcatattcaggtggaaaaatcacaagtgcacagtcgacccttcactctctctccacatcttcgtcatcagtcaccttgctcttggcattgatgattccttcaacttcctggtgaaaactgctgacttaatttgcttttgtttgctttagcttggtaacagcggtgaatagagtgtagtgtaagtggagaaccaggatcctgagatgagcttgagctttaaaaacttgggactatacatggtgaacttacaggaggttaggggggaaatattacttatccatcaggtttctctttggtttttgtaaacggagaggacagttcttagtccagtaaaaatatgcagattgtatgtaatgaatttttgtaaacaaaggtaatttctgtcaaatgtattctttacttttttaatatgttgggattttattttatatctgatgactccgagtgtgtgccatccatt

SEQ ID NO: 4467 - DNA, 6258 bp, Homo sapiens
  source 1..6258: mol_type = unassigned DNA
gaactgtgctgatgggcaggaggatgggagacaggaattgagagtcacagaggaaggacagtggagtctggcatcttattggtgtctttaaaggattgccatttaatgccattcaagatctactaagcatcatttttgcatgactactgcaaaaggattactttacagataccagttcctttgtcaagagcatactttggaccctgttttcagaaagcagggcactctttaatgaagaaacaccagagctgttaaacacattgagacacagaagattctagtgactgaggatggcttcctcttggaaactaatgctgtttctgtcagtcaccatgtgtctttcagagtattcaaaatctcttcctggtctctccacttcatatgctgctttgttaagaattaagaagagttcatcttcatctctctttggttccaaaaccagaccacgatacagcagcccttcattaggaacactgagtgcttcttcacccagctggctaggggcagctcagaattattattcccccatcaatctttatcattcctcagatgccttcaaacaagatgaaagtgtggactatgggccagtttttgtgcaagaaccagatgatattatttttccaactgattctgatgaaaagaaggtagcattgaattgtgaagttcgtggcaatccagttcccagttacagatggcttcgaaatggaacagaaatagatctggaaagtgattatcgctacagtttgatagatggcaccttcattataagcaatccaagtgaagcaaaggattctggtcattatcagtgtttagcaaccaacactgtggggagtattcttagtagagaagctacactgcagtttgcctatctgggaaattttagtggccggacaagaagtgcagtctctgtgagggaaggccagggtgtcgttctgatgtgctctcctccgccacattcaccagagatcatctatagctgggtatttaatgagttcccttcctttgtggcggaagacagccggcggttcatctcccaggagacaggcaacctttatatttctaaagtccaaacatcagatgttggcagctatatttgtctggtgaaaaacacagtgacgaatgctagagtccttagtcctccaacgccactcactctgcgtaatgatggtgtgatgggagaatatgagccgaaaattgaggtccattttcctttcacggttacagctgctaaaggaacaactgttaagatggaatgctttgcacttggcaaccccgttccaacaatcacatggatgaaggttaatggttatattcctagtaaggcacgtctgcggaaatctcaggcggtgctggaaataccgaatgtacagctggatgatgcaggcatttatgagtgcagagctgaaaactcacgtggaaaaaattcctttcgtggacaattacaagtatacacctacccacactgggtagaaaaactgaatgatactcagttagacagtgggagccctctccgatgggaatgtaaggctactggaaaacccagacccacgtatcgttggctgaagaatggagtacccctctcacctcagagtagggttgagatggttaatggagtattgatgatccacaatgtgaatcaatcagatgctggaatgtatcagtgtttggctgaaaataagtatggagccatttacgctagtgctgagctgaagattctagcttcagctcccacttttgcactgaatcaactgaagaaaacaataattgttaccaaagaccaagaagttgtcatagagtgcaaaccccaaggctctccaaaaccaaccatctcttggaagaaaggagacagagcagttagagaaaacaaaagaatagctattcttccagacgggagtctacggatcctaaatgcttccaaatcagacgagggaaagtacgtttgccgaggggaaaacgtctttggttctgctgaaattatagcttcgctatctgtaaaagaacctacaaggatagaacttactcctaaaagaacagaattgacagtgggagaaagcattgtccttaattgcaaagcaattcacgatgctagtttggatgtcactttctactggactctgaaaggacagcctattgatttcgaggaagagggtggacattttgaaagcatcagggcccaagcatcctctgcagatttaatgatcaggaacatccttctgatgcatgctgggagatatggctgcagggtacagaccacagcagacagtgtgtcagatgaggcagaacttcttgttaggggacccccaggcccacctgggatagtaattgttgaggaaataaccgaaagtacggccacactgtcctggagcccagcagctgacaaccacagcccaatctcctcctacaaccttcaagctcgcagcccattttccctgggctggcaaacagtaaagacagtcccagaaatcataacaggggacatggagtcagccatggctgtggacctaaatccctgggtggaatatgaatttcgagtggtagccaccaaccctattgggacaggagatccaagcaccccatctcgaatgatccgcacaaatgaagcagttccgaagacagcacccaccaatgtaagcggaagaagtggaagaaggcatgagttagtcattgcctgggagccagtatctgaagagtttcagaatggggaaggcttcggctatattgtggctttcagacccaatggaacacgtggctggaaggaaaaaatggtgacatcctctgaagcttccaaattcatttatcgagatgaaagtgtccctcctcttactccctttgaagtgaaagttggcgtttataacaataaaggagatgggccttttagtcaaattgtggtcatctgttcagctgaaggagaacccagtgctgctcccacagatgtcaaggcgacaagtgtgtctgtgtcagagattcttgttgcatggaaacacattaaagagagtctaggaagaccacagggatttgaggttggttactggaaagacatggaacaggaagatacagcagaaacagtcaaaactagagggaatgagtctttcgtcatcctaacaggattagaaggaaatacgttatatcacttcacagtgagggcttacaatggagctggatatgggccacctagcagtgaagtgagtgcaaccaccaagaaatcccctcctagtcaagcacctagcaacctcaggtgggagcagcaaggctctcaggtttctctgggctgggaacccgtcataccattagccaacgaatctgaagttgtgggttacaaggttttttataggcaagagggtcacagcaacagccaagttattgaaacacagaaacttcaagcagtagtaccactcccagatgctggagtctatattattgaagttcgagcatatagtgaaggaggagatggaacagctagttctcaaattagggtaccatcatattcaggtggaaaaatcacaagtgcacagtcgacccttcactctctctccacatcttcgtcatcagtcaccttgctcttggcattgatgattccttcaacttcctggtgaaaactgctgacttaatttgcttttgtttgctttagcttggtaacagcggtgaatagagtgtagtgtaagtggagaaccaggatcctgagatgagcttgagctttaaaaacttgggactatacatggtgaacttacaggaggttaggggggaaatattacttatccatcaggtttctctttggtttttgtaaacggagaggacagttcttagtccagtaaaaatatgcagattgtatgtaatgaatttttgtaaacaaaggtaatttctgtcaaatgtattctttacttttttaatatgttgggattttattttatatctgatgactccgagtgtgtgccatccatttgttaagtaactggcctttagcagatctgtttcaaaaacaaatacaaaaatgagaatgaaaagtttgcttaagactaagtccagtgtttttcattttccctttggctgaatatttcaattgacaaaccagcaggacatatgaaaaatgcttcagtgatgtggtccattataagataagtacacaaaaattttcttgaaaaatattgtatgattgcatagtgaaatagcaagatttgtcaatatgctattctatatgcacccctagagcaagtcattagggtagggaataagccatttacattagtgcaagatagaaagcgagtccagatgaatttcagtgctatagtttttcataaagtactatgttatctagcagcaaatataataaatatttatttttaataacaaaagatggtttaacatcaccaaaaaatatgatcactaaaaactgcagacatgctggcatgggtgctaacttaaaaatgagatgaatatgggacagagcgtttccatttctttacctactgccaaaacagatgttgaattaggtccaaggttttcttctaattgcaaaattttgcaaaaattttaagggcaatgaaaatttgttgtgcaaataattatgcatagtctgtagattaaaatggttcaagtataacaaataagttttgatttttaaaaacagttccatgcatcacataccactgataaaatcaactagtaaaataaagacagtctttcttggataaattgaatttttaattaagctgtggaaacatggcatcagtacagggattcagctagtctagccagctatgcactgtttgattctgtggcttgggaagtaatccttatttgctatttcaaagagtcatcttgagcctgagagatcctagagagttgttggaaaatgagatgaaaattttctacttgatgatatcttaaagaagttctaacaagcacaagaatgtgccagagttggcatcatacccatgaagatgcgtgaaaggatagttattgcaaagtcatatgccagagaagagcctggagaaactatggttttataggcgatgttaacaagagaacaaaaattggttttataattttatataatttaaacttgttaactgtatttgcttcattaataacaagcaaaatgaaacaatatggagctcaaattgctagctctcaaggttaatccttgtagaatcagagaagtgattgaagtttctgttctgaacatcctgaaagaatagtttcagagccacagtaaaagtctgtatgtaggttacatattctctttggggaaatgatgtaagacaccctaaacaaacaagaaattagttaaaagactcactcaatgatattatagtaaatactacagatggtaagtatttaagcctgtaagtaagtaattatgaccaagtggcctttcttgaacgcctcctttaaagtgggagaggctggactttgcaaaaacagggatgctaattgtttagctggcaaaacatgagctctcccaagtatagtttacctttatgaattgtgcatctgaataaaagacagaaagaatatttttaatgcaaaataattttacgtatttcatgaatcaagccattttcttcattttccatggtggtgtacaccagatttagtgaaggactttaagaatcaacttcttacttacactctcagaaagcaaagcccagtaaaatattaaacaaataaaatggcaaatttaaattaaccaatatttttaattagctgatggatggtacgtatctgacagagtatttacacatatagaatgtctgatgtattcttacaggaatcagagatatggaatgtttttacttaacatacacagaatatgtattttgcatcataaacctatttaaaaaacaggttttcaatgtttatgtacttatgtgctgcatatctgttactttgtagaaaccagaagagcattcttatcaaggtacattatttttcagctacagtactgagttttttctgctatgggatagtaaccacagtcttaaatcactaaagagactgtatttttgtataatgtccattgaatatgaagaaagcaacagtccttataattagaaatttcatgaaagcaaaagttttgcatacccaaatgaaggtactgtggaccccatgtcaaactgttaaatatattgtgtacgatctgtatatatactatatataaggcatataccgtgtggaaggcacagtcaaataatagttctgtgtactgttcttgtaacattagatctttttaataaataattctctttttattgactttta

SEQ ID NO: 4468 - DNA, 3679 bp, Homo sapiens
  source 1..3679: mol_type = unassigned DNA
aaacagggcactctttaatgaagaaacaccagagctgttaaacacattgagacacagaagattctagtgactgaggatggcttcctcttggaaactaatgctgtttctgtcagtcaccatgtgtctttcagaaagtgtggactatgggccagtttttgtgcaagaaccagatgatattatttttccaactgattctgatgaaaagaaggtagcattgaattgtgaagttcgtggcaatccagttcccagttacagatggcttcgaaatggaacagaaatagatctggaaagtgattatcgctacagtttgatagatggcaccttcattataagcaatccaagtgaagcaaaggattctggtcattatcagtgtttagcaaccaacactgtggggagtattcttagtagagaagctacactgcagtttgcctatctgggaaattttagtggccggacaagaagtgcagtctctgtgagggaaggccagggtgtcgttctgatgtgctctcctccgccacattcaccagagatcatctatagctgggtatttaatgagttcccttcctttgtggcggaagacagccggcggttcatctcccaggagacaggcaacctttatatttctaaagtccaaacatcagatgttggcagctatatttgtctggtgaaaaacacagtgacgaatgctagagtccttagtcctccaacgccactcactctgcgtaatgatggtgtgatgggagaatatgagccgaaaattgaggtccattttcctttcacggttacagctgctaaaggaacaactgttaagatggaatgctttgcacttggcaaccccgttccaacaatcacatggatgaaggttaatggttatattcctagtaaggcacgtctgcggaaatctcaggcggtgctggaaataccgaatgtacagctggatgatgcaggcatttatgagtgcagagctgaaaactcacgtggaaaaaattcctttcgtggacaattacaagtatacacctacccacactgggtagaaaaactgaatgatactcagttagacagtgggagccctctccgatgggaatgtaaggctactggaaaacccagacccacgtatcgttggctgaagaatggagtacccctctcacctcagagtagggttgagatggttaatggagtattgatgatccacaatgtgaatcaatcagatgctggaatgtatcagtgtttggctgaaaataagtatggagccatttacgctagtgctgagctgaagattctagcttcagctcccacttttgcactgaatcaactgaagaaaacaataattgttaccaaagaccaagaagttgtcatagagtgcaaaccccaaggctctccaaaaccaaccatctcttggaagaaaggagacagagcagttagagaaaacaaaagaatagctattcttccagacgggagtctacggatcctaaatgcttccaaatcagacgagggaaagtacgtttgccgaggggaaaacgtctttggttctgctgaaattatagcttcgctatctgtaaaagaacctacaaggatagaacttactcctaaaagaacagaattgacagtgggagaaagcattgtccttaattgcaaagcaattcacgatgctagtttggatgtcactttctactggactctgaaaggacagcctattgatttcgaggaagagggtggacattttgaaagcatcagggcccaagcatcctctgcagatttaatgatcaggaacatccttctgatgcatgctgggagatatggctgcagggtacagaccacagcagacagtgtgtcagatgaggcagaacttcttgttaggggacccccaggcccacctgggatagtaattgttgaggaaataaccgaaagtacggccacactgtcctggagcccagcagctgacaaccacagcccaatctcctcctacaaccttcaagctcgcagcccattttccctgggctggcaaacagtaaagacagtcccagaaatcataacaggggacatggagtcagccatggctgtggacctaaatccctgggtggaatatgaatttcgagtggtagccaccaaccctattgggacaggagatccaagcaccccatctcgaatgatccgcacaaatgaagcagttccgaagacagcacccaccaatgtaagcggaagaagtggaagaaggcatgagttagtcattgcctgggagccagtatctgaagagtttcagaatggggaaggcttcggctatattgtggctttcagacccaatggaacacgtggctggaaggaaaaaatggtgacatcctctgaagcttccaaattcatttatcgagatgaaagtgtccctcctcttactccctttgaagtgaaagttggcgtttataacaataaaggagatgggccttttagtcaaattgtggtcatctgttcagctgaaggagaacccagtgctgctcccacagatgtcaaggcgacaagtgtgtctgtgtcagagattcttgttgcatggaaacacattaaagagagtctaggaagaccacagggatttgaggttggttactggaaagacatggaacaggaagatacagcagaaacagtcaaaactagagggaatgagtctttcgtcatcctaacaggattagaaggaaatacgttatatcacttcacagtgagggcttacaatggagctggatatgggccacctagcagtgaagtgagtgcaaccaccaagaaatcccctcctagtcaagcacctagcaacctcaggtgggagcagcaaggctctcaggtttctctgggctgggaacccgtcataccattagccaacgaatctgaagttgtgggttacaaggttttttataggcaagagggtcacagcaacagccaagttattgaaacacagaaacttcaagcagtagtaccactcccagatgctggagtctatattattgaagttcgagcatatagtgaaggaggagatggaacagctagttctcaaattagggtaccatcatattcaggtggaaaaatcacaagtgcacagtcgacccttcactctctctccacatcttcgtcatcagtcaccttgctcttggcattgatgattccttcaacttcctggtgaaaactgctgacttaatttgcttttgtttgctttagcttggtaacagcggtgaatagagtgtagtgtaagtggagaaccaggatcctgagatgagcttgagctttaaaaacttgggactatacatggtgaacttacaggaggttaggggggaaatattacttatccatcaggtttctctttggtttttgtaaacggagaggacagttcttagtccagtaaaaatatgcagattgtatgtaatgaatttttgtaaacaaaggtaatttctgtcaaatgtattctttacttttttaatatgttgggattttattttatatctgatgactccgagtgtgtgccatccatttgttaagtaactggcctttagcagatctgtttcaaaaacaaatacaaaaatgagaatgaaaagtttgcttaagactaagtccagtgtttttcattttccctttggctgaatatttcaattgacaaaccagcaggacatatgaaaaatgcttcagtgatgtggtccattataagata

SEQ ID NO: 4469 - DNA, 246 bp, Homo sapiens
  source 1..246: mol_type = unassigned DNA
gcactctttaatgaagaaacaccagagctgttaaacacattgagacacagaagattctagtgactgaggatggcttcctcttggaaactaatgctgtttctgtcagtcaccatgtgtctttcagcattactgtcttccctgctgatctcagttgtttctcttttatcttctcaatgtcattttcctcttgaacttataagccaactgaaggagatggaggtagggttgcaagatgaaataaaggac

SEQ ID NO: 4470 - DNA, 474 bp, Homo sapiens
  source 1..474: mol_type = unassigned DNA
agatcatctatagctgggtatttaatgagttcccttcctttgtggcggaagacagccggcggttcatctcccaggagacaggcaacctttatatttctaaagtccaaacatcagatgttggcagctatatttgtctggtgaaaaacacagtgacgaatgctagagtccttagtcctccaacgccactcactctgcgtaatgatggtgtgatgggagaatatgagccgaaaattgaggtccattttcctttcacggttacagctgctaaaggaacaactgttaagatggaatgctttgcacttggcaataaatacataaaagggagtgtaaagaagactgcttcactcaagaaggtctctgtttatcacttggtgtcctttctaagaaatgtcacaattatggaaaaaagaaacatcttatgaagatgtctaccctctacctaaagaccaatctgccacccttatgaaaataaac

SEQ ID NO: 4471 - DNA, 553 bp, Homo sapiens
  source 1..553: mol_type = unassigned DNA
gtttactgcttacatacttacagcctacccacactgggtagaaaaactgaatgatactcagttagacagtgggagccctctccgatgggaatgtaaggctactggaaaacccagacccacgtatcgttggctgaagaatggagtacccctctcacctcagagtagggttgagatggttaatggagtattgatgatccacaatgtgaatcaatcagatgctggaatgtatcagtgtttggctgaaaataagtatggagccatttacgctagtgctgagctgaagattctagcttcagctcccacttttgcactgaatcaactgaagaaaacaataattgttaccaaagaccaagaagttgtcatagagtgcaaaccccaaggctctccaaaaccaaccatctcttggaagaaaggagacagagcagttagagaaaacaaaaggttagaatctattttataattcaagttcaacattagacttttttgaggttacaggtgacacacacaaactatgcaagaaagagtcttgcagtaccgtgagacgtattttatg

SEQ ID NO: 4472 - DNA, 1620 bp, Homo sapiens
  source 1..1620: mol_type = unassigned DNA
agacgagggaaagtacgtttgccgaggggaaaacgtctttggttctgctgaaattatagcttcgctatctgtaaaagaacctacaaggatagaacttactcctaaaagaacagaattgacagtgggagaaagcattgtccttaattgcaaagcaattcacgatgctagtttggatgtcactttctactggactctgaaaggacagcctattgatttcgaggaagagggtggacattttgaaagcatcagggccgacccccaggcccacctgggatagtaattgttgaggaaataaccgaaagtacggccacactgtcctggagcccagcagctgacaaccacagcccaatctcctcctacaaccttcaagctcgcagcccattttccctgggctggcaaacagtaaagacagtcccagaaatcataacaggggacatggagtcagccatggctgtggacctaaatccctgggtggaatatgaatttcgagtggtagccaccaaccctattgggacaggagatccaagcaccccatctcgaatgatccgcacaaatgaagcagttccgaagacagcacccaccaatgtaagcggaagaagtggaagaaggcatgagttagtcattgcctgggagccagtatctgaagagtttcagaatggggaaggcttcggctatattgtggctttcagacccaatggaacacgtggctggaaggaaaaaatggtgacatcctctgaagcttccaaattcatttatcgagatgaaagtgtccctcctcttactccctttgaagtgaaagttggcgtttataacaataaaggagatgggccttttagtcaaattgtggtcatctgttcagctgaaggagaacccagtgctgctcccacagatgtcaaggcgacaagtgtgtctgtgtcagagattcttgttgcatggaaacacattaaagagagtctaggaagaccacagggatttgaggttggttactggaaagacatggaacaggaagatacagcagaaacagtcaaaactagagggaatgagtctttcgtcatcctaacaggattagaaggaaatacgttatatcacttcacagtgagggcttacaatggagctggatatgggccacctagcagtgaagtgagtgcaaccaccaagaaatcccctcctagtcaagcacctagcaacctcaggtgggagcagcaaggctctcaggtttctctgggctgggaacccgtcataccattagccaacgaatctgaagttgtgggttacaaggttttttataggcaagagggtcacagcaacagccaagttattgaaacacagaaacttcaagcagtagtaccactcccagatgctggagtctatattattgaagttcgagcatatagtgaaggaggagatggaacagctagttctcaaattagggtaccatcatattcaggtggaaaaatcacaagtgcacagtcgacccttcactctctctccacatcttcgtcatcagtcaccttgctcttggcattgatgattccttcaacttcctggtgaaaactgctgacttaatttgcttttgtttgctttagcttggtaacagcggtgaatagagtgtagtgtaag

SEQ ID NO: 4473 - DNA, 5734 bp, Homo sapiens
  source 1..5734: mol_type = unassigned DNA
gctagtttaaggaaatttaaaatgtgtctgttttgtcttacagaaagtgtggactatgggccagtttttgtgcaagaaccagatgatattatttttccaactgattctgatgaaaagaaggtagcattgaattgtgaagttcgtggcaatccagttcccagttacagatggcttcgaaatggaacagaaatagatctggaaagtgattatcgctacagtttgatagatggcaccttcattataagcaatccaagtgaagcaaaggattctggtcattatcagtgtttagcaaccaacactgtggggagtattcttagtagagaagctacactgcagtttgcctatctgggaaattttagtggccggacaagaagtgcagtctctgtgagggaaggccagggtgtcgttctgatgtgctctcctccgccacattcaccagagatcatctatagctgggtatttaatgagttcccttcctttgtggcggaagacagccggcggttcatctcccaggagacaggcaacctttatatttctaaagtccaaacatcagatgttggcagctatatttgtctggtgaaaaacacagtgacgaatgctagagtccttagtcctccaacgccactcactctgcgtaatgatggtgtgatgggagaatatgagccgaaaattgaggtccattttcctttcacggttacagctgctaaaggaacaactgttaagatggaatgctttgcacttggcaaccccgttccaacaatcacatggatgaaggttaatggttatattcctagtaaggcacgtctgcggaaatctcaggcggtgctggaaataccgaatgtacagctggatgatgcaggcatttatgagtgcagagctgaaaactcacgtggaaaaaattcctttcgtggacaattacaagtatacacctacccacactgggtagaaaaactgaatgatactcagttagacagtgggagccctctccgatgggaatgtaaggctactggaaaacccagacccacgtatcgttggctgaagaatggagtacccctctcacctcagagtagggttgagatggttaatggagtattgatgatccacaatgtgaatcaatcagatgctggaatgtatcagtgtttggctgaaaataagtatggagccatttacgctagtgctgagctgaagattctagcttcagctcccacttttgcactgaatcaactgaagaaaacaataattgttaccaaagaccaagaagttgtcatagagtgcaaaccccaaggctctccaaaaccaaccatctcttggaagaaaggagacagagcagttagagaaaacaaaagaatagctattcttccagacgggagtctacggatcctaaatgcttccaaatcagacgagggaaagtacgtttgccgaggggaaaacgtctttggttctgctgaaattatagcttcgctatctgtaaaagaacctacaaggatagaacttactcctaaaagaacagaattgacagtgggagaaagcattgtccttaattgcaaagcaattcacgatgctagtttggatgtcactttctactggactctgaaaggacagcctattgatttcgaggaagagggtggacattttgaaagcatcagggcccaagcatcctctgcagatttaatgatcaggaacatccttctgatgcatgctgggagatatggctgcagggtacagaccacagcagacagtgtgtcagatgaggcagaacttcttgttaggggacccccaggcccacctgggatagtaattgttgaggaaataaccgaaagtacggccacactgtcctggagcccagcagctgacaaccacagcccaatctcctcctacaaccttcaagctcgcagcccattttccctgggctggcaaacagtaaagacagtcccagaaatcataacaggggacatggagtcagccatggctgtggacctaaatccctgggtggaatatgaatttcgagtggtagccaccaaccctattgggacaggagatccaagcaccccatctcgaatgatccgcacaaatgaagcagttccgaagacagcacccaccaatgtaagcggaagaagtggaagaaggcatgagttagtcattgcctgggagccagtatctgaagagtttcagaatggggaaggcttcggctatattgtggctttcagacccaatggaacacgtggctggaaggaaaaaatggtgacatcctctgaagcttccaaattcatttatcgagatgaaagtgtccctcctcttactccctttgaagtgaaagttggcgtttataacaataaaggagatgggccttttagtcaaattgtggtcatctgttcagctgaaggagaacccagtgctgctcccacagatgtcaaggcgacaagtgtgtctgtgtcagagattcttgttgcatggaaacacattaaagagagtctaggaagaccacagggatttgaggttggttactggaaagacatggaacaggaagatacagcagaaacagtcaaaactagagggaatgagtctttcgtcatcctaacaggattagaaggaaatacgttatatcacttcacagtgagggcttacaatggagctggatatgggccacctagcagtgaagtgagtgcaaccaccaagaaatcccctcctagtcaagcacctagcaacctcaggtgggagcagcaaggctctcaggtttctctgggctgggaacccgtcataccattagccaacgaatctgaagttgtgggttacaaggttttttataggcaagagggtcacagcaacagccaagttattgaaacacagaaacttcaagcagtagtaccactcccagatgctggagtctatattattgaagttcgagcatatagtgaaggaggagatggaacagctagttctcaaattagggtaccatcatattcaggtggaaaaatcacaagtgcacagtcgacccttcactctctctccacatcttcgtcatcagtcaccttgctcttggcattgatgattccttcaacttcctggtgaaaactgctgacttaatttgcttttgtttgctttagcttggtaacagcggtgaatagagtgtagtgtaagtggagaaccaggatcctgagatgagcttgagctttaaaaacttgggactatacatggtgaacttacaggaggttaggggggaaatattacttatccatcaggtttctctttggtttttgtaaacggagaggacagttcttagtccagtaaaaatatgcagattgtatgtaatgaatttttgtaaacaaaggtaatttctgtcaaatgtattctttacttttttaatatgttgggattttattttatatctgatgactccgagtgtgtgccatccatttgttaagtaactggcctttagcagatctgtttcaaaaacaaatacaaaaatgagaatgaaaagtttgcttaagactaagtccagtgtttttcattttccctttggctgaatatttcaattgacaaaccagcaggacatatgaaaaatgcttcagtgatgtggtccattataagataagtacacaaaaattttcttgaaaaatattgtatgattgcatagtgaaatagcaagatttgtcaatatgctattctatatgcacccctagagcaagtcattagggtagggaataagccatttacattagtgcaagatagaaagcgagtccagatgaatttcagtgctatagtttttcataaagtactatgttatctagcagcaaatataataaatatttatttttaataacaaaagatggtttaacatcaccaaaaaatatgatcactaaaaactgcagacatgctggcatgggtgctaacttaaaaatgagatgaatatgggacagagcgtttccatttctttacctactgccaaaacagatgttgaattaggtccaaggttttcttctaattgcaaaattttgcaaaaattttaagggcaatgaaaatttgttgtgcaaataattatgcatagtctgtagattaaaatggttcaagtataacaaataagttttgatttttaaaaacagttccatgcatcacataccactgataaaatcaactagtaaaataaagacagtctttcttggataaattgaatttttaattaagctgtggaaacatggcatcagtacagggattcagctagtctagccagctatgcactgtttgattctgtggcttgggaagtaatccttatttgctatttcaaagagtcatcttgagcctgagagatcctagagagttgttggaaaatgagatgaaaattttctacttgatgatatcttaaagaagttctaacaagcacaagaatgtgccagagttggcatcatacccatgaagatgcgtgaaaggatagttattgcaaagtcatatgccagagaagagcctggagaaactatggttttataggcgatgttaacaagagaacaaaaattggttttataattttatataatttaaacttgttaactgtatttgcttcattaataacaagcaaaatgaaacaatatggagctcaaattgctagctctcaaggttaatccttgtagaatcagagaagtgattgaagtttctgttctgaacatcctgaaagaatagtttcagagccacagtaaaagtctgtatgtaggttacatattctctttggggaaatgatgtaagacaccctaaacaaacaagaaattagttaaaagactcactcaatgatattatagtaaatactacagatggtaagtatttaagcctgtaagtaagtaattatgaccaagtggcctttcttgaacgcctcctttaaagtgggagaggctggactttgcaaaaacagggatgctaattgtttagctggcaaaacatgagctctcccaagtatagtttacctttatgaattgtgcatctgaataaaagacagaaagaatatttttaatgcaaaataattttacgtatttcatgaatcaagccattttcttcattttccatggtggtgtacaccagatttagtgaaggactttaagaatcaacttcttacttacactctcagaaagcaaagcccagtaaaatattaaacaaataaaatggcaaatttaaattaaccaatatttttaattagctgatggatggtacgtatctgacagagtatttacacatatagaatgtctgatgtattcttacaggaatcagagatatggaatgtttttacttaacatacacagaatatgtattttgcatcataaacctatttaaaaaacaggttttcaatgtttatgtacttatgtgctgcatatctgttactttgtagaaaccagaagagcattcttatcaaggtacattatttttcagctacagtactgagttttttctgctatgggatagtaaccacagtcttaaatcactaaagagactgtatttttgtataatgtccattgaatatgaagaaagcaacagtccttataattagaaatttcatgaaagcaaaagttttgcatacccaaatgaaggtactgtggaccccatgtcaaactgttaaatatattgtgtacgatctgtatatatactatatataaggcatataccgtgtggaaggcacagtcaaataatagttctgtgtactgttcttgtaacattagatctttttaataaataattctctttttattgactttta

SEQ ID NO: 4474 - DNA, 5925 bp, Homo sapiens
  source 1..5925: mol_type = unassigned DNA
tttctcttacagagtattcaaaatctcttcctggtctctccacttcatatgctgctttgttaagaattaagaagagttcatcttcatctctctttggttccaaaaccagaccacgatacagcagcccttcattaggaacactgagtgcttcttcacccagctggctaggggcagctcagaattattattcccccatcaatctttatcattcctcagatgccttcaaacaagatgaaagtgtggactatgggccagtttttgtgcaagaaccagatgatattatttttccaactgattctgatgaaaagaaggtagcattgaattgtgaagttcgtggcaatccagttcccagttacagatggcttcgaaatggaacagaaatagatctggaaagtgattatcgctacagtttgatagatggcaccttcattataagcaatccaagtgaagcaaaggattctggtcattatcagtgtttagcaaccaacactgtggggagtattcttagtagagaagctacactgcagtttgcctatctgggaaattttagtggccggacaagaagtgcagtctctgtgagggaaggccagggtgtcgttctgatgtgctctcctccgccacattcaccagagatcatctatagctgggtatttaatgagttcccttcctttgtggcggaagacagccggcggttcatctcccaggagacaggcaacctttatatttctaaagtccaaacatcagatgttggcagctatatttgtctggtgaaaaacacagtgacgaatgctagagtccttagtcctccaacgccactcactctgcgtaatgatggtgtgatgggagaatatgagccgaaaattgaggtccattttcctttcacggttacagctgctaaaggaacaactgttaagatggaatgctttgcacttggcaaccccgttccaacaatcacatggatgaaggttaatggttatattcctagtaaggcacgtctgcggaaatctcaggcggtgctggaaataccgaatgtacagctggatgatgcaggcatttatgagtgcagagctgaaaactcacgtggaaaaaattcctttcgtggacaattacaagtatacacctacccacactgggtagaaaaactgaatgatactcagttagacagtgggagccctctccgatgggaatgtaaggctactggaaaacccagacccacgtatcgttggctgaagaatggagtacccctctcacctcagagtagggttgagatggttaatggagtattgatgatccacaatgtgaatcaatcagatgctggaatgtatcagtgtttggctgaaaataagtatggagccatttacgctagtgctgagctgaagattctagcttcagctcccacttttgcactgaatcaactgaagaaaacaataattgttaccaaagaccaagaagttgtcatagagtgcaaaccccaaggctctccaaaaccaaccatctcttggaagaaaggagacagagcagttagagaaaacaaaagaatagctattcttccagacgggagtctacggatcctaaatgcttccaaatcagacgagggaaagtacgtttgccgaggggaaaacgtctttggttctgctgaaattatagcttcgctatctgtaaaagaacctacaaggatagaacttactcctaaaagaacagaattgacagtgggagaaagcattgtccttaattgcaaagcaattcacgatgctagtttggatgtcactttctactggactctgaaaggacagcctattgatttcgaggaagagggtggacattttgaaagcatcagggcccaagcatcctctgcagatttaatgatcaggaacatccttctgatgcatgctgggagatatggctgcagggtacagaccacagcagacagtgtgtcagatgaggcagaacttcttgttaggggacccccaggcccacctgggatagtaattgttgaggaaataaccgaaagtacggccacactgtcctggagcccagcagctgacaaccacagcccaatctcctcctacaaccttcaagctcgcagcccattttccctgggctggcaaacagtaaagacagtcccagaaatcataacaggggacatggagtcagccatggctgtggacctaaatccctgggtggaatatgaatttcgagtggtagccaccaaccctattgggacaggagatccaagcaccccatctcgaatgatccgcacaaatgaagcagttccgaagacagcacccaccaatgtaagcggaagaagtggaagaaggcatgagttagtcattgcctgggagccagtatctgaagagtttcagaatggggaaggcttcggctatattgtggctttcagacccaatggaacacgtggctggaaggaaaaaatggtgacatcctctgaagcttccaaattcatttatcgagatgaaagtgtccctcctcttactccctttgaagtgaaagttggcgtttataacaataaaggagatgggccttttagtcaaattgtggtcatctgttcagctgaaggagaacccagtgctgctcccacagatgtcaaggcgacaagtgtgtctgtgtcagagattcttgttgcatggaaacacattaaagagagtctaggaagaccacagggatttgaggttggttactggaaagacatggaacaggaagatacagcagaaacagtcaaaactagagggaatgagtctttcgtcatcctaacaggattagaaggaaatacgttatatcacttcacagtgagggcttacaatggagctggatatgggccacctagcagtgaagtgagtgcaaccaccaagaaatcccctcctagtcaagcacctagcaacctcaggtgggagcagcaaggctctcaggtttctctgggctgggaacccgtcataccattagccaacgaatctgaagttgtgggttacaaggttttttataggcaagagggtcacagcaacagccaagttattgaaacacagaaacttcaagcagtagtaccactcccagatgctggagtctatattattgaagttcgagcatatagtgaaggaggagatggaacagctagttctcaaattagggtaccatcatattcaggtggaaaaatcacaagtgcacagtcgacccttcactctctctccacatcttcgtcatcagtcaccttgctcttggcattgatgattccttcaacttcctggtgaaaactgctgacttaatttgcttttgtttgctttagcttggtaacagcggtgaatagagtgtagtgtaagtggagaaccaggatcctgagatgagcttgagctttaaaaacttgggactatacatggtgaacttacaggaggttaggggggaaatattacttatccatcaggtttctctttggtttttgtaaacggagaggacagttcttagtccagtaaaaatatgcagattgtatgtaatgaatttttgtaaacaaaggtaatttctgtcaaatgtattctttacttttttaatatgttgggattttattttatatctgatgactccgagtgtgtgccatccatttgttaagtaactggcctttagcagatctgtttcaaaaacaaatacaaaaatgagaatgaaaagtttgcttaagactaagtccagtgtttttcattttccctttggctgaatatttcaattgacaaaccagcaggacatatgaaaaatgcttcagtgatgtggtccattataagataagtacacaaaaattttcttgaaaaatattgtatgattgcatagtgaaatagcaagatttgtcaatatgctattctatatgcacccctagagcaagtcattagggtagggaataagccatttacattagtgcaagatagaaagcgagtccagatgaatttcagtgctatagtttttcataaagtactatgttatctagcagcaaatataataaatatttatttttaataacaaaagatggtttaacatcaccaaaaaatatgatcactaaaaactgcagacatgctggcatgggtgctaacttaaaaatgagatgaatatgggacagagcgtttccatttctttacctactgccaaaacagatgttgaattaggtccaaggttttcttctaattgcaaaattttgcaaaaattttaagggcaatgaaaatttgttgtgcaaataattatgcatagtctgtagattaaaatggttcaagtataacaaataagttttgatttttaaaaacagttccatgcatcacataccactgataaaatcaactagtaaaataaagacagtctttcttggataaattgaatttttaattaagctgtggaaacatggcatcagtacagggattcagctagtctagccagctatgcactgtttgattctgtggcttgggaagtaatccttatttgctatttcaaagagtcatcttgagcctgagagatcctagagagttgttggaaaatgagatgaaaattttctacttgatgatatcttaaagaagttctaacaagcacaagaatgtgccagagttggcatcatacccatgaagatgcgtgaaaggatagttattgcaaagtcatatgccagagaagagcctggagaaactatggttttataggcgatgttaacaagagaacaaaaattggttttataattttatataatttaaacttgttaactgtatttgcttcattaataacaagcaaaatgaaacaatatggagctcaaattgctagctctcaaggttaatccttgtagaatcagagaagtgattgaagtttctgttctgaacatcctgaaagaatagtttcagagccacagtaaaagtctgtatgtaggttacatattctctttggggaaatgatgtaagacaccctaaacaaacaagaaattagttaaaagactcactcaatgatattatagtaaatactacagatggtaagtatttaagcctgtaagtaagtaattatgaccaagtggcctttcttgaacgcctcctttaaagtgggagaggctggactttgcaaaaacagggatgctaattgtttagctggcaaaacatgagctctcccaagtatagtttacctttatgaattgtgcatctgaataaaagacagaaagaatatttttaatgcaaaataattttacgtatttcatgaatcaagccattttcttcattttccatggtggtgtacaccagatttagtgaaggactttaagaatcaacttcttacttacactctcagaaagcaaagcccagtaaaatattaaacaaataaaatggcaaatttaaattaaccaatatttttaattagctgatggatggtacgtatctgacagagtatttacacatatagaatgtctgatgtattcttacaggaatcagagatatggaatgtttttacttaacatacacagaatatgtattttgcatcataaacctatttaaaaaacaggttttcaatgtttatgtacttatgtgctgcatatctgttactttgtagaaaccagaagagcattcttatcaaggtacattatttttcagctacagtactgagttttttctgctatgggatagtaaccacagtcttaaatcactaaagagactgtatttttgtataatgtccattgaatatgaagaaagcaacagtccttataattagaaatttcatgaaagcaaaagttttgcatacccaaatgaaggtactgtggaccccatgtcaaactgttaaatatattgtgtacgatctgtatatatactatatataaggcatataccgtgtggaaggcacagtcaaataatagttctgtgtactgttcttgtaacattagatctttttaataaataattctctttttattgactttta

SEQ ID NO: 4475 - DNA, 4867 bp, Homo sapiens
  source 1..4867: mol_type = unassigned DNA
gcggagctcgagcgctgttgtgtgtttggaaggaaggatgctgctgccaatttgtgggaccgctgctgcgaggagtgggcgtggcctcggcggtgtggatgcttgttaggaaagatgctgagtgcttttcagtgaggagtcagggaggtgtgtgtgagagagagagagaaaagagagagacagagacggggagagagagagggagagagaagagagggaggagggaagaagaaaagacggagggaggtgaggaggaagggagggggagagacagagacctagaggggctgaagacccagacagagctggcagagctactgagaagaggactggagcgctctgagagcctctcaagatcttttgggggagcccaataaatgtgaacatgggatctgtcacgggagctgtcctcaagacgctacttctgttatctactcaaaattggaacagagtcgaagctgggaattcctatgactgtgatgatcctcttgtgtctgccttgcctcaggcatccttcagcagttcttccgagctctccagcagtcatggtcctggatttgcaaggctgaatagaagagatggagctggtggctggtctccacttgtgtctaacaaataccagtggttgcagattgaccttggagagagaatggaggtcaccgctgtggccactcaagggggatatggtagctccaactgggtgaccagctacctcctgatgttcagtgatagtggctggaactggaaacaatatcgccaagaggacagcatctggggtttttcaggaaatgcaaatgcagacagtgttgtgtactatagactccagccttctatcaaagccagatttctgcgcttcatccctttggaatggaaccccaagggcagaattggaatgcgaatcgaagtgttcggatgtgcatacagatcagaagtggttgatcttgatggaaaaagttcccttctctacagatttgatcaaaaatccctgagcccaataaaagacattatttctttgaaattcaaaaccatgcagagtgatgggattctactccacagggaagggccaaatggagatcacatcacactgcaattaagaagagcaagactctttttacttattaattcaggtgaagctaaactgccttccacttccaccctggtcaatctcaccctgggcagcctgctagatgatcagcattggcattcagtgctcatccagcgtttgggcaaacaagtcaacttcacagtggacgaacacaggcatcatttccatgcacggggagaattcaatctcatgaatcttgattatgagatcagctttggagggattccagcacctggaaaatcagtgtcattcccacatagaaattttcatggatgtttagaaaatctctattataatggagtggatatcattgatttggccaagcagcaaaaaccacagatcattgctatgggaaatgtgtcattttcttgttcacaaccacaatctatgcccgtgacttttctgagctccaggagttatttagcactgccagacttctctggagaggaggaggtttctgccacttttcaatttcgaacttggaataaggcagggcttctgctgttcagtgaacttcagctgatttcagggggtatcctcctctttctgagtgatggaaaacttaagtcgaatctctaccagccaggaaaattacccagtgacatcacagcaggtgtcgaattaaatgatgggcagtggcattctgtctctttatctgctaaaaagaatcacttgagtgtggcggtggacggccagatggcttctgctgctcctctgctggggcctgagcagatttattcgggtggcacctattattttggaggttgtcctgacaaaagctttggatccaaatgtaaaagtccacttggtggatttcagggatgtatgaggctcatttctatcagcggcaaagtggtagatctgatttcagttcagcaggggtcccttgggaacttcagtgaccttcagatagactcatgtggcatctcagacaggtgtttgcccaactattgtgaacacggtggggagtgttcccagtcctggagcacctttcattgtaactgtaccaacactggttacagaggagctacttgccataactctatctatgagcagtcatgtgaagcctataagcacagaggaaatacttcagggttttactatatagattcagatggaagtggtcccctggaaccatttcttctatattgcaatatgaccgaaactgcatggaccatcatacagcacaacggctctgacttaacaagagtcagaaatactaatccagagaacccatatgctgggtttttcgagtatgtggccagcatggagcaacttcaggccactattaaccgtgcagagcactgtgaacaggagtttacttattactgcaagaagtcacggctggtcaataagcaagatggaacccctctgagttggtgggtaggaagaaccaatgaaacgcaaacctactggggaggttcttcgcctgatcttcaaaaatgtacttgtggattagagggaaactgcattgattctcagtattactgcaattgtgatgctgaccggaatgaatggaccaatgacactggattgcttgcttataaagaacatcttccagtaactaagatcgtgattacagacacaggccgactgcattcagaagcagcttataaactggggcctctgctctgccagggagacagatcattttggaattcagcttcctttgataccgaggcttcatatcttcattttcctaccttccacggagaacttagcgcggatgtatctttcttttttaagacaacagcttcatctggggtatttttagagaacttggggattgctgattttatacggatagagcttcgctctccgacagtagtgactttttcatttgatgtggggaatgggccttttgaaatctcagtgcagtcacccacccacttcaacgacaaccagtggcaccatgtgagggttgaaaggaacatgaaggaggcctcccttcaagtggatcagctgacaccaaagacacagcccgcccccgctgatgggcatgtcctgttacagctcaacagtcagctcttcgtgggtggaacggccaccagacagagaggctttctgggctgcattcggtctctgcagttgaatgggatgaccctggatttggaagaaagagcccaggtgactccagaagtgcagccaggttgtaggggacattgcagcagctatgggaagttatgccgcaatggagggaaatgcagagaaagacccattgggttcttttgtgactgcactttctctgcatacacagggccattctgctcaaatgagatttctgcatattttggatctggctcatccgtgatatacaattttcaagaaaattatcttttaagtaaaaactccagctcccacgctgcttcatttcatggtgatatgaagctgagcagagaaatgatcaaatttagtttccgaacaacacgaacaccaagcttgctgctttttgtgagctccttttacaaagaatacctttctgtgatcattgccaaaaatggaagtttgcagatcaggtacaagttaaataaatatcaagagcctgatgttgttaactttgattttaaaaacatggctgatggacaacttcaccacataatgattaacagagaagaaggagtggtctttatagagattgacgataatagaaggagacaagttcacctgtcatcaggcacagaattcagtgcagtcaaatctctggtattgggcaggattttagaacacagtgatgtggaccaggatactgcactggcaggtgcgcagggcttcacaggctgcctctctgcagtgcagctcagccacgtggcccctctgaaggcagctctgcaccccagccacccagaccctgtcactgttacaggacacgtgactgagtccagctgtatggcccagcctggcactgatgccacatcaagggaaaggacacactcgtttgcagatcattctggaacaatagatgacagagagccccttgctaatgcaatcaaaagtgactctgcagtaattggaggtctgatagctgttgtgatttttatcttgctttgcatcactgccatagctgttcgcatttatcagcagaaaaggttatataaaagaagtgaggcaaaaaggtcagagaatgtagacagtgctgaggctgttctgaaaagtgagcttaatatacaaaatgcagtcaatgaaaatcagaaagagtacttcttctgattggcagctatgatttaacataaaattatgatagtttgttttaatagccaggggttctcaatggaaaaacgaatgctcttacactgaatgtacaggcagtgggcttgcagcactgccatcttgccatgtacaggcttggggtggctccaggaagcctcgtccagtgatatatttctcatagcattcattctatggaacaagaaattagatattgctgttaattttcaactgttctggtatgatctaaaacaagtttaacctgcttaatggctacagtttttacatgtgaaaactgtagccttggtctcttaaccatgtaatacataagttttgttagaggtaaaaattaaatttggactataatgtccttgctttatttgagaacatttgctgtgtttgcttttgtctcctcgtggtgttattcatagacctggaaatgcttctcagatcctgtgtggccggtgtttgcatcttcagtggccacaagcataataaagcccctttgcctttctctgtattatattcaatacaatacatcaatagtcttgaaaaatg

SEQ ID NO: 4476 - DNA, 3783 bp, Homo sapiens
  source 1..3783: mol_type = unassigned DNA
atgggatctgtcacgggagctgtcctcaagacgctacttctgttatctactcaaaattggaacagagtcgaagctgggaattcctatgactgtgatgatcctcttgtgtctgccttgcctcaggcatccttcagcagttcttccgagctctccagcagtcatggtcctggatttgcaaggctgaatagaagagatggagctggtggctggtctccacttgtgtctaacaaataccagtggttgcagattgaccttggagagagaatggaggtcaccgctgtggccactcaagggggatatggtagctccaactgggtgaccagctacctcctgatgttcagtgatagtggctggaactggaaacaatatcgccaagaggacagcatctggggtttttcaggaaatgcaaatgcagacagtgttgtgtactatagactccagccttctatcaaagccagatttctgcgcttcatccctttggaatggaaccccaagggcagaattggaatgcgaatcgaagtgttcggatgtgcatacagatcagaagtggttgatcttgatggaaaaagttcccttctctacagatttgatcaaaaatccctgagcccaataaaagacattatttctttgaaattcaaaaccatgcagagtgatgggattctactccacagggaagggccaaatggagatcacatcacactgcaattaagaagagcaagactctttttacttattaattcaggtgaagctaaactgccttccacttccaccctggtcaatctcaccctgggcagcctgctagatgatcagcattggcattcagtgctcatccagcgtttgggcaaacaagtcaacttcacagtggacgaacacaggcatcatttccatgcacggggagaattcaatctcatgaatcttgattatgagggaaatgtgtcattttcttgttcacaaccacaatctatgcccgtgacttttctgagctccaggagttatttagcactgccagacttctctggagaggaggaggtttctgccacttttcaatttcgaacttggaataaggcagggcttctgctgttcagtgaacttcagctgatttcagggggtatcctcctctttctgagtgatggaaaacttaagtcgaatctctaccagccaggaaaattacccagtgacatcacagcaggtgtcgaattaaatgatgggcagtggcattctgtctctttatctgctaaaaagaatcacttgagtgtggcggtggacggccagatggcttctgctgctcctctgctggggcctgagcagatttattcgggtggcacctattattttggaggttgtcctgacaaaagctttggatccaaatgtaaaagtccacttggtggatttcagggatgtatgaggctcatttctatcagcggcaaagtggtagatctgatttcagttcagcaggggtcccttgggaacttcagtgaccttcagatagactcatgtggcatctcagacaggtgtttgcccaactattgtgaacacggtggggagtgttcccagtcctggagcacctttcattgtaactgtaccaacactggttacagaggagctacttgccataactctatctatgagcagtcatgtgaagcctataagcacagaggaaatacttcagggttttactatatagattcagatggaagtggtcccctggaaccatttcttctatattgcaatatgaccgaaactgcatggaccatcatacagcacaacggctctgacttaacaagagtcagaaatactaatccagagaacccatatgctgggtttttcgagtatgtggccagcatggagcaacttcaggccactattaaccgtgcagagcactgtgaacaggagtttacttattactgcaagaagtcacggctggtcaataagcaagatggaacccctctgagttggtgggtaggaagaaccaatgaaacgcaaacctactggggaggttcttcgcctgatcttcaaaaatgtacttgtggattagagggaaactgcattgattctcagtattactgcaattgtgatgctgaccggaatgaatggaccaatgacactggattgcttgcttataaagaacatcttccagtaactaagatcgtgattacagacacaggccgactgcattcagaagcagcttataaactggggcctctgctctgccagggagacagatcattttggaattcagcttcctttgataccgaggcttcatatcttcattttcctaccttccacggagaacttagcgcggatgtatctttcttttttaagacaacagcttcatctggggtatttttagagaacttggggattgctgattttatacggatagagcttcgctctccgacagtagtgactttttcatttgatgtggggaatgggccttttgaaatctcagtgcagtcacccacccacttcaacgacaaccagtggcaccatgtgagggttgaaaggaacatgaaggaggcctcccttcaagtggatcagctgacaccaaagacacagcccgcccccgctgatgggcatgtcctgttacagctcaacagtcagctcttcgtgggtggaacggccaccagacagagaggctttctgggctgcattcggtctctgcagttgaatgggatgaccctggatttggaagaaagagcccaggtgactccagaagtgcagccaggttgtaggggacattgcagcagctatgggaagttatgccgcaatggagggaaatgcagagaaagacccattgggttcttttgtgactgcactttctctgcatacacagggccattctgctcaaatgagatttctgcatattttggatctggctcatccgtgatatacaattttcaagaaaattatcttttaagtaaaaactccagctcccacgctgcttcatttcatggtgatatgaagctgagcagagaaatgatcaaatttagtttccgaacaacacgaacaccaagcttgctgctttttgtgagctccttttacaaagaatacctttctgtgatcattgccaaaaatggaagtttgcagatcaggtacaagttaaataaatatcaagagcctgatgttgttaactttgattttaaaaacatggctgatggacaacttcaccacataatgattaacagagaagaaggagtggtctttatagagattgacgataatagaaggagacaagttcacctgtcatcaggcacagaattcagtgcagtcaaatctctggtattgggcaggattttagaacacagtgatgtggaccaggatactgcactggcaggtgcgcagggcttcacaggctgcctctctgcagtgcagctcagccacgtggcccctctgaaggcagctctgcaccccagccacccagaccctgtcactgttacaggacacgtgactgagtccagctgtatggcccagcctggcactgatgccacatcaagggaaaggacacactcgtttgcagatcattctggaacaatagatgacagagagccccttgctaatgcaatcaaaagtgactctgcagtaattggaggtctgatagctgttgtgatttttatcttgctttgcatcactgccatagctgttcgcatttatcagcagaaaaggttatataaaagaagtgaggcaaaaaggtcagagaatgtagacagtgctgaggctgttctgaaaagtgagcttaatatacaaaatgcagtcaatgaaaatcagaaagagtacttcttctga

SEQ ID NO: 4477 - DNA, 2338 bp, Homo sapiens
  source 1..2338: mol_type = unassigned DNA
tcattttctcttgcagccgccatgattctgaggccttcccagctatgtggaactatgactgtgatgatcctcttgtgtctgccttgcctcaggcatccttcagcagttcttccgagctctccagcagtcatggtcctggatttgcaaggctgaatagaagagatggagctggtggctggtctccacttgtgtctaacaaataccagtggttgcagattgaccttggagagagaatggaggtcaccgctgtggccactcaagggggatatggtagctccaactgggtgaccagctacctcctgatgttcagtgatagtggctggaactggaaacaatatcgccaagaggacagcatctggggtttttcaggaaatgcaaatgcagacagtgttgtgtactatagactccagccttctatcaaagccagatttctgcgcttcatccctttggaatggaaccccaagggcagaattggaatgcgaatcgaagtgttcggatgtgcatacagatcagaagtggttgatcttgatggaaaaagttcccttctctacagatttgatcaaaaatccctgagcccaataaaagacattatttctttgaaattcaaaaccatgcagagtgatgggattctactccacagggaagggccaaatggagatcacatcacactgcaattaagaagagcaagactctttttacttattaattcaggtgaagctaaactgccttccacttccaccctggtcaatctcaccctgggcagcctgctagatgatcagcattggcattcagtgctcatccagcgtttgggcaaacaagtcaacttcacagtggacgaacacaggcatcatttccatgcacggggagaattcaatctcatgaatcttgattatgagatcagctttggagggattccagcacctggaaaatcagtgtcattcccacatagaaattttcatggatgtttagaaaatctctattataatggagtggatatcattgatttggccaagcagcaaaaaccacagatcattgctatgggaaatgtgtcattttcttgttcacaaccacaatctatgcccgtgacttttctgagctccaggagttatttagcactgccagacttctctggagaggaggaggtttctgccacttttcaatttcgaacttggaataaggcagggcttctgctgttcagtgaacttcagctgatttcagggggtatcctcctctttctgagtgatggaaaacttaagtcgaatctctaccagccaggaaaattacccagtgacatcacagcaggtgtcgaattaaatgatgggcagtggcattctgtctctttatctgctaaaaagaatcacttgagtgtggcggtggacggccagatggcttctgctgctcctctgctggggcctgagcagatttattcgggtggcacctattattttggaggttgtcctgacaaaagctttggatccaaatgtaaaagtccacttggtggatttcagggatgtatgaggctcatttctatcagcggcaaagtggtagatctgatttcagttcagcaggggtcccttgggaacttcagtgaccttcagatagactcatgtggcatctcagacaggtgtttgcccaactattgtgaacacggtggggagtgttcccagtcctggagcacctttcattgtaactgtaccaacactggttacagaggagctacttgccataactctatctatgagcagtcatgtgaagcctataagcacagaggaaatacttcagggttttactatatagattcagatggaagtggtcccctggaaccatttcttctatattgcaatatgaccgaaactgcatggaccatcatacagcacaacggctctgacttaacaagagtcagaaatactaatccagagaacccatatgctgggtttttcgagtatgtggccagcatggagcaacttcaggccactattaaccgtgcagagcactgtgaacaggagtttacttattactgcaagaagtcacggctggtcaataagcaagatggaacccctctgagttggtgggtaggaagaaccaatgaaacgcaaacctactggggaggttcttcgcctgatcttcaaaaatgtacttgtggattagagggaaactgcattgattctcagtattactgcaattgtgatgctgaccggaatgaatggtgatttccatatgatttctttatgcaagaaaaagttcatttaaaaaaattaatcactcaaagtatgtatagctagccagatactgaacaagttagtgcaatgaagtaattaaataaaggtttgttttaatg

SEQ ID NO: 4478 - DNA, 558 bp, Homo sapiens
  source 1..558: mol_type = unassigned DNA
ctgaggccttcccagctatgtggaactatgactgtgatgatcctcttgtgtctgccttgcctcaggcatccttcagcagttcttccgagctctccagcagtcatggtcctggatttgcaaggctgaatagaagagatggagctggtggctggtctccacttgtgtctaacaaataccagtggttgcagattgaccttggagagagaatggaggtcaccgctgtggccactcaagggggatatggtagctccaactgggtgaccagctacctcctgatgttcagtgatagtggctggaactggaaacaatatcgccaagaggacagcatctggggtttttcaggaaatgcaaatgcagacagtgttgtgtactatagactccagccttctatcaaagccagatttctgcgcttcatccctttggaatggaaccccaagggcagaattggaatgcgaatcgaagtgttcggatgtgcatacacagcagtgatcctgtttgcagatctggagaagaaatgtatagaagtaaattactggtgggagaaagaaagaaaaagaa

SEQ ID NO: 4479 - DNA, 3708 bp, Homo sapiens
  source 1..3708: mol_type = unassigned DNA
atgtggaactatgactgtgatgatcctcttgtgtctgccttgcctcaggcatccttcagcagttcttccgagctctccagcagtcatggtcctggatttgcaaggctgaatagaagagatggagctggtggctggtctccacttgtgtctaacaaataccagtggttgcagattgaccttggagagagaatggaggtcaccgctgtggccactcaagggggatatggtagctccaactgggtgaccagctacctcctgatgttcagtgatagtggctggaactggaaacaatatcgccaagaggacagcatctggggtttttcaggaaatgcaaatgcagacagtgttgtgtactatagactccagccttctatcaaagccagatttctgcgcttcatccctttggaatggaaccccaagggcagaattggaatgcgaatcgaagtgttcggatgtgcatacagatcagaagtggttgatcttgatggaaaaagttcccttctctacagatttgatcaaaaatccctgagcccaataaaagacattatttctttgaaattcaaaaccatgcagagtgatgggattctactccacagggaagggccaaatggagatcacatcacactgcaattaagaagagcaagactctttttacttattaattcaggtgaagctaaactgccttccacttccaccctggtcaatctcaccctgggcagcctgctagatgatcagcattggcattcagtgctcatccagcgtttgggcaaacaagtcaacttcacagtggacgaacacaggcatcatttccatgcacggggagaattcaatctcatgaatcttgattatgagggaaatgtgtcattttcttgttcacaaccacaatctatgcccgtgacttttctgagctccaggagttatttagcactgccagacttctctggagaggaggaggtttctgccacttttcaatttcgaacttggaataaggcagggcttctgctgttcagtgaacttcagctgatttcagggggtatcctcctctttctgagtgatggaaaacttaagtcgaatctctaccagccaggaaaattacccagtgacatcacagcaggtgtcgaattaaatgatgggcagtggcattctgtctctttatctgctaaaaagaatcacttgagtgtggcggtggacggccagatggcttctgctgctcctctgctggggcctgagcagatttattcgggtggcacctattattttggaggttgtcctgacaaaagctttggatccaaatgtaaaagtccacttggtggatttcagggatgtatgaggctcatttctatcagcggcaaagtggtagatctgatttcagttcagcaggggtcccttgggaacttcagtgaccttcagatagactcatgtggcatctcagacaggtgtttgcccaactattgtgaacacggtggggagtgttcccagtcctggagcacctttcattgtaactgtaccaacactggttacagaggagctacttgccataactctatctatgagcagtcatgtgaagcctataagcacagaggaaatacttcagggttttactatatagattcagatggaagtggtcccctggaaccatttcttctatattgcaatatgaccgaaactgcatggaccatcatacagcacaacggctctgacttaacaagagtcagaaatactaatccagagaacccatatgctgggtttttcgagtatgtggccagcatggagcaacttcaggccactattaaccgtgcagagcactgtgaacaggagtttacttattactgcaagaagtcacggctggtcaataagcaagatggaacccctctgagttggtgggtaggaagaaccaatgaaacgcaaacctactggggaggttcttcgcctgatcttcaaaaatgtacttgtggattagagggaaactgcattgattctcagtattactgcaattgtgatgctgaccggaatgaatggaccaatgacactggattgcttgcttataaagaacatcttccagtaactaagatcgtgattacagacacaggccgactgcattcagaagcagcttataaactggggcctctgctctgccagggagacagatcattttggaattcagcttcctttgataccgaggcttcatatcttcattttcctaccttccacggagaacttagcgcggatgtatctttcttttttaagacaacagcttcatctggggtatttttagagaacttggggattgctgattttatacggatagagcttcgctctccgacagtagtgactttttcatttgatgtggggaatgggccttttgaaatctcagtgcagtcacccacccacttcaacgacaaccagtggcaccatgtgagggttgaaaggaacatgaaggaggcctcccttcaagtggatcagctgacaccaaagacacagcccgcccccgctgatgggcatgtcctgttacagctcaacagtcagctcttcgtgggtggaacggccaccagacagagaggctttctgggctgcattcggtctctgcagttgaatgggatgaccctggatttggaagaaagagcccaggtgactccagaagtgcagccaggttgtaggggacattgcagcagctatgggaagttatgccgcaatggagggaaatgcagagaaagacccattgggttcttttgtgactgcactttctctgcatacacagggccattctgctcaaatgagatttctgcatattttggatctggctcatccgtgatatacaattttcaagaaaattatcttttaagtaaaaactccagctcccacgctgcttcatttcatggtgatatgaagctgagcagagaaatgatcaaatttagtttccgaacaacacgaacaccaagcttgctgctttttgtgagctccttttacaaagaatacctttctgtgatcattgccaaaaatggaagtttgcagatcaggtacaagttaaataaatatcaagagcctgatgttgttaactttgattttaaaaacatggctgatggacaacttcaccacataatgattaacagagaagaaggagtggtctttatagagattgacgataatagaaggagacaagttcacctgtcatcaggcacagaattcagtgcagtcaaatctctggtattgggcaggattttagaacacagtgatgtggaccaggatactgcactggcaggtgcgcagggcttcacaggctgcctctctgcagtgcagctcagccacgtggcccctctgaaggcagctctgcaccccagccacccagaccctgtcactgttacaggacacgtgactgagtccagctgtatggcccagcctggcactgatgccacatcaagggaaaggacacactcgtttgcagatcattctggaacaatagatgacagagagccccttgctaatgcaatcaaaagtgactctgcagtaattggaggtctgatagctgttgtgatttttatcttgctttgcatcactgccatagctgttcgcatttatcagcagaaaaggttatataaaagaagtgaggcaaaaaggtcagagaatgtagacagtgctgaggctgttctgaaaagtgagcttaatatacaaaatgcagtcaatgaaaatcagaaagagtacttcttctga

SEQ ID NO: 4480 - DNA, 4355 bp, Homo sapiens
  source 1..4355: mol_type = unassigned DNA
tatataattttatgatttttaaagtattttcatattctcctgtctttaagttttttcttttctcattgaacttactagacttctagtaagccctggaagtagtaggcatatttttagagatcttagatcctagtttttgatgttgttgttttacttgttggttgttttgtctattgattccacgaaagcctcagcactaactaaccctaacgtggcattgttcctcctggcagatgactgtgatgatcctcttgtgtctgccttgcctcaggcatccttcagcagttcttccgagctctccagcagtcatggtcctggatttgcaaggctgaatagaagagatggagctggtggctggtctccacttgtgtctaacaaataccagtggttgcagattgaccttggagagagaatggaggtcaccgctgtggccactcaagggggatatggtagctccaactgggtgaccagctacctcctgatgttcagtgatagtggctggaactggaaacaatatcgccaagaggacagcatctggggtttttcaggaaatgcaaatgcagacagtgttgtgtactatagactccagccttctatcaaagccagatttctgcgcttcatccctttggaatggaaccccaagggcagaattggaatgcgaatcgaagtgttcggatgtgcatacagatcagaagtggttgatcttgatggaaaaagttcccttctctacagatttgatcaaaaatccctgagcccaataaaagacattatttctttgaaattcaaaaccatgcagagtgatgggattctactccacagggaagggccaaatggagatcacatcacactgcaattaagaagagcaagactctttttacttattaattcaggtgaagctaaactgccttccacttccaccctggtcaatctcaccctgggcagcctgctagatgatcagcattggcattcagtgctcatccagcgtttgggcaaacaagtcaacttcacagtggacgaacacaggcatcatttccatgcacggggagaattcaatctcatgaatcttgattatgagatcagctttggagggattccagcacctggaaaatcagtgtcattcccacatagaaattttcatggatgtttagaaaatctctattataatggagtggatatcattgatttggccaagcagcaaaaaccacagatcattgctatgggaaatgtgtcattttcttgttcacaaccacaatctatgcccgtgacttttctgagctccaggagttatttagcactgccagacttctctggagaggaggaggtttctgccacttttcaatttcgaacttggaataaggcagggcttctgctgttcagtgaacttcagctgatttcagggggtatcctcctctttctgagtgatggaaaacttaagtcgaatctctaccagccaggaaaattacccagtgacatcacagcaggtgtcgaattaaatgatgggcagtggcattctgtctctttatctgctaaaaagaatcacttgagtgtggcggtggacggccagatggcttctgctgctcctctgctggggcctgagcagatttattcgggtggcacctattattttggaggttgtcctgacaaaagctttggatccaaatgtaaaagtccacttggtggatttcagggatgtatgaggctcatttctatcagcggcaaagtggtagatctgatttcagttcagcaggggtcccttgggaacttcagtgaccttcagatagactcatgtggcatctcagacaggtgtttgcccaactattgtgaacacggtggggagtgttcccagtcctggagcacctttcattgtaactgtaccaacactggttacagaggagctacttgccataactctatctatgagcagtcatgtgaagcctataagcacagaggaaatacttcagggttttactatatagattcagatggaagtggtcccctggaaccatttcttctatattgcaatatgaccgaaactgcatggaccatcatacagcacaacggctctgacttaacaagagtcagaaatactaatccagagaacccatatgctgggtttttcgagtatgtggccagcatggagcaacttcaggccactattaaccgtgcagagcactgtgaacaggagtttacttattactgcaagaagtcacggctggtcaataagcaagatggaacccctctgagttggtgggtaggaagaaccaatgaaacgcaaacctactggggaggttcttcgcctgatcttcaaaaatgtacttgtggattagagggaaactgcattgattctcagtattactgcaattgtgatgctgaccggaatgaatggaccaatgacactggattgcttgcttataaagaacatcttccagtaactaagatcgtgattacagacacaggccgactgcattcagaagcagcttataaactggggcctctgctctgccagggagacagatcattttggaattcagcttcctttgataccgaggcttcatatcttcattttcctaccttccacggagaacttagcgcggatgtatctttcttttttaagacaacagcttcatctggggtatttttagagaacttggggattgctgattttatacggatagagcttcgctctccgacagtagtgactttttcatttgatgtggggaatgggccttttgaaatctcagtgcagtcacccacccacttcaacgacaaccagtggcaccatgtgagggttgaaaggaacatgaaggaggcctcccttcaagtggatcagctgacaccaaagacacagcccgcccccgctgatgggcatgtcctgttacagctcaacagtcagctcttcgtgggtggaacggccaccagacagagaggctttctgggctgcattcggtctctgcagttgaatgggatgaccctggatttggaagaaagagcccaggtgactccagaagtgcagccaggttgtaggggacattgcagcagctatgggaagttatgccgcaatggagggaaatgcagagaaagacccattgggttcttttgtgactgcactttctctgcatacacagggccattctgctcaaatgagatttctgcatattttggatctggctcatccgtgatatacaattttcaagaaaattatcttttaagtaaaaactccagctcccacgctgcttcatttcatggtgatatgaagctgagcagagaaatgatcaaatttagtttccgaacaacacgaacaccaagcttgctgctttttgtgagctccttttacaaagaatacctttctgtgatcattgccaaaaatggaagtttgcagatcaggtacaagttaaataaatatcaagagcctgatgttgttaactttgattttaaaaacatggctgatggacaacttcaccacataatgattaacagagaagaaggagtggtctttatagagattgacgataatagaaggagacaagttcacctgtcatcaggcacagaattcagtgcagtcaaatctctggtattgggcaggattttagaacacagtgatgtggaccaggatactgcactggcaggtgcgcagggcttcacaggctgcctctctgcagtgcagctcagccacgtggcccctctgaaggcagctctgcaccccagccacccagaccctgtcactgttacaggacacgtgactgagtccagctgtatggcccagcctggcactgatgccacatcaagggaaaggacacactcgtttgcagatcattctggaacaatagatgacagagagccccttgctaatgcaatcaaaagtgactctgcagtaattggaggtctgatagctgttgtgatttttatcttgctttgcatcactgccatagctgttcgcatttatcagcagaaaaggttatataaaagaagtgaggcaaaaaggtcagagaatgtagacagtgctgaggctgttctgaaaagtgagcttaatatacaaaatgcagtcaatgaaaatcagaaagagtacttcttctgattggcagctatgatttaacataaaattatgatagtttgttttaatagccaggggttctcaatggaaaaacgaatgctcttacactgaatgtacaggcagtgggcttgcagcactgccatcttgccatgtacaggcttggggtggctccaggaagcctcgtccagtgatatatttctcatagcattcattctatggaacaagaaattagatattgctgttaattttcaactgttctggtatgatctaaaacaagtttaacctgcttaatggctacagtttt

SEQ ID NO: 4481 - DNA, 1856 bp, Homo sapiens
  source 1..1856: mol_type = unassigned DNA
caactaattcagttcacaactcaaaggttcacgtaagtgcttttcctggagacaatgatcagacttcagagtgcaccagaagtactttatttctgtttcccattttaacacacaaaatgttagaaagtcttgcagtcaagggtcaagatttaattaaatgaagagtttttacagcttcattaaggagattcttaaataaatttggctttttattccttttcctacaattgtctggcagtgtaatgttttctacttcatgaattcaatgattattattattgttttgtgtccttgcgttaatttgtgctaagtaccaggaattttacctaactttgttttataccaaatttggttccgtattaaaatggaaatggaaatgtcaacagagtgaaaaagacatcttagaattatcatgaaatagttttgagcccctgtgccctctcaaagtgtcccagggaccactacacgtctacagatcacactttgaggactactgacctaatataatgccagcgttggtaaccattgacatagttaagaatcgcagtacttagaatttgtatttacaactagaagtgttaaaacaacattcctcatatagaaataatttaggcatatttgtatatgtgttattggtcagaatgatttatttacataacccatttctgctgttcagcagtataacaattgaataacaatttcattaaaatgtttacatatttaatcacaaaacagtttaatcattttatgatgttgctactactccataatttcaaaataattaaaactaatatgaagtggccacatggccacatggtcctagagacatatagttaataccttgtgttaaatataaatgcaccaagtaaatccgatataatatgcattcataataaatgtaggtgaacccacaaggctgatagaactcagaaataaactcaacatacaataatactgcttgagccagaaatacctgaagtttttatatttccaatttatatgtagtagatgcttaaagtggaaaatagtgttatgatgacttattaagcaatgaagtcagcacagtttctatttggacagaaattctgactttatatttcttttctctctctaggtctgatagctgttgtgatttttatcttgctttgcatcactgccatagctgttcgcatttatcagcagaaaaggttatataaaagaagtgaggcaaaaaggtcagagaatgtagacagtgctgaggctgttctgaaaagtgagcttaatatacaaaatgcagtcaatgaaaatcagaaagagtacttcttctgattggcagctatgatttaacataaaattatgatagtttgttttaatagccaggggttctcaatggaaaaacgaatgctcttacactgaatgtacaggcagtgggcttgcagcactgccatcttgccatgtacaggcttggggtggctccaggaagcctcgtccagtgatatatttctcatagcattcattctatggaacaagaaattagatattgctgttaattttcaactgttctggtatgatctaaaacaagtttaacctgcttaatggctacagtttttacatgtgaaaactgtagccttggtctcttaaccatgtaatacataagttttgttagaggtaaaaattaaatttggactataatgtccttgctttatttgagaacatttgctgtgtttgcttttgtctcctcgtggtgttattcatagacctggaaatgcttctcagatcctgtgtggccggtgtttgcatcttcagtggccacaagcataataaagcccctttgcctttctctgtattatattcaatacaatacatcaatagtcttg

SEQ ID NO: 4482 - DNA, 4723 bp, Homo sapiens
  source 1..4723: mol_type = unassigned DNA
gcggagctcgagcgctgttgtgtgtttggaaggaaggatgctgctgccaatttgtgggaccgctgctgcgaggagtgggcgtggcctcggcggtgtggatgcttgttaggaaagatgctgagtgcttttcagtgaggagtcagggaggtgtgtgtgagagagagagagaaaagagagagacagagacggggagagagagagggagagagaagagagggaggagggaagaagaaaagacggagggaggtgaggaggaagggagggggagagacagagacctagaggggctgaagacccagacagagctggcagagctactgagaagaggactggagcgctctgagagcctctcaagatcttttgggggagcccaataaatgtgaacatgggatctgtcacgggagctgtcctcaagacgctacttctgttatctactcaaaattggaacagagtcgaagctgggaattcctatgactgtgatgatcctcttgtgtctgccttgcctcaggcatccttcagcagttcttccgagctctccagcagtcatggtcctggatttgcaaggctgaatagaagagatggagctggtggctggtctccacttgtgtctaacaaataccagtggttgcagattgaccttggagagagaatggaggtcaccgctgtggccactcaagggggatatggtagctccaactgggtgaccagctacctcctgatgttcagtgatagtggctggaactggaaacaatatcgccaagaggacagcatctggggtttttcaggaaatgcaaatgcagacagtgttgtgtactatagactccagccttctatcaaagccagatttctgcgcttcatccctttggaatggaaccccaagggcagaattggaatgcgaatcgaagtgttcggatgtgcatacagatcagaagtggttgatcttgatggaaaaagttcccttctctacagatttgatcaaaaatccctgagcccaataaaagacattatttctttgaaattcaaaaccatgcagagtgatgggattctactccacagggaagggccaaatggagatcacatcacactgcaattaagaagagcaagactctttttacttattaattcaggtgaagctaaactgccttccacttccaccctggtcaatctcaccctgggcagcctgctagatgatcagcattggcattcagtgctcatccagcgtttgggcaaacaagtcaacttcacagtggacgaacacaggcatcatttccatgcacggggagaattcaatctcatgaatcttgattatgagggaaatgtgtcattttcttgttcacaaccacaatctatgcccgtgacttttctgagctccaggagttatttagcactgccagacttctctggagaggaggaggtttctgccacttttcaatttcgaacttggaataaggcagggcttctgctgttcagtgaacttcagctgatttcagggggtatcctcctctttctgagtgatggaaaacttaagtcgaatctctaccagccaggaaaattacccagtgacatcacagcaggtgtcgaattaaatgatgggcagtggcattctgtctctttatctgctaaaaagaatcacttgagtgtggcggtggacggccagatggcttctgctgctcctctgctggggcctgagcagatttattcgggtggcacctattattttggaggttgtcctgacaaaagctttggatccaaatgtaaaagtccacttggtggatttcagggatgtatgaggctcatttctatcagcggcaaagtggtagatctgatttcagttcagcaggggtcccttgggaacttcagtgaccttcagatagactcatgtggcatctcagacaggtgtttgcccaactattgtgaacacggtggggagtgttcccagtcctggagcacctttcattgtaactgtaccaacactggttacagaggagctacttgccataactctatctatgagcagtcatgtgaagcctataagcacagaggaaatacttcagggttttactatatagattcagatggaagtggtcccctggaaccatttcttctatattgcaatatgaccgaaactgcatggaccatcatacagcacaacggctctgacttaacaagagtcagaaatactaatccagagaacccatatgctgggtttttcgagtatgtggccagcatggagcaacttcaggccactattaaccgtgcagagcactgtgaacaggagtttacttattactgcaagaagtcacggctggtcaataagcaagatggaacccctctgagttggtgggtaggaagaaccaatgaaacgcaaacctactggggaggttcttcgcctgatcttcaaaaatgtacttgtggattagagggaaactgcattgattctcagtattactgcaattgtgatgctgaccggaatgaatggaccaatgacactggattgcttgcttataaagaacatcttccagtaactaagatcgtgattacagacacaggccgactgcattcagaagcagcttataaactggggcctctgctctgccagggagacagatcattttggaattcagcttcctttgataccgaggcttcatatcttcattttcctaccttccacggagaacttagcgcggatgtatctttcttttttaagacaacagcttcatctggggtatttttagagaacttggggattgctgattttatacggatagagcttcgctctccgacagtagtgactttttcatttgatgtggggaatgggccttttgaaatctcagtgcagtcacccacccacttcaacgacaaccagtggcaccatgtgagggttgaaaggaacatgaaggaggcctcccttcaagtggatcagctgacaccaaagacacagcccgcccccgctgatgggcatgtcctgttacagctcaacagtcagctcttcgtgggtggaacggccaccagacagagaggctttctgggctgcattcggtctctgcagttgaatgggatgaccctggatttggaagaaagagcccaggtgactccagaagtgcagccaggttgtaggggacattgcagcagctatgggaagttatgccgcaatggagggaaatgcagagaaagacccattgggttcttttgtgactgcactttctctgcatacacagggccattctgctcaaatgagatttctgcatattttggatctggctcatccgtgatatacaattttcaagaaaattatcttttaagtaaaaactccagctcccacgctgcttcatttcatggtgatatgaagctgagcagagaaatgatcaaatttagtttccgaacaacacgaacaccaagcttgctgctttttgtgagctccttttacaaagaatacctttctgtgatcattgccaaaaatggtgatttgcagatcaggtacaagttaaataaatatcaagagcctgatgttgttaactttgattttaaaaacatggctgatggacaacttcaccacataatgattaacagagaagaaggagtggtctttatagagattgacgataatagaaggagacaagttcacctgtcatcaggcacagaattcagtgcagtcaaatctctggtattgggcaggattttagaacacagtgatgtggaccaggatactgcactggcaggtgcgcagggcttcacaggctgcctctctgcagtgcagctcagccacgtggcccctctgaaggcagctctgcaccccagccacccagaccctgtcactgttacaggacacgtgactgagtccagctgtatggcccagcctggcactgatgccacatcaagggaaaggacacactcgtttgcagatcattctggaacaatagatgacagagagccccttgctaatgcaatcaaaagtgactctgcagtaattggaggtctgatagctgttgtgatttttatcttgctttgcatcactgccatagctgttcgcatttatcagcagaaaaggttatataaaagaagtgaggcaaaaaggtcagagaatgtagacagtgctgaggctgttctgaaaagtgagcttaatatacaaaatgcagtcaatgaaaatcagaaagagtacttcttctgattggcagctatgatttaacataaaattatgatagtttgttttaatagccaggggttctcaatggaaaaacgaatgctcttacactgaatgtacaggcagtgggcttgcagcactgccatcttgccatgtacaggcttggggtggctccaggaagcctcgtccagtgatatatttctcatagcattcattctatggaacaagaaattagatattgctgttaattttcaactgttctggtatgatctaaaacaagtttaacctgcttaatggctacagtttttacatgtgaaaactgtagccttggtctcttaaccatgtaatacataagttttgttagaggtaaaaattaaatttggactataatgtccttgctttatttgagaacatttgctgtgtttgcttttgtctcctcgtggtgttattcatagacctggaaatgcttctcagatcctgtgtggccggtgtttgcatcttcagtggccacaagcataataaagcccctttgcctttctctgtattatattcaatacaatacatcaatagtcttgaaaaatg

SEQ ID NO: 4483 - DNA, 4867 bp, Homo sapiens
  source 1..4867: mol_type = unassigned DNA
gcggagctcgagcgctgttgtgtgtttggaaggaaggatgctgctgccaatttgtgggaccgctgctgcgaggagtgggcgtggcctcggcggtgtggatgcttgttaggaaagatgctgagtgcttttcagtgaggagtcagggaggtgtgtgtgagagagagagagaaaagagagagacagagacggggagagagagagggagagagaagagagggaggagggaagaagaaaagacggagggaggtgaggaggaagggagggggagagacagagacctagaggggctgaagacccagacagagctggcagagctactgagaagaggactggagcgctctgagagcctctcaagatcttttgggggagcccaataaatgtgaacatgggatctgtcacgggagctgtcctcaagacgctacttctgttatctactcaaaattggaacagagtcgaagctgggaattcctatgactgtgatgatcctcttgtgtctgccttgcctcaggcatccttcagcagttcttccgagctctccagcagtcatggtcctggatttgcaaggctgaatagaagagatggagctggtggctggtctccacttgtgtctaacaaataccagtggttgcagattgaccttggagagagaatggaggtcaccgctgtggccactcaagggggatatggtagctccaactgggtgaccagctacctcctgatgttcagtgatagtggctggaactggaaacaatatcgccaagaggacagcatctggggtttttcaggaaatgcaaatgcagacagtgttgtgtactatagactccagccttctatcaaagccagatttctgcgcttcatccctttggaatggaaccccaagggcagaattggaatgcgaatcgaagtgttcggatgtgcatacagatcagaagtggttgatcttgatggaaaaagttcccttctctacagatttgatcaaaaatccctgagcccaataaaagacattatttctttgaaattcaaaaccatgcagagtgatgggattctactccacagggaagggccaaatggagatcacatcacactgcaattaagaagagcaagactctttttacttattaattcaggtgaagctaaactgccttccacttccaccctggtcaatctcaccctgggcagcctgctagatgatcagcattggcattcagtgctcatccagcgtttgggcaaacaagtcaacttcacagtggacgaacacaggcatcatttccatgcacggggagaattcaatctcatgaatcttgattatgagatcagctttggagggattccagcacctggaaaatcagtgtcattcccacatagaaattttcatggatgtttagaaaatctctattataatggagtggatatcattgatttggccaagcagcaaaaaccacagatcattgctatgggaaatgtgtcattttcttgttcacaaccacaatctatgcccgtgacttttctgagctccaggagttatttagcactgccagacttctctggagaggaggaggtttctgccacttttcaatttcgaacttggaataaggcagggcttctgctgttcagtgaacttcagctgatttcagggggtatcctcctctttctgagtgatggaaaacttaagtcgaatctctaccagccaggaaaattacccagtgacatcacagcaggtgtcgaattaaatgatgggcagtggcattctgtctctttatctgctaaaaagaatcacttgagtgtggcggtggacggccagatggcttctgctgctcctctgctggggcctgagcagatttattcgggtggcacctattattttggaggttgtcctgacaaaagctttggatccaaatgtaaaagtccacttggtggatttcagggatgtatgaggctcatttctatcagcggcaaagtggtagatctgatttcagttcagcaggggtcccttgggaacttcagtgaccttcagatagactcatgtggcatctcagacaggtgtttgcccaactattgtgaacacggtggggagtgttcccagtcctggagcacctttcattgtaactgtaccaacactggttacagaggagctacttgccataactctatctatgagcagtcatgtgaagcctataagcacagaggaaatacttcagggttttactatatagattcagatggaagtggtcccctggaaccatttcttctatattgcaatatgaccgaaactgcatggaccatcatacagcacaacggctctgacttaacaagagtcagaaatactaatccagagaacccatatgctgggtttttcgagtatgtggccagcatggagcaacttcaggccactattaaccgtgcagagcactgtgaacaggagtttacttattactgcaagaagtcacggctggtcaataagcaagatggaacccctctgagttggtgggtaggaagaaccaatgaaacgcaaacctactggggaggttcttcgcctgatcttcaaaaatgtacttgtggattagagggaaactgcattgattctcagtattactgcaattgtgatgctgaccggaatgaatggaccaatgacactggattgcttgcttataaagaacatcttccagtaactaagatcgtgattacagacacaggccgactgcattcagaagcagcttataaactggggcctctgctctgccagggagacagatcattttggaattcagcttcctttgataccgaggcttcatatcttcattttcctaccttccacggagaacttagcgcggatgtatctttcttttttaagacaacagcttcatctggggtatttttagagaacttggggattgctgattttatacggatagagcttcgctctccgacagtagtgactttttcatttgatgtggggaatgggccttttgaaatctcagtgcagtcacccacccacttcaacgacaaccagtggcaccatgtgagggttgaaaggaacatgaaggaggcctcccttcaagtggatcagctgacaccaaagacacagcccgcccccgctgatgggcatgtcctgttacagctcaacagtcagctcttcgtgggtggaacggccaccagacagagaggctttctgggctgcattcggtctctgcagttgaatgggatgaccctggatttggaagaaagagcccaggtgactccagaagtgcagccaggttgtaggggacattgcagcagctatgggaagttatgccgcaatggagggaaatgcagagaaagacccattgggttcttttgtgactgcactttctctgcatacacagggccattctgctcaaatgagatttctgcatattttggatctggctcatccgtgatatacaattttcaagaaaattatcttttaagtaaaaactccagctcccacgctgcttcatttcatggtgatatgaagctgagcagagaaatgatcaaatttagtttccgaacaacacgaacaccaagcttgctgctttttgtgagctccttttacaaagaatacctttctgtgatcattgccaaaaatggtgatttgcagatcaggtacaagttaaataaatatcaagagcctgatgttgttaactttgattttaaaaacatggctgatggacaacttcaccacataatgattaacagagaagaaggagtggtctttatagagattgacgataatagaaggagacaagttcacctgtcatcaggcacagaattcagtgcagtcaaatctctggtattgggcaggattttagaacacagtgatgtggaccaggatactgcactggcaggtgcgcagggcttcacaggctgcctctctgcagtgcagctcagccacgtggcccctctgaaggcagctctgcaccccagccacccagaccctgtcactgttacaggacacgtgactgagtccagctgtatggcccagcctggcactgatgccacatcaagggaaaggacacactcgtttgcagatcattctggaacaatagatgacagagagccccttgctaatgcaatcaaaagtgactctgcagtaattggaggtctgatagctgttgtgatttttatcttgctttgcatcactgccatagctgttcgcatttatcagcagaaaaggttatataaaagaagtgaggcaaaaaggtcagagaatgtagacagtgctgaggctgttctgaaaagtgagcttaatatacaaaatgcagtcaatgaaaatcagaaagagtacttcttctgattggcagctatgatttaacataaaattatgatagtttgttttaatagccaggggttctcaatggaaaaacgaatgctcttacactgaatgtacaggcagtgggcttgcagcactgccatcttgccatgtacaggcttggggtggctccaggaagcctcgtccagtgatatatttctcatagcattcattctatggaacaagaaattagatattgctgttaattttcaactgttctggtatgatctaaaacaagtttaacctgcttaatggctacagtttttacatgtgaaaactgtagccttggtctcttaaccatgtaatacataagttttgttagaggtaaaaattaaatttggactataatgtccttgctttatttgagaacatttgctgtgtttgcttttgtctcctcgtggtgttattcatagacctggaaatgcttctcagatcctgtgtggccggtgtttgcatcttcagtggccacaagcataataaagcccctttgcctttctctgtattatattcaatacaatacatcaatagtcttgaaaaatg

SEQ ID NO: 4484 - DNA, 560 bp, Homo sapiens
  source 1..560: mol_type = unassigned DNA
gattccagctctcgcgcccgacgaggtggatttggctgtccaccgagctccggcgcctgtcgttctaattgggtttggatttgcaccgttaaggaggggggaagagaaggaagaggcgggcgaggaaggcgagtccagctagcggctgttgcggggaccgtagccccagctgcagctccgaagaatcccccgccacggtttcggtggagcgtctgggcacgggatggagtgaaagagcgagtgcctctccaagcgggggtgggagggggtcaggctgtgcagaggagagagacagcgagaagaagccgcggctggctactgcgaatttgggattcgattgggagggaccgctcactcgggggaaatggattctttaccacggctgaccagcgttttgactttgctgttctctggcttgtggcatttaggattaacagcgacaaacttgaggctcttaatagaatggcaagaagaacaagaagtaagaaagcctggagaacaagaagtaagaaagcctgaaagactcaaacactgtataatttttctctgaataagctaat

SEQ ID NO: 4485 - DNA, 5284 bp, Homo sapiens
  source 1..5284: mol_type = unassigned DNA
gattccagctctcgcgcccgacgaggtggatttggctgtccaccgagctccggcgcctgtcgttctaattgggtttggatttgcaccgttaaggaggggggaagagaaggaagaggcgggcgaggaaggcgagtccagctagcggctgttgcggggaccgtagccccagctgcagctccgaagaatcccccgccacggtttcggtggagcgtctgggcacgggatggagtgaaagagcgagtgcctctccaagcgggggtgggagggggtcaggctgtgcagaggagagagacagcgagaagaagccgcggctggctactgcgaatttgggattcgattgggagggaccgctcactcgggggaaatggattctttaccacggctgaccagcgttttgactttgctgttctctggcttgtggcatttaggattaacagcgacaaactacaactgtgatgatccactagcatccctgctctctccaatggctttttccagttcctcagacctcactggcactcacagcccagctcaactcaactggagagttggaactggcggttggtccccagcagattccaatgctcaacagtggctccagatggacctgggaaacagagtagagattacagcagtggccacgcagggaagatacggaagctctgactgggtgacgagttacagcctgatgttcagtgacacaggacgcaactggaaacagtacaaacaagaagacagcatctggacctttgcaggaaacatgaatgctgacagcgtggtgcaccacaagctattgcactcagtgagagcccgatttgttcgctttgtgcccctggaatggaatcccagtgggaagattggcatgagagtcgaggtctacggatgttcctataaatcagatgttgctgactttgatggccgaagctcacttctgtacaggttcaatcagaagttgatgagtactctcaaagatgtgatctccctgaagttcaagagcatgcaaggagatggggtcctgttccatggagaaggtcagcgtggagaccacatcaccttggaactccagaaggggaggctcgccctacacctcaatttgggtgacagcaaagcgcggctcagcagcagcttgccctctgccaccctgggcagcctcctggatgaccagcactggcactcggtcctcattgagcgggtgggcaagcaggtgaacttcacggtggacaagcacacacagcacttccgcaccaagggcgagacggatgccttagacattgactatgagcttagttttggaggaattccagtaccaggaaaacctgggacctttttaaagaaaaacttccatggatgcatcgaaaacctttactacaatggagtaaacataattgacctggctaagagacgaaagcatcagatctatactggcaatgtcactttttcctgctccgaaccacagattgtgcccatcacatttgtcaactccagcggcagctatttgctgctgcccggcaccccccaaattgatgggctctcagtgagtttccagtttcgaacatggaacaaggatggtctgcttctgtccacagagctgtctgagggctcgggaaccctgctgctgagcctggagggtggaatcctgagactcgtgattcagaaaatgacagaacgcgtagctgaaatcctcacaggcagcaacttgaatgatggcctgtggcactcggttagcatcaacgccaggaggaaccgcatcacgctcactctggatgatgaagcagcacccccggctccagacagcacttgggtgcagatttattctggaaatagctactattttggagggtgccccgacaatctcaccgattcccaatgtttaaatcccattaaggctttccaaggctgcatgaggctcatctttattgataaccagcccaaggacctcatttcagttcagcaaggttccctggggaattttagtgatttacacattgatctgtgtagcatcaaagacaggtgtttgccaaactactgtgaacatggaggaagctgctcccagtcctggactaccttctattgtaactgcagtgacacaagttacactggtgccacctgccacaactccatctacgagcaatcctgcgaggtgtacaggcaccaggggaatacagccggcttcttctacatcgactcagatggcagcggcccactgggacctctccaggtgtactgcaatatcactgaggacaagatctggacatcagtgcagcacaacaatacagagctgacccgagtgcggggcgctaaccctgagaagccctatgccatggccttggactacgggggcagcatggaacagctggaggccgtgatcgacggctctgagcactgtgagcaggaggtggcctaccactgcaggaggtcccgcctgctcaacacgccggatggaacaccatttacctggtggattgggcggtccaatgaaaggcacccttactggggaggttcccctcctggggtccagcagtgtgagtgtggcctagacgagagctgcctggacattcagcacttttgcaattgcgacgctgacaaggatgaatggacaaatgatactggctttctttccttcaaagaccacttgcctgtcactcagatagttatcactgataccgacagatcaaactcagaagccgcttggagaattggtcccttgcgttgctatggtgaccgacgcttctggaacgccgtctcattttatacagaagcctcttacctccactttcctaccttccatgcggaattcagtgccgatatttccttcttttttaaaaccacagcattatccggagttttcctagaaaatcttggcattaaagacttcattcgactcgaaataagctctccttcagagatcacctttgccatcgatgttgggaatggtcctgtggagcttgtagtccagtctccttctcttctgaatgacaaccaatggcactatgtccgggctgagaggaacctcaaggagacctccctgcaggtggacaaccttccaaggagcaccagggagacgtcggaggagggccattttcgactgcagctgaacagccagttgtttgtagggggaacgtcatccagacagaaaggcttcctaggatgcattcgctccttacacttgaatggacagaaaatggacctggaagagagggcaaaggtcacatctggagtcaggccaggctgccccggccactgcagcagctacggcagcatctgccacaacgggggcaagtgtgtggagaagcacaatggctacctgtgtgattgcaccaattcaccttatgaagggcccttttgcaaaaaagaggtttctgctgtttttgaggctggcacgtcggttacttacatgtttcaagaaccctatcctgtgaccaagaatataagcctctcatcctcagctatttacacagattcagctccatccaaggaaaacattgcacttagctttgtgacaacccaggcacccagtcttttgctctttatcaattcttcttctcaggacttcgtggttgttctgctctgcaagaatggaagcttacaggttcgctatcacctaaacaaggaagaaacccatgtattcaccattgatgcagataactttgctaacagaaggatgcaccacttgaagattaaccgagagggaagagagcttaccattcagatggaccagcaacttcgactcagttataacttctctccggaagtagagttcagggttataaggtcactcaccttgggcaaagtcacagagaatcttggtttggattctgaagttgctaaagcaaatgccatgggttttgctggatgcatgtcttccgtccagtacaaccacatagcaccactgaaggctgccctgcgccatgccactgtcgcgcctgtgactgtccatgggaccttgacggaatccagctgtggcttcatggtggactcagatgtgaatgcagtgaccacggtgcattcttcatcagatccttttgggaagacagatgagcgggaaccactcacaaatgctgttcgaagtgattcggcagtcatcggaggggtgatagcagtggtgatattcatcatcttctgtatcatcggcatcatgacccggttcctctaccagcacaagcagtcacatcgtacgagccagatgaaggagaaggaatatccagaaaatttggacagttccttcagaaatgaaattgacttgcaaaacacagtgagcgagtgtaaacgggaatatttcatctgagaaactgcagggttcctactactcttttttcttgttgttcaattatctcctccccctcttctctcctgtcttttgatttggtcattctctttattttctgcttgccatgtcttttctggaacatacttgcatccaccacagcatcaattcccttgatccagcccaagagaccaggcagccatggccactgccttcctctctgatgaacctatcgggtgaaaacgaccactcaagagactgacttcgccattcaagacaaggaagagacacatgtgtgcactcctgcatgttcagttctgtacttccagtttctaaaatgcactgttcagttttccaaccacttggtggttcaggcttgctttgaacctgagctcttaggcacatgacggtcattcctgacatcctccccagctcaagtctattcttaccatagaacccagggcagggagagaagaacctagaggcctggtttgctttggtggcattgtaaaaagagtaagagaggtttggtttgtggtggtttgctttctttaccataagcaatcccttgccttaactcatcaccctttttcactatgacccttagaccctgagtattttcaaatatatgattgctgatagtagtgaccaaaactactttgttcctttcttaccactctctcctggggccgacacgttgggacagcacaccatagcataaagctaggggatgcatggaaatagcagcttgaaactaggaggtaacaagaaagcttctaggaagtagatgttccatatcttcaaaatgcctcctccaattttgtaagaatgctagctaggtattcctgggattattatactgagatatatatatatacacacacacacacatatgtgtatatatgtatatatatatgtgagtatatatacacacacacacacacacacacatatatatatatacacacacgcacacatatatgttgctgcagcataaagaaattgaaataaaagtttaaa

SEQ ID NO: 4486 - DNA, 347 bp, Homo sapiens
  source 1..347: mol_type = unassigned DNA
acaactgtgatgatccactagcatccctgctctctccaatggctttttccagttcctcagacctcactggcactcacagcccagctcaactcaactggagagttggaactggcggttggtccccagcagattccaatgctcaacagtggctccagatggacctgggaaacagagtagagattacagcagtggccacgcagggaagatacggaagctctgactgggtgacgagttacagcctgatgttcagtgacacaggacgcaactggaaacagtacaaacaagaagacagcatctgggtaggacatctttttccttccaatgaataaaactgagatgtgctaatg

SEQ ID NO: 4487 - DNA, 4780 bp, Homo sapiens
  source 1..4780: mol_type = unassigned DNA
ctcagggacaacattgccggagaggagctggagctgtccaagtccctgaacgagctcgggataaaggagctctacgcgtgggacaacagaagagaaacctttaggaaatcatcacttggcaatgatgagacagataaagagaagaaaaaatttctgggatttttcaaagttaataaaagaagcaatagtaaggctgagcagctcgtgctgtcgggtgcagacagcgatgaggacacctccagggctgccccaggaaggggtttgaacggctgtttaacgacccccaactccccatccatgcactcacgttctcttacgctgggtccatccctctcgctgggcagcatctcaggggtgtccgtgaagtcggagatgaagaagcgccgagcccctcctcctccaggttcagggccacctgtgcaagacaaggcatcggaaaaggtatctcttgggtcacagattgatttacagaagaagaagcggcgagcgccagctccccctccaccacagccaccaccaccgagtcccctgatccccaaccgcactgaggataaggaggagaacaggaagagcacgatgggtggtggacggcaggtgccacaaaagcctcccagaggcactgctcggggtccaccccagttagtgcttcccccacccccgccctaccctcctcccgacacagacgtggtggagcctctcagctttcccggggaaggcgctggttccgaggcctcagacccgatacccaaactaagcctgcccctggggtctggcagccactgcagcccggatggagccccgcaggtgctgtcagaggcggaggagaccgtgtcagttggcagctgttttgcgtcggaggacacgaccgaggactcaggagtgatgagttccccctcagacatcgtctctctggactcgcagcaggacagcatgaaatacaaagacaagtgggccacagaccaggaagactgcagtgaccaggacctcgctggaaccccagacctgggtccccagaagagccccttgtgggagaagaatggctctgagaactcacatctgagaactgaaaaagctgtcacagcctcaaatgatgaagaagacctattaattgctggagagttccgtaaaacccttgcagaacttgatgaagacctggaagaaatggaagacagctatgaaacagacaccagctccctcaccagctccatccatggtgcatccaaccactgcccacaggatgccatgatccctcacggcgacacagatgcaatcccagtaacattcataggggaagtttcagatgatcctgtggattcggggttgttttccaatagaaacaacaatgctgggtctttcgactcggagggtgttgccagcaggagagactccctggcgccacttcaagctgagcacagccagccccatgaaaaggcaagggaggaagtacctgccctgcaccccgcttcccatgacgtcggaaaaggaatccgtgtggccttatctaacatctctaaagatgggaatctaatggaaacggcgcccagggtgacttcttttgcttcgaatcttcacacagacaacctaaatgcaaaagtgaaagacaaagtgtatggctgtgctgacggggagaggactcaagccacagagagagtgaattcccaaccggtgaatgaaaaggacagcaacgataaaaacgctgccttggcaccaacatcatggcaccaacgaggccaaaacccagggaaaagctacagacttaagcacggcctcacaacgtataaaatcattcctccaaagtcagagatgcgatgttacgacagagatgtgtccctctccaccggagccattaagattgacgagctggggaacttggtgagtcctcacgccaccggcatcaggatcatttccctgtcttcgtctgtgcctgaagcagaatctcagcccattgggaaagtcagagagttctggaggtgcaactctgtggaaaaacacctgggccgaccctcagagagctctgccaggggacccccctccacccctgtgcccacgcagacgcagaatccagagagcagactccaagcagaccccaagccaatatcgccccagcagaagtctgcccaccatgagggccggaaccccctaggggaggggagaaaccagccccccaccatgggcatgggtcacgtgagggtgccagcagctcacaccacagaagtcacatttctcaagcctcagagaagaacgtccagccagtatgtggcctctgccattgccaagcgcataggagccccaaaagtccatgctgatgtggtgaggccacacggttatgccgagaagggttatgcaggcaaggcgccagtgctggctgcaccacctgtcactgtgaaagatgacaggacatccagcccacactcagagacacaaggatggaaggatggtgcccagtggccctgtgtcactcctcccaacaaccacggggaagatttggcagtgggagcccctcctaggggggaggtcattggcccacacaggaagttgtctactcaggacagacctgctgctatccacagaagctcctgtttctcactggttcagtcttcccagagggatcgtgtttctgtgggacagagctgtggtttcagtggaaagcaaagcacaagtagccaggaggccagctcagcatctgagcccagacgcgcacctgatggtacagacccaccccctccacacacatctgacactcaggcctgcagcagggagctggtcaatggctctgtgcgcgccccaggccacggcgagccttcccaccctccaggagggtctggcacagaaagccacattctcctagaaagagaggaaaagcccagtgtgttctctacagatggaaatgaaacagacagtatttggccacccagcatttttgggccgaagaaaaaattcaaacctgttgtccagagaccagtcccaaaagacacatccctgcactctgccctgatggaagccatccactctgcgggagggaaggacagactacgcaagacggcagaacacaccggggagggcaggccagcgaaactgtcctacacggaggcagagggcgaacgatctgcactgctggcagctatccgcgggcacagcggcacctgcagcctgaggaaggtggcatcctctgcttctgaggagctccagagcttccgagatgccgcactctctgctcagggctcggaaagtcctctgctagaagaccttggtcttctgtccccaccagccattcccccaccaccccctccaccctcccaggctctctctgcaccaaggacggcctccaggttcagcacgggcaccctcagcaacaccgcagacgcaaggcaagccttgatggacgccatccgctccggcacaggggctgcgagactgagaaaggtgcccttgctcgtgtgaatgaacagaggccagagaattgcagaaacccacctgtaatatgcccacaggcgtcactcaaggagtctgcatagccaggaacatcaagttttggtgttactttcttgtctacaggccaaatgcgcacagttgattttcggtgtgttcctgtataacggcttgaaaggaaaggagaagatgctgtgtcgctgcgcagctcgtgtgccaaggaaatgtgttttgcctctgaatatcttaagttgctaataaacgattcttgttggcaggttaatgggactataaatgctggagcccagcactcacacttaattatatttatgggcaaagtaaaaagaatcatgccttagactgattttggacctttgagacttttaccacatacagatggatgaaactacttactgatttaagatcttttgaattttagaaaaaacatatgaatcagatggaacaatctgaatgtgatatgctccatgatgctgtgtgttttggtagtaagaaaaaaaaattgggaggcttttcaaaggtggctttgttaggtagtaaaactgctggattcttcttcctcaaatatttggggctaacacttcacagagggtcacagtccatgatctgaccaactaagcttttaaaaatcaactattaccacccagaaaacagtcctacgtgatcatgtggccagggcatgcccgagtcctgcaagggtggcgggtggctgaggtcacaccaccactggagtggatgggcagtgccccacatggacagccattccccaggctatgaagtgacataggcctcccccacggtgcctgtgtacggagcctgatgacttcactgggagccttctggaatcctgcagagggtcaaggagcagggatgttggatgcccacctgtcaagagttcagatcaaagttgcgctgagagcatcacaattttggttcagccttgacgcgtttgtccaacagctcattggctccctttgtatgatatcgtggtcttctcacatggtgcccagtcaccaatatttataatgaggtctaactacagcagtagtttttcatatatatctctaaaacattttgttatattgaaaaaagtaatagaaatcaagatgtgttgatgaaataaaatgtgtatctgagtgagaaaacaagtatggtgaggtcactttaatgtttcacagcgatctcagatctaggcctcaggtagaatggaagctgttctgcattcactgattaacgttgctaaactcttggtgaggcacgagctaccagccaattgctcttcatcacagctatctgtcttttagtgccacaaataaaagaaaatcaaatctta

SEQ ID NO: 4488 - DNA, 4660 bp, Homo sapiens
  source 1..4660: mol_type = unassigned DNA
ctgaaagaaaaagttcctgaagagaaggttaagcctggtccccctaaggtgcctgagaaatctgtgcgtttggtcgtgaattacctgcggacacaaaaagctgttgtgcgtgtgagccctgaggttcctctccagaatattctcccagtcatttgtgcaaagtgtgaggtcagcccagagcacgtggttctcctcagggacaacattgccggagaggagctggagctgtccaagtccctgaacgagctcgggataaaggagctctacgcgtgggacaacagaagagaaacctttaggaaatcatcacttggcaatgatgagacagataaagagaagaaaaaatttctgggatttttcaaagttaataaaagaagcaatagtaaggctgagcagctcgtgctgtcgggtgcagacagcgatgaggacacctccagggctgccccaggaaggggtttgaacggctgtttaacgacccccaactccccatccatgcactcacgttctcttacgctgggtccatccctctcgctgggcagcatctcaggggtgtccgtgaagtcggagatgaagaagcgccgagcccctcctcctccaggttcagggccacctgtgcaagacaaggcatcggaaaaggtatctcttgggtcacagattgatttacagaagaagaagcggcgagcgccagctccccctccaccacagccaccaccaccgagtcccctgatccccaaccgcactgaggataaggaggagaacaggaagagcacgatggtaagcctgcccctggggtctggcagccactgcagcccggatggagccccgcaggtgctgtcagaggcggaggagaccgtgtcagttggcagctgttttgcgtcggaggacacgaccgaggactcaggagtgatgagttccccctcagacatcgtctctctggactcgcagcaggacagcatgaaatacaaagacaagtgggccacagaccaggaagactgcagtgaccaggacctcgctggaaccccagacctgggtccccagaagagccccttgtgggagaagaatggctctgagaactcacatctgagaactgaaaaagctgtcacagcctcaaatgatgaagaagacctattaattgctggagagttccgtaaaacccttgcagaacttgatgaagacctggaagaaatggaagacagctatgaaacagacaccagctccctcaccagctccatccatggtgcatccaaccactgcccacaggatgccatgatccctcacggcgacacagatgcaatcccagtaacattcataggggaagtttcagatgatcctgtggattcggggttgttttccaatagaaacaacaatgctgggtctttcgactcggagggtgttgccagcaggagagactccctggcgccacttcaagctgagcacagccagccccatgaaaaggcaagggaggaagtacctgccctgcaccccgcttcccatgacgtcggaaaaggaatccgtgtggccttatctaacatctctaaagatgggaatctaatggaaacggcgcccagggtgacttcttttgcttcgaatcttcacacagacaacctaaatgcaaaagtgaaagacaaagtgtatggctgtgctgacggggagaggactcaagccacagagagagtgaattcccaaccggtgaatgaaaaggacagcaacgataaaaacgctgccttggcaccaacatcatggcaccaacgaggccaaaacccagggaaaagctacagacttaagcacggcctcacaacgtataaaatcattcctccaaagtcagagatgcgatgttacgacagagatgtgtccctctccaccggagccattaagattgacgagctggggaacttggtgagtcctcacgccaccggcatcaggatcatttccctgtcttcgtctgtgcctgaagcagaatctcagcccattgggaaagtcagagagttctggaggtgcaactctgtggaaaaacacctgggccgaccctcagagagctctgccaggggacccccctccacccctgtgcccacgcagacgcagaatccagagagcagactccaagcagaccccaagccaatatcgccccagcagaagtctgcccaccatgagggccggaaccccctaggggaggggagaaaccagccccccaccatgggcatgggtcacgtgagggtgccagcagctcacaccacagaagtcacatttctcaagcctcagagaagaacgtccagccagtatgtggcctctgccattgccaagcgcataggagccccaaaagtccatgctgatgtggtgaggccacacggttatgccgagaagggttatgcaggcaaggcgccagtgctggctgcaccacctgtcactgtgaaagatgacaggacatccagcccacactcagagacacaaggatggaaggatggtgcccagtggccctgtgtcactcctcccaacaaccacggggaagatttggcagtgggagcccctcctaggggggaggtcattggcccacacaggaagttgtctactcaggacagacctgctgctatccacagaagctcctgtttctcactggttcagtcttcccagagggatcgtgtttctgtgggacagagctgtggtttcagtggaaagcaaagcacaagtagccaggaggccagctcagcatctgagcccagacgcgcacctgatggtacagacccaccccctccacacacatctgacactcaggcctgcagcagggagctggtcaatggctctgtgcgcgccccaggccacggcgagccttcccaccctccaggagggtctggcacagaaagccacattctcctagaaagagaggaaaagcccagtgtgttctctacagatggaaatgaaacagacagtatttggccacccagcatttttgggccgaagaaaaaattcaaacctgttgtccagagaccagtcccaaaagacacatccctgcactctgccctgatggaagccatccactctgcgggagggaaggacagactacgcaagacggcagaacacaccggggagggcaggccagcgaaactgtcctacacggaggcagagggcgaacgatctgcactgctggcagctatccgcgggcacagcggcacctgcagcctgaggaaggctctctctgcaccaaggacggcctccaggttcagcacgggcaccctcagcaacaccgcagacgcaaggcaagccttgatggacgccatccgctccggcacaggggctgcgagactgagaaaggtgcccttgctcgtgtgaatgaacagaggccagagaattgcagaaacccacctgtaatatgcccacaggcgtcactcaaggagtctgcatagccaggaacatcaagttttggtgttactttcttgtctacaggccaaatgcgcacagttgattttcggtgtgttcctgtataacggcttgaaaggaaaggagaagatgctgtgtcgctgcgcagctcgtgtgccaaggaaatgtgttttgcctctgaatatcttaagttgctaataaacgattcttgttggcaggttaatgggactataaatgctggagcccagcactcacacttaattatatttatgggcaaagtaaaaagaatcatgccttagactgattttggacctttgagacttttaccacatacagatggatgaaactacttactgatttaagatcttttgaattttagaaaaaacatatgaatcagatggaacaatctgaatgtgatatgctccatgatgctgtgtgttttggtagtaagaaaaaaaaattgggaggcttttcaaaggtggctttgttaggtagtaaaactgctggattcttcttcctcaaatatttggggctaacacttcacagagggtcacagtccatgatctgaccaactaagcttttaaaaatcaactattaccacccagaaaacagtcctacgtgatcatgtggccagggcatgcccgagtcctgcaagggtggcgggtggctgaggtcacaccaccactggagtggatgggcagtgccccacatggacagccattccccaggctatgaagtgacataggcctcccccacggtgcctgtgtacggagcctgatgacttcactgggagccttctggaatcctgcagagggtcaaggagcagggatgttggatgcccacctgtcaagagttcagatcaaagttgcgctgagagcatcacaattttggttcagccttgacgcgtttgtccaacagctcattggctccctttgtatgatatcgtggtcttctcacatggtgcccagtcaccaatatttataatgaggtctaactacagcagtagtttttcatatatatctctaaaacattttgttatattgaaaaaagtaatagaaatcaagatgtgttgatgaaataaaatgtgtatctgagtgagaaaacaagtatggtgaggtcactttaatgtttcacagcgatctcagatctaggcctcaggtagaatggaagctgttctgcattcactgattaacgttgctaaactcttggtgaggcacgagctaccagccaattgctcttcatcacagctatctgtcttttagtgccacaaataaaagaaaatcaaatctta

SEQ ID NO: 4489 - DNA, 5291 bp, Homo sapiens
  source 1..5291: mol_type = unassigned DNA
ccagccccttccgtccgccgcgctccgccgctgtcctccgccggcccgcgtgggaggacgatgggtcagcgcggaaaaagtgaatgagggcggcagcggtggcggcggtagccagcgcctgactcggcgggcccggagcaccgcccgcgtcccggcccccggcaccatggacgcgccgcgcgcctcggcggccaagcccccgaccgggaggaagatgaaggctcgtgctcccccacctcctggaaaggctgccactctgcatgtgcacagtgaccagaagcccccccacgatggggccctcgggtcgcagcagaacttggttcgcatgaaggaggcgctgagggccagcaccatggacgtcaccgtggtcctgcctagtgggctggagaagaggagcgtgctcaatgggagccatgcgatgatggacctactggttgaactttgccttcagaaccacctgaatccatcccaccatgcccttgaaattcggtcttcagaaacccaacaacctttgagttttaagccaaatactttgattgggaccctgaatgtgcatactgtgtttctgaaagaaaaagttcctgaagagaaggttaagcctggtccccctaaggtgcctgagaaatctgtgcgtttggtcgtgaattacctgcggacacaaaaagctgttgtgcgtgtgagccctgaggttcctctccagaatattctcccagtcatttgtgcaaagtgtgaggtcagcccagagcacgtggttctcctcagggacaacattgccggagaggagctggagctgtccaagtccctgaacgagctcgggataaaggagctctacgcgtgggacaacagaagagaaacctttaggaaatcatcacttggcaatgatgagacagataaagagaagaaaaaatttctgggatttttcaaagttaataaaagaagcaatagtaagggctgtttaacgacccccaactccccatccatgcactcacgttctcttacgctgggtccatccctctcgctgggcagcatctcaggggtgtccgtgaagtcggagatgaagaagcgccgagcccctcctcctccaggttcagggccacctgtgcaagacaaggcatcggaaaaggtatctcttgggtcacagattgatttacagaagaagaagcggcgagcgccagctccccctccaccacagccaccaccaccgagtcccctgatccccaaccgcactgaggataaggaggagaacaggaagagcacgatggtaagcctgcccctggggtctggcagccactgcagcccggatggagccccgcaggtgctgtcagaggcggaggagaccgtgtcagttggcagctgttttgcgtcggaggacacgaccgaggactcaggagtgatgagttccccctcagacatcgtctctctggactcgcagcaggacagcatgaaatacaaagacaagtgggccacagaccaggaagactgcagtgaccaggacctcgctggaaccccagacctgggtccccagaagagccccttgtgggagaagaatggctctgagaactcacatctgagaactgaaaaagctgtcacagcctcaaatgatgaagaagacctattaattgctggagagttccgtaaaacccttgcagaacttgatgaagacctggaagaaatggaagacagctatgaaacagacaccagctccctcaccagctccatccatggtgcatccaaccactgcccacaggatgccatgatccctcacggcgacacagatgcaatcccagtaacattcataggggaagtttcagatgatcctgtggattcggggttgttttccaatagaaacaacaatgctgggtctttcgactcggagggtgttgccagcaggagagactccctggcgccacttcaagctgagcacagccagccccatgaaaaggcaagggaggaagtacctgccctgcaccccgcttcccatgacgtcggaaaaggaatccgtgtggccttatctaacatctctaaagatgggaatctaatggaaacggcgcccagggtgacttcttttgcttcgaatcttcacacagacaacctaaatgcaaaagtgaaagacaaagtgtatggctgtgctgacggggagaggactcaagccacagagagagtgaattcccaaccggtgaatgaaaaggacagcaacgataaaaacgctgccttggcaccaacatcatggcaccaacgaggccaaaacccagggaaaagctacagacttaagcacggcctcacaacgtataaaatcattcctccaaagtcagagatgcgatgttacgacagagatgtgtccctctccaccggagccattaagattgacgagctggggaacttggtgagtcctcacgccaccggcatcaggatcatttccctgtcttcgtctgtgcctgaagcagaatctcagcccattgggaaagtcagagagttctggaggtgcaactctgtggaaaaacacctgggccgaccctcagagagctctgccaggggacccccctccacccctgtgcccacgcagacgcagaatccagagagcagactccaagcagaccccaagccaatatcgccccagcagaagtctgcccaccatgagggccggaaccccctaggggaggggagaaaccagccccccaccatgggcatgggtcacgtgagggtgccagcagctcacaccacagaagtcacatttctcaagcctcagagaagaacgtccagccagtatgtggcctctgccattgccaagcgcataggagccccaaaagtccatgctgatgtggtgaggccacacggttatgccgagaagggttatgcaggcaaggcgccagtgctggctgcaccacctgtcactgtgaaagatgacaggacatccagcccacactcagagacacaaggatggaaggatggtgcccagtggccctgtgtcactcctcccaacaaccacggggaagatttggcagtgggagcccctcctaggggggaggtcattggcccacacaggaagttgtctactcaggacagacctgctgctatccacagaagctcctgtttctcactggttcagtcttcccagagggatcgtgtttctgtgggacagagctgtggtttcagtggaaagcaaagcacaagtagccaggaggccagctcagcatctgagcccagacgcgcacctgatggtacagacccaccccctccacacacatctgacactcaggcctgcagcagggagctggtcaatggctctgtgcgcgccccaggccacggcgagccttcccaccctccaggagggtctggcacagaaagccacattctcctagaaagagaggaaaagcccagtgtgttctctacagatggaaatgaaacagacagtatttggccacccagcatttttgggccgaagaaaaaattcaaacctgttgtccagagaccagtcccaaaagacacatccctgcactctgccctgatggaagccatccactctgcgggagggaaggacagactacgcaagacggcagaacacaccggggagggcaggccagcgaaactgtcctacacggaggcagagggcgaacgatctgcactgctggcagctatccgcgggcacagcggcacctgcagcctgaggaaggtggcatcctctgcttctgaggagctccagagcttccgagatgccgcactctctgctcagggctcggaaagtcctctgctagaagaccttggtcttctgtccccaccagccattcccccaccaccccctccaccctcccaggctctctctgcaccaaggacggcctccaggttcagcacgggcaccctcagcaacaccgcagacgcaaggcaagccttgatggacgccatccgctccggcacaggggctgcgagactgagaaaggtgcccttgctcgtgtgaatgaacagaggccagagaattgcagaaacccacctgtaatatgcccacaggcgtcactcaaggagtctgcatagccaggaacatcaagttttggtgttactttcttgtctacaggccaaatgcgcacagttgattttcggtgtgttcctgtataacggcttgaaaggaaaggagaagatgctgtgtcgctgcgcagctcgtgtgccaaggaaatgtgttttgcctctgaatatcttaagttgctaataaacgattcttgttggcaggttaatgggactataaatgctggagcccagcactcacacttaattatatttatgggcaaagtaaaaagaatcatgccttagactgattttggacctttgagacttttaccacatacagatggatgaaactacttactgatttaagatcttttgaattttagaaaaaacatatgaatcagatggaacaatctgaatgtgatatgctccatgatgctgtgtgttttggtagtaagaaaaaaaaattgggaggcttttcaaaggtggctttgttaggtagtaaaactgctggattcttcttcctcaaatatttggggctaacacttcacagagggtcacagtccatgatctgaccaactaagcttttaaaaatcaactattaccacccagaaaacagtcctacgtgatcatgtggccagggcatgcccgagtcctgcaagggtggcgggtggctgaggtcacaccaccactggagtggatgggcagtgccccacatggacagccattccccaggctatgaagtgacataggcctcccccacggtgcctgtgtacggagcctgatgacttcactgggagccttctggaatcctgcagagggtcaaggagcagggatgttggatgcccacctgtcaagagttcagatcaaagttgcgctgagagcatcacaattttggttcagccttgacgcgtttgtccaacagctcattggctccctttgtatgatatcgtggtcttctcacatggtgcccagtcaccaatatttataatgaggtctaactacagcagtagtttttcatatatatctctaaaacattttgttatattgaaaaaagtaatagaaatcaagatgtgttgatgaaataaaatgtgtatctgagtgagaaaacaagtatggtgaggtcactttaatgtttcacagcgatctcagatctaggcctcaggtagaatggaagctgttctgcattcactgattaacgttgctaaactcttggtgaggcacgagctaccagccaattgctcttcatcacagctatctgtcttttagtgccacaaataaaagaaaatcaaatctta

SEQ ID NO: 4490 - DNA, 7697 bp, Homo sapiens
  source 1..7697: mol_type = unassigned DNA
taagaactttgtgactgcggaatcattgagaaacattttctacattccagaccgcttctagaactctgaaactttgtgactgcatttacaaaggagtgtttaaaacacatgtgagaccttggagagctgcaccgtccagtatgtgtgtggctgccgagcgcttgccaagtgtctggtccaaattgacatgtgctgttaagtgtaaaatatacatcaaatctggtacagaaagaaataattttatattaattattggcagaaatcactaaattgttttattaaaattctacctatttctttatacattttcaatgttattataaaaatattttaaattatacatgtggctcatgttatattgggcaccattgttctaggactctgaagctttgctaatacaggaacatttacaaatggaagggggaggttaagcacatacgactatcatcaactgcatattttcccaggcttcttgcctttagttaatcaagtaatcactttgaaatcacaggagttggtttggttgtcattagcaaattggattgctacctaaaagcaacatctctctcctctcagactttttttttttttcattaattctgccactgtactagcctcatcaaaaagaaaaagtgacctcatgtgctatgaacccatcttgtacatttcggattggtcagattcagcccattctccctcatagcaaatgaaaacaacaaatcaaaaagcgcttttggctcctggcactaactgaatttgactgtccctagttctcgtttttgctggaggctggggtatgaatgcagaggctcagcaagccctgcacacacccggctgggtggatcggtcagcctgccaccctccgaccatcccaagaggctgggcccaaggacgcaggtccacttcctgggcagactctggtttgaaacttgccggtgctgagctgtgtccctcatattgcatgccccagtagcctaaacattcacattccctgcagagtccccaactccgtgtgagaaaataactgcaatacttattcaacacatgcagcctgatatcaaaatgtcttccctgtgtttgtttgcatttatttccttgatcttaagccagaacaaactgtcaataaggaacgtttctaaagattgaggtatgtgttggtgggggggaaggaagcccgggagaaaaacatctgggcaggtttactttaagctaacagaggctgatgtttcttgctgactgctaactcttcagggacacatacctagggctcccctgctaagcccacagggaactggcctccaagcccagtgactaagggcataaatctggtggttttgcaaagagagaggaatgtttataatccattagtaaccctttggagagaagtagatgggagttagtaaggaaggaaaatactgctgtctctccctcctgctttcttacactggaaagtaaaatcactacattgccattggctctggcttttgctagataatccattcatacatgctcagaacacagccgccctgttttgcatcaaaagaagagcaggctgctcctctttcctctctcagagatgccaggagcttggcagcctcaggaggaacaccaaacaaggtcctgggctgcgtggtggccagaccttccctcactccacggtgcacacaggctgggagctcctagctcatgtccactctttctttcagggcaagcagggccccaaggagccagccccacactgaagtgtgggggagcaaagctggagcagaggtgggatgcagaggtaccagcattgcctggaaccaagcagcagcgtccggggcaacctctatagagtgccaagtgaggccagtggtgggagggagctggacaggaaaaaacacagggatgaaggactagggctgagcacagggtccccagactccagaaaggcagctgtaactggtggataggggagaaaccagctcagaagcagccccaagcgcctggagctgggctcctgctgtttctagagggcagggagcccggagcctgggaggaggaaggtgttgaagggctgagactgttcagaccttgtacagcctctctgttacagtttcaggctgacagccacgcactaagattgctaggcactcagtaacaaaataaagtgcttactgtgtgcagtgtaagaagaatgcagactcctttgcaggaaagaattcttgttcactaaaggacaaaattatccttttaaattttgctggctaaaaatttgctctgtcactcaagctgctttgaactcaaccaagcacagttctaaagaaaaagggtaaaatattcatcctaattcatccttttccttaagtcatgctggttggtttcttgttagatttctgtctccgccttgtccaaaggtatttgctatttttaaatcatcacagtgtttctatatatgtgtgtgctgatttcttcacataacatgctaacataagcatggatgtgtgtttctacatagacttaatgatcatcatatttactgattttaatgccctttgaaatatatatgtaataatttaggtaactgcctagtgctggacatttctagaattcttacatgaactttgttgtatttatatttttccttctatagggtttccttaaagcagattattaaaaaagagattaatgggccaaagttcttacaaagataacgtgatttttgtttgtgtgttttttgatatgtatttccacattgctttccaattaaaacctgtagcaacaagtgtgggtctgtcagattcatcacatcttcatcagcttggggtgggtttttgttttgttttgttttgttttgctattttgcaaaatggtagaatcagtggagtttttatcttattattttttttaattcttattgatatcattatgttccatgtctcatagtgacgtgatcaagcatactttaaaataaaggcaaatactttgaagtaaaagtatgtctgtaattttgtttggctgggctttaagcatcctaaactaagagcaagcatttaaaaagttttccatctttccaagtatttaaatctcttttccatttcagattgctcttttatatggcaatttccatttttctctgccatatattttattaaaaatttaaatgtatttaaaccatctcattccatgaaagagaaaagcagaactttagtaaagtgcattcaaataattaaagtccatggcaaaagcaatagggaagacagtcatgcacctcttgtggtccttattaatgggtccacatgcacacacatctccaaccagccccctttgtgtagcttgtcagaggacattagctgagactaatctggaagccacttcctggctcccaaatggacatagtcaccaaatcagaaagactcatttatcagaataaaaactttgctacgtgaggattgtgcaaagcttatttcatgcatcattatctgggcctgattagcagtgatggaaattggtcctcaatttttaacaatcagcggaaaacaaaccttcagctttcactgaagatagacaattgccatagacatgtctctgtgttttctgcacaataggaaaatagaggcaagagcccttgcaaagacagtttttaaattgttttggcagcagttgtctcacagatgccattgtccctgtgacgcaaatgaagccagatcccgctctctgagcagacgggttgacatcttcctggatgccccgtgccacaggggccacattattatgtgttgtggccccagatgcagctggtccttcttgggctttgggggcaggcaggcctggttccagatgccagtgtgacctgggcagctctgtagtctctccgtacatagtttcatcactgtacaacagtgacaacaacactacctgcctgaaaaactgtgagggttataataagataatttatgcaaaagagctctgtgcgggggctggcacaaaggcatgcagacaggcctcacactgctaggagcttcctcctgttaagtctgagaggaggcccttgggaagggtcttgcggagtcaagggtggagcagttactcctgctactgttgctgtgaggttttttggccatccttattgtccttatgtcccagttcaagattctagggagtacagctcttcaagtggcattatcaggcccccaagccctgcccctgcaagtggcattatcaggctccctgtcacccaccaagggtaggaattaagccaaagtaaacatagagtctgtaaaagtcatttatagtagaggagtgaaatttctcgttttctgagtctggcagggtgggctactgctagggtggacacagatggaggctgagcttatgaagttggtgggacttctgggaacactcccccatgcagccctgcacaaccctccccacggacctcctaacagcaggcagatcctgcaccagaggtatgtagcctttatcactgggaccttgaacgacgctgcactcaaatccgcaagtgccaaggaacagccgggctgtgcagtgttgaggtgaggtggaccagcctccagccacgtgcacatgcttggcctccagatggcttcactccttcttgccaggtgccaggtgcaggggactgctgtagcgcaaggcacagatgcaagcaaatcctggatcacgtgaaccgtcttttgtgcggtggaattaaaactttgacttcagtctgcagagtgaatgaaagctgtgtgtggtttggttactgtaacactttggggccccacacacacaccatatatcacatgtccaccacatacaagacatatactccacacatgcacacacgctacacgcatcccacacatacctgtgcacacacatgggggacacacacacccatgaacaatctgcgtctccgtagttctgaggacaacagcagtacagtgagtatgtgactgcttgaatttgagtatgagctgttctatcctcagatattcctggaaaggagtacattaaatcaatagtaagagaaatgagtgctcctttctctttggtcttccctagaactgaaaaagctgtcacagcctcaaatgatgaagaagacctattaattgctggagagttccgtaaaacccttgcagaacttgatgaagacctggaagaaatggaagacagctatgaaacagacaccagctccctcaccagctccatccatggtgcatccaaccactgcccacaggatgccatgatccctcacggcgacacagatgcaatcccagtaacattcataggggaagtttcagatgatcctgtggattcggggttgttttccaatagaaacaacaatgctgggtctttcgactcggagggtgttgccagcaggagagactccctggcgccacttcaagctgagcacagccagccccatgaaaaggcaagggaggaagtacctgccctgcaccccgcttcccatgacgtcggaaaaggaatccgtgtggccttatctaacatctctaaagatgggaatctaatggaaacggcgcccagggtgacttcttttgcttcgaatcttcacacagacaacctaaatgcaaaagtgaaagacaaagtgtatggctgtgctgacggggagaggactcaagccacagagagagtgaattcccaaccggtgaatgaaaaggacagcaacgataaaaacgctgccttggcaccaacatcatggcaccaacgaggccaaaacccagggaaaagctacagacttaagcacggcctcacaacgtataaaatcattcctccaaagtcagagatgcgatgttacgacagagatgtgtccctctccaccggagccattaagattgacgagctggggaacttggtgagtcctcacgccaccggcatcaggatcatttccctgtcttcgtctgtgcctgaagcagaatctcagcccattgggaaagtcagagagttctggaggtgcaactctgtggaaaaacacctgggccgaccctcagagagctctgccaggggacccccctccacccctgtgcccacgcagacgcagaatccagagagcagactccaagcagaccccaagccaatatcgccccagcagaagtctgcccaccatgagggccggaaccccctaggggaggggagaaaccagccccccaccatgggcatgggtcacgtgagggtgccagcagctcacaccacagaagtcacatttctcaagcctcagagaagaacgtccagccagtatgtggcctctgccattgccaagcgcataggagccccaaaagtccatgctgatgtggtgaggccacacggttatgccgagaagggttatgcaggcaaggcgccagtgctggctgcaccacctgtcactgtgaaagatgacaggacatccagcccacactcagagacacaaggatggaaggatggtgcccagtggccctgtgtcactcctcccaacaaccacggggaagatttggcagtgggagcccctcctaggggggaggtcattggcccacacaggaagttgtctactcaggacagacctgctgctatccacagaagctcctgtttctcactggttcagtcttcccagagggatcgtgtttctgtgggacagagctgtggtttcagtggaaagcaaagcacaagtagccaggaggccagctcagcatctgagcccagacgcgcacctgatggtacagacccaccccctccacacacatctgacactcaggcctgcagcagggagctggtcaatggctctgtgcgcgccccaggccacggcgagccttcccaccctccaggagggtctggcacagaaagccacattctcctagaaagagaggaaaagcccagtgtgttctctacagatggaaatgaaacagacagtatttggccacccagcatttttgggccgaagaaaaaattcaaacctgttgtccagagaccagtcccaaaagacacatccctgcactctgccctgatggaagccatccactctgcgggagggaaggacagactacgcaagacggcagaacacaccggggagggcaggccagcgaaactgtcctacacggaggcagagggcgaacgatctgcactgctggcagctatccgcgggcacagcggcacctgcagcctgaggaaggtggcatcctctgcttctgaggagctccagagcttccgagatgccgcactctctgctcagggctcggaaagtcctctgctagaagaccttggtcttctgtccccaccagccattcccccaccaccccctccaccctcccaggctctctctgcaccaaggacggcctccaggttcagcacgggcaccctcagcaacaccgcagacgcaaggcaagccttgatggacgccatccgctccggcacaggggctgcgagactgagaaaggtgcccttgctcgtgtgaatgaacagaggccagagaattgcagaaacccacctgtaatatgcccacaggcgtcactcaaggagtctgcatagccaggaacatcaagttttggtgttactttcttgtctacaggccaaatgcgcacagttgattttcggtgtgttcctgtataacggcttgaaaggaaaggagaagatgctgtgtcgctgcgcagctcgtgtgccaaggaaatgtgttttgcctctgaatatcttaagttgctaataaacgattcttgttggcaggttaa

SEQ ID NO: 4491 - DNA, 1842 bp, Homo sapiens
  source 1..1842: mol_type = unassigned DNA
ccatgcgatgatggacctactggttgaactttgccttcagaaccacctgaatccatcccaccatgcccttgaaattcggtcttcagaaacccaacaacctttgagttttaagccaaatactttgattgggaccctgaatgtgcatactgtgtttctgaaagaaaaagttcctgaagagaaggttaagcctggtccccctaaggtgcctgagaaatctgtgcgtttggtcgtgaattacctgcggacacaaaaagctgttgtgcgtgtgagccctgaggttcctctccagaatattctcccagtcatttgtgcaaagtgtgaggtcagcccagagcacgtggttctcctcagggacaacattgccggagaggagctggagctgtccaagtccctgaacgagctcgggataaaggagctctacgcgtgggacaacagaagagaaacctttaggaaatcatcacttggcaatgatgagacagataaagagaagaaaaaatttctgggatttttcaaagttaataaaagaagcaatagtaagggctgtttaacgacccccaactccccatccatgcactcacgttctcttacgctgggtccatccctctcgctgggcagcatctcaggggtgtccgtgaagtcggagatgaagaagcgccgagcccctcctcctccaggttcagggccacctgtgcaagacaaggcatcggaaaaggtatctcttgggtcacagattgatttacagaagaagaagcggcgagcgccagctccccctccaccacagccaccaccaccgagtcccctgatccccaaccgcactgaggataaggaggagaacaggaagagcacgatgggtggtggacggcaggtgccacaaaagcctcccagaggcactgctcggggtccaccccagttagtgcttcccccacccccgccctaccctcctcccgacacagacgtggtggagcctctcagctttcccggggaaggcgctggttccgaggcctcagacccgatacccaaactaagcctgcccctggggtctggcagccactgcagcccggatggagccccgcaggtgctgtcagaggcggaggagaccgtgtcagttggcagctgttttgcgtcggaggacacgaccgaggactcaggagtgatgagttccccctcagacatcgtctctctggactcgcagcaggacagcatgaaatacaaagacaagtgggccacagaccaggaagactgcagtgaccaggacctcgctggaaccccagacctgggtccccagaagagccccttgtgggagaagaatggctctgagaactcacatctgagaactgaaaaagctgtcacagcctcaaatgatgaagaagacctattaattgctggagagttccgtaaaacccttgcagaacttgatgaagacctggaagaaatggaagacagctatgaaacagacaccagctccctcaccagctccatccatggtgcatccaaccactgcccacaggatgccatgatccctcacggcgacacagatgcaatcccagtaacattcataggggaagtttcagatgatcctgtggattcggggttgttttccaatagaaacaacaatgctgggtctttcgactcggagggtgttgccagcaggagagactccctggcgccacttcaagctgagcacagccagccccatgaaaaggcaagggaggaagtacctgccctgcaccccgcttcccatgacgtcggaaaaggaatccgtgtggccttatctaacatctctaaagatgggaatctaatggaaacggcgcccagggtgacttcttttgcttcgaatcttca

SEQ ID NO: 4492 - DNA, 2332 bp, Homo sapiens
  source 1..2332: mol_type = unassigned DNA
ccgcccgctagagacgattccagccccttccgtccgccgcgctccgccgctgtcctccgccggcccgcgtgggaggacgatgggtcagcgcggaaaaagtgaatgagggcggcagcggtggcggcggtagccagcgcctgactcggcgggcccggagcaccgcccgcgtcccggcccccggcaccatggacgcgccgcgcgcctcggcggccaagcccccgaccgggaggaagatgaaggctcgtgctcccccacctcctggaaaggctgccactctgcatgtgcacagtgaccagaagcccccccacgatggggccctcgggtcgcagcagaacttggttcgcatgaaggaggcgctgagggccagcaccatggacgtcaccgtggtcctgcctagtgggctggagaagaggagcgtgctcaatgggagccatgcgatgatggacctactggttgaactttgccttcagaaccacctgaatccatcccaccatgcccttgaaattcggtcttcagaaacccaacaacctttgagttttaagccaaatactttgattgggaccctgaatgtgcatactgtgtttctgaaagaaaaagttcctgaagagaaggttaagcctggtccccctaaggtgcctgagaaatctgtgcgtttggtcgtgaattacctgcggacacaaaaagctgttgtgcgtgtgagccctgaggttcctctccagaatattctcccagtcatttgtgcaaagtgtgaggtcagcccagagcacgtggttctcctcagggacaacattgccggagaggagctggagctgtccaagtccctgaacgagctcgggataaaggagctctacgcgtgggacaacagaagagaaacctttaggaaatcatcacttggcaatgatgagacagataaagagaagaaaaaatttctgggatttttcaaagttaataaaagaagcaatagtaagggctgtttaacgacccccaactccccatccatgcactcacgttctcttacgctgggtccatccctctcgctgggcagcatctcaggggtgtccgtgaagtcggagatgaagaagcgccgagcccctcctcctccaggttcagggccacctgtgcaagacaaggcatcggaaaaggtatctcttgggtcacagattgatttacagaagaagaagcggcgagcgccagctccccctccaccacagccaccaccaccgagtcccctgatccccaaccgcactgaggataaggaggagaacaggaagagcacgatggtttatggagcagctgaagctgtgataagacttctgagcttgcttctgaataccacagccccgggcacagcaaagccaagaaccctgtggatgagtgagggccgcagttctctacacaatcctgaaatcaagtgttcctgtttctcttcctcctccccatttccccagtcactgctcagccttctcttgggtctttcaagcatttgtgaatgcatgtgcacacttagacacacacacgcacacacacacaacccatcttgtgtcttacctacctctgaaatattggcatttgggagacaatccctaatcagctaacacttgtttttttctatcctctgtgtgcttgttagaatactgtgaaggtgttttctatggaccgacttctaaatgttcctcctgaaatcagtgttattcacacagttctaatgtaatgaattctgtctgtctgaaagcttgccatattgtccctggtttctcccagctaatagagaggaaaatgagcctgaatatgaacccgtcaccacagaccgcactgcatcctttccaggcagcagggccctggagactgtgctcaggcctggcagcctctgtgtttcacttaggcttgttttgctcaacccaggcaagacttttaaaattgtttgaataagctgcagcatcagtatgcttttttaaattgtgatttaaaaaaaaatataaaatgtcccattccttccattttcaaatgcatacttcagtagatttaagtatattcacaatgctgtgaaaccgatctccaggacctcatcgtcctgcaaatctgatactctactcactgaacagcaactcccctttgcctgcttgtctttttgcgcctggcttatttcacttagcacaatttcctcgaagtttatccatattgtagcatataacagaattcccttcccttttaaagctaaatatctttcaagtatatgtatagaccacattttctttatccatccattgtcagtggacatttaagttgttcccgcttcatggttattgtgaatgatgctgcacaggtatgcaaa

SEQ ID NO: 4493 - DNA, 3785 bp, Homo sapiens
  source 1..3785: mol_type = unassigned DNA
ctccgccggcccgcgtgggaggacgatgggtcagcgcggaaaaagtgaatgagggcggcagcggtggcggcggtagccagcgcctgactcggcgggcccggagcaccgcccgcgtcccggcccccggcaccatggacgcgccgcgcgcctcggcggccaagcccccgaccgggaggaagatgaaggctcgtgctcccccacctcctggaaaggctgccactctgcatgtgcacagtgaccagaagcccccccacgatggggccctcgggtcgcagcagaacttggttcgcatgaaggaggcgctgagggccagcaccatggacgtcaccgtggtcctgcctagtgggctggagaagaggagcgtgctcaatgggagccatgcgatgatggacctactggttgaactttgccttcagaaccacctgaatccatcccaccatgcccttgaaattcggtcttcagaaacccaacaacctttgagttttaagccaaatactttgattgggaccctgaatgtgcatactgtgtttctgaaagaaaaagttcctgaagagaaggttaagcctggtccccctaaggtgcctgagaaatctgtgcgtttggtcgtgaattacctgcggacacaaaaagctgttgtgcgtgtgagccctgaggttcctctccagaatattctcccagtcatttgtgcaaagtgtgaggtcagcccagagcacgtggttctcctcagggacaacattgccggagaggagctggagctgtccaagtccctgaacgagctcgggataaaggagctctacgcgtgggacaacagaagagaaacctttaggaaatcatcacttggcaatgatgagacagataaagagaagaaaaaatttctgggatttttcaaagttaataaaagaagcaatagtaagggctgtttaacgacccccaactccccatccatgcactcacgttctcttacgctgggtccatccctctcgctgggcagcatctcaggggtgtccgtgaagtcggagatgaagaagcgccgagcccctcctcctccaggttcagggccacctgtgcaagacaaggcatcggaaaaggtatctcttgggtcacagattgatttacagaagaagaagcggcgagcgccagctccccctccaccacagccaccaccaccgagtcccctgatccccaaccgcactgaggataaggaggagaacaggaagagcacgatggtttattgctgtgcgtcattccctactcaggccaagcgcttctgatggacgggcctcttcctgacctcggacctttcccagtgtctcttctgccctggctctgattttcctgttgttcttcctcctttcaggataaaagggctcattgtatacccagaatttacttcctttggggtttacatataaatgcattaataacagagatttgtttgattgaggtttatatttttttgaaggaggtaaattatatgcaaattttaggttgataatattcacctgtctgaaattcactgatacttggaaatgttcctgtgaagaactctgctttattttaattcattattaattcatgtttttcttattggatattcagttccagaatttattgccaatttttcttaaaactagattgtatccataaattgaccagtatagtcaatttggatagaactgaaactttctgtctacctggtaaaactaagtgcctaaaaacatgaactataaatgtagttactaggaactcacaacttatatatactatccattcaatgatacataggacccaatgtctttgtgtttttgaggttttcctgttactgtgtactttgccattttacatagttcactaaaaagaaagaagtgggagaagaagggtgttctattcattattctatattatgattctcttcattattctgttctcttcattattctattcatttcttcacccatttattcactaaacagtgacatagtacttacttgatgctaggtattacaccagttttgtgggctataagagtgaataacaagcacgtgacctctggccttggattttactacctgtggctccccaggcacatgaaaagaagtaaagatggttccatttgataagtactagtcacaagggttgtacatgtgataaagatgccagaggttgtgaccaccatgtctgtgcagaggtgctgctggctcctctttgagtgtgagatccctctgcagtcacacaacctcacccagttacgaagagctagtcacctcaactgcattgtcccaagacaggcagagtaggtaaaaatagtcatatgttaaaattcaaggtttagataaaaagacaactagttcttgcttgctttgattaacttttattatgcagatgcatttgaactggagaagcttgtcatgtttctctctaaaagatgtttttaaatgttattgctcaaaatggaaaaaaaaaaaaagaatcagtaagtattcctgacatgtaggattgttgcctggctgatcacaatgaaaatgttagctatgactaatgaaggaattatcacaacttacattggtattaataataaacaaatataagccaaagctatatataaccaatttagtgctatgtattggtgaaaaaaacagaaagttacagaaattactcacaatgaaacatagaacaagttagaaagggccttttttttttttgaaataaaggacttttgtctgataagtagcagtcatttgacctcaaatcattaaatggggaaagtctaaacaagaaaaggtaatgtttacctgaatgttggggaaagcattaggatttatggcccagacttaaagattgtagaagattgtatataattacagcaataagcatttgtgtaagaagtagctattatgctgaagaaagatgggcacacaaaatctctaggcaaatccttggaacaggggaaagtgatactgctcatagaattattggttcgagaggcagcaaatatgatgcaataagtatatcaaactcaattaaaaatagaggacagaggtatgtggtgggggaaaacaaatgcaatagggctaagtcagcttacagggggtgaatataatttgaacatggcacccccaatttacttgatcataaagttagccaaagacatgagtggtcgatctttgacaatactctagtgatctccatgagagatggcctgatagatgttggatagaatgaagggccatttgatgaacaagttttgtagatttacatgtgacttggcactgtgctgacattagagccttctaagaatcagataaattaattaggtgaaacattttttcccaaagcacttgcatttcagaaagtttctcatttctgactcagcttagaacccatcccttgttacaggtcatttctcctccttataagccatgtctgtttcttttttccatcatgtcatacaccctatccacaaaagatggtagctcacgttttctaactagagacgtgcaggcaagttgagagcatgaagaatcccttgggaataccaattctgtagcaaatgctaaggtaaaagaaaaactatgcattatttttcaactatagttggcttaaattcttagtttcaccctggagaccatgttgccagtggacaattgagcatgctgtgatttataaaatgcaagctagtttatatgataatgtttgccatctcactttaccagtactgttgaccttttcatatgattctaaaatcacttacttgtaaataaatactcctagttctgtagatgaaa

SEQ ID NO: 4494 - DNA, 1941 bp, Homo sapiens
  source 1..1941: mol_type = unassigned DNA
tccgccggcccgcgtgggaggacgatgggtcagcgcggaaaaagtgaatgagggcggcagcggtggcggcggtagccagcgcctgactcggcgggcccggagcaccgcccgcgtcccggcccccggcaccatggacgcgccgcgcgcctcggcggccaagcccccgaccgggaggaagatgaaggctcgtgctcccccacctcctggaaaggctgccactctgcatgtgcacagtgaccagaagcccccccacgatggggccctcgggtcgcagcagaacttggttcgcatgaaggaggcgctgagggccagcaccatggacgtcaccgtggtcctgcctagtgggctggagaagaggagcgtgctcaatgggagccatgcgatgatggacctactggttgaactttgccttcagaaccacctgaatccatcccaccatgcccttgaaattcggtcttcagaaacccaacaacctttgagttttaagccaaatactttgattgggaccctgaatgtgcatactgtgtttctgaaagaaaaagttcctgaagagaaggttaagcctggtccccctaaggtgcctgagaaatctgtgcgtttggtcgtgaattacctgcggacacaaaaagctgttgtgcgtgtgagccctgaggttcctctccagaatattctcccagtcatttgtgcaaagtgtgaggtcagcccagagcacgtggttctcctcagggacaacattgccggagaggagctggagctgtccaagtccctgaacgagctcgggataaaggagctctacgcgtgggacaacagaagagttcgtctgagcaaaactcagtccgagccttccctgagctgtcaagaaacctttaggaaatcatcacttggcaatgatgagacagataaagagaagaaaaaatttctgggatttttcaaagttaataaaagaagcaatagtaagggctgtttaacgacccccaactccccatccatgcactcacgttctcttacgctgggtccatccctctcgctgggcagcatctcaggggtgtccgtgaagtcggagatgaagaagcgccgagcccctcctcctccaggttcagggccacctgtgcaagacaaggcatcggaaaaggtatctcttgggtcacagattgatttacagaagaagaagcggcgagcgccagctccccctccaccacagccaccaccaccgagtcccctgatccccaaccgcactgaggataaggaggagaacaggaagagcacgatggtttattgctgtgcgtcattccctactcaggccaagcgcttctgatggacgggcctcttcctgacctcggacctttcccagtgtctcttctgccctggctctgattttcctgttgttcttcctcctttcaggataaaagggctcattgtatacccagaatttacttcctttggggtttacatataaatgcattaataacagagatttgtttgattgaggtttatatttttttgaaggaggtaaattatatgcaaattttaggttgataatattcacctgtctgaaattcactgatacttggaaatgttcctgtgaagaactctgctttattttaattcattattaattcatgtttttcttattggatattcagttccagaatttattgccaatttttcttaaaactagattgtatccataaattgaccagtatagtcaatttggatagaactgaaactttctgtctacctggtaaaactaagtgcctaaaaacatgaactataaatgtagttactaggaactcacaacttatatatactatccattcaatgatacataggacccaatgtctttgtgtttttgaggttttcctgttactgtgtactttgccattttacatagttcactaaaaagaaagaagtgggagaagaagggtgttctattcattattc

SEQ ID NO: 4495 - DNA, 589 bp, Homo sapiens
  source 1..589: mol_type = unassigned DNA
agtggtggagcaggtggtgcggtgctggtgttgggtgctggtgttgggtggtggtgcgtgctgtgtactttgggcacccgggtcgttgcccaggaggaagatgaaggctcgtgctcccccacctcctggaaaggctgccactctgcatgtgcacagtgaccagaagcccccccacgatggggccctcgggtcgcagcagaacttggttcgcatgaaggaggcgctgagggccagcaccatggacgtcaccgtggtcctgcctagtgggctggagaagaggagcgtgctcaatgggagccatgcgatgatggacctactggttgaactttgccttcagaaccacctgaatccatcccaccatgcccttgaaattcggtcttcagaaacccaacaacctttgagttttaagccaaatactttgattgggaccctgaatgtgcatactgtgtttctgaaagaaaaagttcctgaagagaaggttaagcctggtccccctaaggtgcctgagaaatctgtgcgtttggtcgtgaattacctgcggacacaaaaagctgttgtgcgtgtgagccctgaggttcctctccagaat

SEQ ID NO: 4496 - DNA, 5339 bp, Homo sapiens
  source 1..5339: mol_type = unassigned DNA
ccgcccgctagagacgattccagccccttccgtccgccgcgctccgccgctgtcctccgccggcccgcgtgggaggacgatgggtcagcgcggaaaaagtgaatgagggcggcagcggtggcggcggtagccagcgcctgactcggcgggcccggagcaccgcccgcgtcccggcccccggcaccatggacgcgccgcgcgcctcggcggccaagcccccgaccgggaggaagatgaaggctcgtgctcccccacctcctggaaaggctgccactctgcatgtgcacagtgaccagaagcccccccacgatggggccctcgggtcgcagcagaacttggttcgcatgaaggaggcgctgagggccagcaccatggacgtcaccgtggtcctgcctagtgggctggagaagaggagcgtgctcaatgggagccatgcgatgatggacctactggttgaactttgccttcagaaccacctgaatccatcccaccatgcccttgaaattcggtcttcagaaacccaacaacctttgagttttaagccaaatactttgattgggaccctgaatgtgcatactgtgtttctgaaagaaaaagttcctgaagagaaggttaagcctggtccccctaaggtgcctgagaaatctgtgcgtttggtcgtgaattacctgcggacacaaaaagctgttgtgcgtgtgagccctgaggttcctctccagaatattctcccagtcatttgtgcaaagtgtgaggtcagcccagagcacgtggttctcctcagggacaacattgccggagaggagctggagctgtccaagtccctgaacgagctcgggataaaggagctctacgcgtgggacaacagaagagaaacctttaggaaatcatcacttggcaatgatgagacagataaagagaagaaaaaatttctgggatttttcaaagttaataaaagaagcaatagtaagggctgtttaacgacccccaactccccatccatgcactcacgttctcttacgctgggtccatccctctcgctgggcagcatctcaggggtgtccgtgaagtcggagatgaagaagcgccgagcccctcctcctccaggttcagggccacctgtgcaagacaaggcatcggaaaaggtatctcttgggtcacagattgatttacagaagaagaagcggcgagcgccagctccccctccaccacagccaccaccaccgagtcccctgatccccaaccgcactgaggataaggaggagaacaggaagagcacgatgggtggtggacggcaggtgccacaaaagcctcccagaggcactgctcggggtccaccccagttagtgcttcccccacccccgccctaccctcctcccgacacagacgtggtggagcctctcagctttcccggggaaggcgctggttccgaggcctcagacccgatacccaaactaagcctgcccctggggtctggcagccactgcagcccggatggagccccgcaggtgctgtcagaggcggaggagaccgtgtcagttggcagctgttttgcgtcggaggacacgaccgaggactcaggagtgatgagttccccctcagacatcgtctctctggactcgcagcaggacagcatgaaatacaaagacaagtgggccacagaccaggaagactgcagtgaccaggacctcgctggaaccccagacctgggtccccagaagagccccttgtgggagaagaatggctctgagaactcacatctgagaactgaaaaagctgtcacagcctcaaatgatgaagaagacctattaattgctggagagttccgtaaaacccttgcagaacttgatgaagacctggaagaaatggaagacagctatgaaacagacaccagctccctcaccagctccatccatggtgcatccaaccactgcccacaggatgccatgatccctcacggcgacacagatgcaatcccagtaacattcataggggaagtttcagatgatcctgtggattcggggttgttttccaatagaaacaacaatgctgggtctttcgactcggagggtgttgccagcaggagagactccctggcgccacttcaagctgagcacagccagccccatgaaaaggcaagggaggaagtacctgccctgcaccccgcttcccatgacgtcggaaaaggaatccgtgtggccttatctaacatctctaaagatgggaatctaatggaaacggcgcccagggtgacttcttttgcttcgaatcttcacacagacaacctaaatgcaaaagtgaaagacaaagtgtatggctgtgctgacggggagaggactcaagccacagagagagtgaattcccaaccggtgaatgaaaaggacagcaacgataaaaacgctgccttggcaccaacatcatggcaccaacgaggccaaaacccagggaaaagctacagacttaagcacggcctcacaacgtataaaatcattcctccaaagtcagagatgcgatgttacgacagagatgtgtccctctccaccggagccattaagattgacgagctggggaacttggtgagtcctcacgccaccggcatcaggatcatttccctgtcttcgtctgtgcctgaagcagaatctcagcccattgggaaagtcagagagttctggaggtgcaactctgtggaaaaacacctgggccgaccctcagagagctctgccaggggacccccctccacccctgtgcccacgcagacgcagaatccagagagcagactccaagcagaccccaagccaatatcgccccagcagaagtctgcccaccatgagggccggaaccccctaggggaggggagaaaccagccccccaccatgggcatgggtcacgtgagggtgccagcagctcacaccacagaagtcacatttctcaagcctcagagaagaacgtccagccagtatgtggcctctgccattgccaagcgcataggagccccaaaagtccatgctgatgtggtgaggccacacggttatgccgagaagggttatgcaggcaaggcgccagtgctggctgcaccacctgtcactgtgaaagatgacaggacatccagcccacactcagagacacaaggatggaaggatggtgcccagtggccctgtgtcactcctcccaacaaccacggggaagatttggcagtgggagcccctcctaggggggaggtcattggcccacacaggaagttgtctactcaggacagacctgctgctatccacagaagctcctgtttctcactggttcagtcttcccagagggatcgtgtttctgtgggacagagctgtggtttcagtggaaagcaaagcacaagtagccaggaggccagctcagcatctgagcccagacgcgcacctgatggtacagacccaccccctccacacacatctgacactcaggcctgcagcagggagctggtcaatggctctgtgcgcgccccaggccacggcgagccttcccaccctccaggagggtctggcacagaaagccacattctcctagaaagagaggaaaagcccagtgtgttctctacagatggaaatgaaacagacagtatttggccacccagcatttttgggccgaagaaaaaattcaaacctgttgtccagagaccagtcccaaaagacacatccctgcactctgccctgatggaagccatccactctgcgggagggaaggacagactacgcaagacggcagaacacaccggggagggcaggccagcgaaactgtcctacacggaggcagagggcgaacgatctgcactgctggcagctatccgcgggcacagcggcacctgcagcctgaggaaggctctctctgcaccaaggacggcctccaggttcagcacgggcaccctcagcaacaccgcagacgcaaggcaagccttgatggacgccatccgctccggcacaggggctgcgagactgagaaaggtgcccttgctcgtgtgaatgaacagaggccagagaattgcagaaacccacctgtaatatgcccacaggcgtcactcaaggagtctgcatagccaggaacatcaagttttggtgttactttcttgtctacaggccaaatgcgcacagttgattttcggtgtgttcctgtataacggcttgaaaggaaaggagaagatgctgtgtcgctgcgcagctcgtgtgccaaggaaatgtgttttgcctctgaatatcttaagttgctaataaacgattcttgttggcaggttaatgggactataaatgctggagcccagcactcacacttaattatatttatgggcaaagtaaaaagaatcatgccttagactgattttggacctttgagacttttaccacatacagatggatgaaactacttactgatttaagatcttttgaattttagaaaaaacatatgaatcagatggaacaatctgaatgtgatatgctccatgatgctgtgtgttttggtagtaagaaaaaaaaattgggaggcttttcaaaggtggctttgttaggtagtaaaactgctggattcttcttcctcaaatatttggggctaacacttcacagagggtcacagtccatgatctgaccaactaagcttttaaaaatcaactattaccacccagaaaacagtcctacgtgatcatgtggccagggcatgcccgagtcctgcaagggtggcgggtggctgaggtcacaccaccactggagtggatgggcagtgccccacatggacagccattccccaggctatgaagtgacataggcctcccccacggtgcctgtgtacggagcctgatgacttcactgggagccttctggaatcctgcagagggtcaaggagcagggatgttggatgcccacctgtcaagagttcagatcaaagttgcgctgagagcatcacaattttggttcagccttgacgcgtttgtccaacagctcattggctccctttgtatgatatcgtggtcttctcacatggtgcccagtcaccaatatttataatgaggtctaactacagcagtagtttttcatatatatctctaaaacattttgttatattgaaaaaagtaatagaaatcaagatgtgttgatgaaataaaatgtgtatctgagtgagaaaacaagtatggtgaggtcactttaatgtttcacagcgatctcagatctaggcctcaggtagaatggaagctgttctgcattcactgattaacgttgctaaactcttggtgaggcacgagctaccagccaattgctcttcatcacagctatctgtcttttagtgccacaaataaaagaaaatcaaatctt

SEQ ID NO: 4497 - DNA, 7286 bp, Homo sapiens
  source 1..7286: mol_type = unassigned DNA
gtactctcagcttgttggtggaagcccctcatctgccttcattctgaaggcagggcccggcagaggaaggatcagagggtcgcggccggagggtcccggccggtggggccaactcagagggagaggaaagggctagagacacgaagaacgcaaaccatcaaatttagaagaaaaagccctttgactttttccccctctccctccccaatggctgtgtagcaaacatccctggcgataccttggaaaggacgaagttggtctgcagtcgcaatttcgtgggttgagttcacagttgtgagtgcggggctcggagatggagccgtggtcctctaggtggaaaacgaaacggtggctctgggatttcaccgtaacaaccctcgcattgaccttcctcttccaagctagagaggtcagaggagctgctccagttgatgtactaaaagcactagattttcacaattctccagagggaatatcaaaaacaacgggattttgcacaaacagaaagaattctaaaggctcagatactgcttacagagtttcaaagcaagcacaactcagtgccccaacaaaacagttatttccaggtggaactttcccagaagacttttcaatactatttacagtaaaaccaaaaaaaggaattcagtctttccttttatctatatataatgagcatggtattcagcaaattggtgttgaggttgggagatcacctgtttttctgtttgaagaccacactggaaaacctgccccagaagactatcccctcttcagaactgttaacatcgctgacgggaagtggcatcgggtagcaatcagcgtggagaagaaaactgtgacaatgattgttgattgtaagaagaaaaccacgaaaccacttgatagaagtgagagagcaattgttgataccaatggaatcacggtttttggaacaaggattttggatgaagaagtttttgagggggacattcagcagtttttgatcacaggtgatcccaaggcagcatatgactactgtgagcattatagtccagactgtgactcttcagcacccaaggctgctcaagctcaggaacctcagatagatgagtatgcaccagaggatataatcgaatatgactatgagtatggggaagcagagtataaagaggctgaaagtgtaacagagggacccactgtaactgaggagacaatagcacagacggaggcaaacatcgttgatgattttcaagaatacaactatggaacaatggaaagttaccagacagaagctcctaggcatgtttctgggacaaatgagccaaatccagttgaagaaatatttactgaagaatatctaacgggagaggattatgattcccagaggaaaaattctgaggatacactatatgaaaacaaagaaatagacggcagggattctgatcttctggtagatggagatttaggcgaatatgatttttatgaatataaagaatatgaagataaaccaacaagcccccctaatgaagaatttggtccaggtgtaccagcagaaactgatattacagaaacaagcataaatggccatggtgcatatggagagaaaggacagaaaggagaaccagcagtggttgagcctggtatgcttgtcgaaggaccaccaggaccagcaggacctgcaggtattatgggtcctccaggtctacaaggccccactggaccccctggtgaccctggcgataggggccccccaggacgtcctggcttaccaggggctgatggtctacctggtcctcctggtactatgttgatgttaccgttccgttatggtggtgatggttccaaaggaccaaccatctctgctcaggaagctcaggctcaagctattcttcagcaggctcggattgctctgagaggcccacctggcccaatgggtctaactggaagaccaggtcctgtgggggggcctggttcatctggggccaaaggtgagagtggtgatccaggtcctcagggccctcgaggcgtccagggtccccctggtccaacgggaaaacctggaaaaaggggtcgtccaggtgcagatggaggaagaggaatgccaggagaacctggggcaaagggagatcgagggtttgatggacttccgggtctgccaggtgacaaaggtcacaggggtgaacgaggtcctcaaggtcctccaggtcctcctggtgatgatggaatgaggggagaagatggagaaattggaccaagaggtcttccaggtgaagctggcccacgaggtttgctgggtccaaggggaactccaggagctccagggcagcctggtatggcaggtgtagatggccccccaggaccaaaagggaacatgggtccccaaggggagcctgggcctccaggtcaacaagggaatccaggacctcagggtcttcctggtccacaaggtccaattggtcctcctggtgaaaaaggaccacaaggaaaaccaggacttgctggacttcctggtgctgatgggcctcctggtcatcctgggaaagaaggccagtctggagaaaagggggctctgggtccccctggtccacaaggtcctattggatacccgggcccccggggagtaaagggagcagatggtgtcagaggtctcaagggatctaaaggtgaaaagggtgaagatggttttccaggattcaaaggtgacatgggtctaaaaggtgacagaggagaagttggtcaaattggcccaagaggggaagatggccctgaaggacccaaaggtcgagcaggcccaactggagacccaggtccttcaggtcaagcaggagaaaagggaaaacttggagttccaggattaccaggatatccaggaagacaaggtccaaagggttccactggattccctgggtttccaggtgccaatggagagaaaggtgcacggggagtagctggcaaaccaggccctcggggtcagcgtggtccaacgggtcctcgaggttcaagaggtgcaagaggtcccactgggaaacctgggccaaagggcacttcaggtggcgatggccctcctggccctccaggtgaaagaggtcctcaaggacctcagggtccagttggattccctggaccaaaaggccctcctggaccacctgggaaggatgggctgccaggacaccctgggcaacgtggggagactggatttcaaggcaagaccggccctcctgggccagggggagtggttggaccacagggaccaaccggtgagactggtccaataggggaacgtgggcatcctggccctcctggccctcctggtgagcaaggtcttcctggtgctgcaggaaaagaaggtgcaaagggtgatccaggtcctcaaggtatctcagggaaagatggaccagcaggattacgtggtttcccaggggaaagaggtcttcctggagctcagggtgcacctggactgaaaggaggggaaggtccccagggcccaccaggtccagttggctcaccaggagaacgtgggtcagcaggtacagctggcccaattggtttaccagggcgcccgggacctcagggtcctcctggtccagctggagagaaaggtgctcctggagaaaaaggtccccaagggcctgcagggagagatggagttcaaggtcctgttggtctcccagggccagctggtcctgccggctcccctggggaagacggagacaagggtgaaattggtgagccgggacaaaaaggcagcaagggtgacaagggagaaaatggccctcccggtcccccaggtcttcaaggaccagttggtgcccctggaattgctggaggtgatggtgaaccaggtcctagaggacagcaggggatgtttgggcaaaaaggtgatgagggtgccagaggcttccctggacctcctggtccaataggtcttcagggtctgccaggcccacctggtgaaaaaggtgaaaatggggatgttggtcccatggggccacctggtcctccaggcccaagaggccctcaaggtcccaatggagctgatggaccacaaggacccccagggtctgttggttcagttggtggtgttggagaaaagggtgaacctggagaagcagggaacccagggcctcctggggaagcaggtgtaggcggtcccaaaggagaaagaggagagaaaggggaagctggtccacctggagctgctggacctccaggtgccaaggggccaccaggtgatgatggccctaagggtaacccgggtcctgttggttttcctggagatcctggtcctcctggggaacctggccctgcaggtcaagatggtgttggtggtgacaagggtgaagatggagatcctggtcaaccgggtcctcctggcccatctggtgaggctggcccaccaggtcctcctggaaaacgaggtcctcctggagctgcaggtgcagagggaagacaaggtgaaaaaggtgctaagggggaagcaggtgcagaaggtcctcctggaaaaaccggcccagtcggtcctcagggacctgcaggaaagcctggtccagaaggtcttcggggcatccctggtcctgtgggagaacaaggtctccctggagctgcaggccaagatggaccacctggtcctatgggacctcctggcttacctggtctcaaaggtgaccctggctccaagggtgaaaagggacatcctggtttaattggcctgattggtcctccaggagaacaaggggaaaaaggtgaccgagggctccctggaactcaaggatctccaggagcaaaaggggatgggggaattcctggtcctgctggtcccttaggtccacctggtcctccaggtttaccaggtcctcaaggcccaaagggtaacaaaggctctactggacccgctggccagaaaggtgacagtggtcttccagggcctcctgggtctccaggtccacctggtgaagtcattcagcctttaccaatcttgtcctccaaaaaaacgagaagacatactgaaggcatgcaagcagatgcagatgataatattcttgattactcggatggaatggaagaaatatttggttccctcaattccctgaaacaagacattgagcatatgaaatttccaatgggtactcagaccaatccagcccgaacttgtaaagacctgcaactcagccatcctgacttcccagatggtgaatattggattgatcctaaccaaggttgctcaggagattccttcaaagtttactgtaatttcacatctggtggtgagacttgcatttatccagacaaaaaatctgagggagtaagaatttcatcatggccaaaggagaaaccaggaagttggtttagtgaatttaagaggggaaaactgctttcatacttagatgttgaaggaaattccatcaatatggtgcaaatgacattcctgaaacttctgactgcctctgctcggcaaaatttcacctaccactgtcatcagtcagcagcctggtatgatgtgtcatcaggaagttatgacaaagcacttcgcttcctgggatcaaatgatgaggagatgtcctatgacaataatccttttatcaaaacactgtatgatggttgtgcgtccagaaaaggctatgaaaagactgtcattgaaatcaatacaccaaaaattgatcaagtacctattgttgatgtcatgatcaatgactttggtgatcagaatcagaagttcggatttgaagttggtcctgtttgttttcttggctaagattaagacaaagaacatatcaaatcaacagaaaatataccttggtgccaccaacccattttgtgccacatgcaagttttgaataaggatggtatagaaaacaacgctgcatatacaggtaccatttaggaaataccgatgcctttgtgggggcagaatcacatggcaaaagctttgaaaatcataaagatataagttggtgtggctaagatggaaacagggctgattcttgattcccaattctcaactctccttttcctatttgaatttctttggtgctgtagaaaacaaaaaaagaaaaatatatattcataaaaaatatggtgctcattctcatccatccaggatgtactaaaacagtgtgtttaataaattgtaattattttgtgtacagttctatactgttatctgtgtccatttccaaaacttgcacgtgtccctgaattccatctgactctaattttatgagaattgcagaactctgatggcaataaatatatgtattatgaaaaaataaagttgtaatttctgatgactctaagtccctttctttggttaataataaaatgcctttgtatatattgatgttgaagagttcaattatttgatgtcgccaacaaaattctcagagggcaaaaatctggaagacttttggaagcacactctgatcaactcttctctgccgacagtcattttgctgaatttcagccaaaaatattatgcattttgatgctttattcaaggctatacctcaaactttttcttctcagaatccaggatttcacaggatacttgtatatatggaaaacaagcaagtttatatttttggacagggaaatgtgtgtaagaaagtatattaacaaatcaatgcctccgtcaagcaaacaatcatatgtatactttttttctacgttatctcatctccttgttttcagtgtgcttcaataatgcaggttaatattaaagatggaaattaagcaattatttatgaatttgtgcaatgttagattttcttatcaatcaagttcttgaatttgattctaagttgcatattataacagtctcgaaaattattttacttgcccaacaaatattacttttttcctttcaagataattttataaatcatttgacctacctaattgctaaatgaataacatatggtggactgttattaagagtatttgttttaagtcattcaggaaaatctaaacttttttttccactaaggtatttactttaaggtagcttgaaatagcaatacaatttaaaaattaaaaactgaattttgtatctattttaagtaatatatgtaagacttgaaaataaatgttttatttcttatataaagtgttaaattaattgataccagatttcactggaacagtttcaactgataatttatgacaaaagaacatacctgtaatattgaaattaaaaagtgaaatttgtcataaagaatttcttttatttttgaaatcgagtttgtaaatgtccttttaagaagggagatatgaatccaataaataaactcaagtcttggctacctgga

SEQ ID NO: 4498 - DNA, 5289 bp, Homo sapiens
  source 1..5289: mol_type = unassigned DNA
atcccaaggcagcatatgactactgtgagcattatagtccagactgtgactcttcagcacccaaggctgctcaagctcaggaacctcagatagatgagtatgcaccagaggatataatcgaatatgactatgagtatggggaagcagagtataaagaggctgaaagtgtaacagagggacccactgtaactgaggagacaatagcacagacggaggcaaacatcgttgatgattttcaagaatacaactatggaacaatggaaagttaccagacagaagctcctaggcatgtttctgggacaaatgagccaaatccagttgaagaaatatttactgaagaatatctaacgggagaggattatgattcccagaggaaaaattctgaggatacactatatgaaaacaaagaaatagacggcagggattctgatcttctggtagatggagatttaggcgaatatgatttttatgaatataaagaatatgaagataaaccaacaagcccccctaatgaagaatttggtccaggtgtaccagcagaaactgatattacagaaacaagcataaatggccatggtgcatatggagagaaaggacagaaaggagaaccagcagtggttgagcctggtatgcttgtcgaaggaccaccaggaccagcaggacctgcaggtattatgggtcctccaggtctacaaggccccactggaccccctggtgaccctggcgataggggccccccaggacgtcctggcttaccaggggctgatggtctacctggtcctcctggtactatgttgatgttaccgttccgttatggtggtgatggttccaaaggaccaaccatctctgctcaggaagctcaggctcaagctattcttcagcaggctcggattgctctgagaggcccacctggcccaatgggtctaactggaagaccaggtcctgtgggggggcctggttcatctggggccaaaggtgagagtggtgatccaggtcctcagggccctcgaggcgtccagggtccccctggtccaacgggaaaacctggaaaaaggggtcgtccaggtgcagatggaggaagaggaatgccaggagaacctggggcaaagggagatcgagggtttgatggacttccgggtctgccaggtgacaaaggtcacaggggtgaacgaggtcctcaaggtcctccaggtcctcctggtgatgatggaatgaggggagaagatggagaaattggaccaagaggtcttccaggtgaagctggcccacgaggtttgctgggtccaaggggaactccaggagctccagggcagcctggtatggcaggtgtagatggccccccaggaccaaaagggaacatgggtccccaaggggagcctgggcctccaggtcaacaagggaatccaggacctcagggtcttcctggtccacaaggtccaattggtcctcctggtgaaaaaggaccacaaggaaaaccaggacttgctggacttcctggtgctgatgggcctcctggtcatcctgggaaagaaggccagtctggagaaaagggggctctgggtccccctggtccacaaggtcctattggatacccgggcccccggggagtaaagggagcagatggtgtcagaggtctcaagggatctaaaggtgaaaagggtgaagatggttttccaggattcaaaggtgacatgggtctaaaaggtgacagaggagaagttggtcaaattggcccaagaggggaagatggccctgaaggacccaaaggtcgagcaggcccaactggagacccaggtccttcaggtcaagcaggagaaaagggaaaacttggagttccaggattaccaggatatccaggaagacaaggtccaaaggatttcagatgtcattggttccactggattccctgggtttccaggtgccaatggagagaaaggtgcacggggagtagctggcaaaccaggccctcggggtcagcgtggtccaacgggtcctcgaggttcaagaggtgcaagaggtcccactgggaaacctgggccaaagggcacttcaggtggcgatggccctcctggccctccaggtgaaagaggtcctcaaggacctcagggtccagttggattccctggaccaaaaggccctcctggaccacctgggaaggatgggctgccaggacaccctgggcaacgtggggagactggatttcaaggcaagaccggccctcctgggccagggggagtggttggaccacagggaccaaccggtgagactggtccaataggggaacgtgggcatcctggccctcctggccctcctggtgagcaaggtcttcctggtgctgcaggaaaagaaggtgcaaagggtgatccaggtcctcaaggtatctcagggaaagatggaccagcaggattacgtggtttcccaggggaaagaggtcttcctggagctcagggtgcacctggactgaaaggaggggaaggtccccagggcccaccaggtccagttggctcaccaggagaacgtgggtcagcaggtacagctggcccaattggtttaccagggcgcccgggacctcagggtcctcctggtccagctggagagaaaggtgctcctggagaaaaaggtccccaagggcctgcagggagagatggagttcaaggtcctgttggtctcccagggccagctggtcctgccggctcccctggggaagacggagacaagggtgaaattggtgagccgggacaaaaaggcagcaagggtgacaagggagaaaatggccctcccggtcccccaggtcttcaaggaccagttggtgcccctggaattgctggaggtgatggtgaaccaggtcctagaggacagcaggggatgtttgggcaaaaaggtgatgagggtgccagaggcttccctggacctcctggtccaataggtcttcagggtctgccaggcccacctggtgaaaaaggtgaaaatggggatgttggtcccatggggccacctggtcctccaggcccaagaggccctcaaggtcccaatggagctgatggaccacaaggacccccagggtctgttggttcagttggtggtgttggagaaaagggtgaacctggagaagcagggaacccagggcctcctggggaagcaggtgtaggcggtcccaaaggagaaagaggagagaaaggggaagctggtccacctggagctgctggacctccaggtgccaaggggccaccaggtgatgatggccctaagggtaacccgggtcctgttggttttcctggagatcctggtcctcctggggaacctggccctgcaggtcaagatggtgttggtggtgacaagggtgaagatggagatcctggtcaaccgggtcctcctggcccatctggtgaggctggcccaccaggtcctcctggaaaacgaggtcctcctggagctgcaggtgcagagggaagacaaggtgaaaaaggtgctaagggggaagcaggtgcagaaggtcctcctggaaaaaccggcccagtcggtcctcagggacctgcaggaaagcctggtccagaaggtcttcggggcatccctggtcctgtgggagaacaaggtctccctggagctgcaggccaagatggaccacctggtcctatgggacctcctggcttacctggtctcaaaggtgaccctggctccaagggtgaaaagggacatcctggtttaattggcctgattggtcctccaggagaacaaggggaaaaaggtgaccgagggctccctggaactcaaggatctccaggagcaaaaggggatgggggaattcctggtcctgctggtcccttaggtccacctggtcctccaggtttaccaggtcctcaaggcccaaagggtaacaaaggctctactggacccgctggccagaaaggtgacagtggtcttccagggcctcctgggtctccaggtccacctggtgaagtcattcagcctttaccaatcttgtcctccaaaaaaacgagaagacatactgaaggcatgcaagcagatgcagatgataatattcttgattactcggatggaatggaagaaatatttggttccctcaattccctgaaacaagacattgagcatatgaaatttccaatgggtactcagaccaatccagcccgaacttgtaaagacctgcaactcagccatcctgacttcccagatggtgaatattggattgatcctaaccaaggttgctcaggagattccttcaaagtttactgtaatttcacatctggtggtgagacttgcatttatccagacaaaaaatctgagggagtaagaatttcatcatggccaaaggagaaaccaggaagttggtttagtgaatttaagaggggaaaactgctttcatacttagatgttgaaggaaattccatcaatatggtgcaaatgacattcctgaaacttctgactgcctctgctcggcaaaatttcacctaccactgtcatcagtcagcagcctggtatgatgtgtcatcaggaagttatgacaaagcacttcgcttcctgggatcaaatgatgaggagatgtcctatgacaataatccttttatcaaaacactgtatgatggttgtgcgtccagaaaaggctatgaaaagactgtcattgaaatcaatacaccaaaaattgatcaagtacctattgttgatgtcatgatcaatgactttggtgatcagaatcagaagttcggatttgaagttggtcctgtttgttttcttggctaagattaagacaaagaacatatcaaatcaacagaaaatataccttggtgccaccaacccattttgtgccacatgcaagttttgaataaggatggtatagaaaacaacgctgcatatacaggtaccatttaggaaataccgatgcctttgtgggggcagaatcacatggcaaaagctttgaaaatcataaagatataagttggtgtggctaagatggaaacagggctgattcttgattcccaattctcaactctccttttcctatttgaatttctttggtgctgtagaaaacaaaaaaagaaaaatatatattcataaaaaatatggtgctcattctcatccatccaggatgtactaaaacagtgtgtttaataaattgtaattattttgtgtacagttctatactgttatctgtgtccatttccaaaacttgcacgtgtccctgaattccatctgactctaattttatgagaattgcagaactctgatggcaataaatatatgtattatgaaaaaataaagttgtaatttctgatg

SEQ ID NO: 4499 - DNA, 1113 bp, Homo sapiens
  source 1..1113: mol_type = unassigned DNA
aggaaggttatttaccagttaaactccaaccatttgcatcttagtgcacatgcttgagcccagtagcccacctcctgagatcgtataaagaagctgctggtcaccagtttcaggtgttttctatgaggaacaggaagactgccattccctggcaccagctgcaaccaattgttttagcaagacagtttaacaactgcctgaccttcatctgatggtcgcctgacattcctggtgaatattggattgatcctaaccaaggttgctcaggagattccttcaaagtttactgtaatttcacatctggtggtgagacttgcatttatccagacaaaaaatctgagggagtaagaatttcatcatggccaaaggagaaaccaggaagttggtttagtgaatttaagaggggaaaactgctttcatacttagatgttgaaggaaattccatcaatatggtgcaaatgacattcctgaaacttctgactgcctctgctcggcaaaatttcacctaccactgtcatcagtcagcagcctggtatgatgtgtcatcaggaagttatgacaaagcacttcgcttcctgggatcaaatgatgaggagatgtcctatgacaataatccttttatcaaaacactgtatgatggttgtgcgtccagaaaaggctatgaaaagactgtcattgaaatcaatacaccaaaaattgatcaagtacctattgttgatgtcatgatcaatgactttggtgatcagaatcagaagttcggatttgaagttggtcctgtttgttttcttggctaagattaagacaaagaacatatcaaatcaacagaaaatataccttggtgccaccaacccattttgtgccacatgcaagttttgaataaggatggtatagaaaacaacgctgcatatacaggtaccatttaggaaataccgatgcctttgtgggggcagaatcacatggcaaaagctttgaaaatcataaagatataagttggtgtggctaagatggaaacagggctgattcttgattcccaattctcaactctccttttcctatttgaatttctttggtgctgtagaaaacaaaaaaagaaaaatatatattcataaaaaa

SEQ ID NO: 4500 - DNA, 785 bp, Homo sapiens
  source 1..785: mol_type = unassigned DNA
catgcttctggcatcacagttcactgtctgcagtgatttaattctttgtagcataaaagaggaaaagagtcattaggtgtctttttattcctttattcctagctttcatacttagatgttgaaggaaattccatcaatatggtgcaaatgacattcctgaaacttctgactgcctctgctcggcaaaatttcacctaccactgtcatcagtcagcagcctggtatgatgtgtcatcaggaagttatgacaaagcacttcgcttcctgggatcaaatgatgaggagatgtcctatgacaataatccttttatcaaaacactgtatgatggttgtgcgtccagaaaaggctatgaaaagactgtcattgaaatcaatacaccaaaaattgatcaagtacctattgttgatgtcatgatcaatgactttggtgatcagaatcagaagttcggatttgaagttggtcctgtttgttttcttggctaagattaagacaaagaacatatcaaatcaacagaaaatataccttggtgccaccaacccattttgtgccacatgcaagttttgaataaggatggtatagaaaacaacgctgcatatacaggtaccatttaggaaataccgatgcctttgtgggggcagaatcacatggcaaaagctttgaaaatcataaagatataagttggtgtggctaagatggaaacagggctgattcttgattcccaattctcaactctccttttcctatttgaatttctttggtgctgtagaaaacaaaaaaagaaaaa

SEQ ID NO: 4501 - DNA, 5442 bp, Homo sapiens
  source 1..5442: mol_type = unassigned DNA
tgttggtggaagcccctcatctgccttcattctgaaggcagggcccggcagaggaaggatcagagggtcgcggccggagggtcccggccggtggggccaactcagagggagaggaaagggctagagacacgaagaacgcaaaccatcaaatttagaagaaaaagccctttgactttttccccctctccctccccaatggctgtgtagcaaacatccctggcgataccttggaaaggacgaagttggtctgcagtcgcaatttcgtgggttgagttcacagttgtgagtgcggggctcggagatggagccgtggtcctctaggtggaaaacgaaacggtggctctgggatttcaccgtaacaaccctcgcattgaccttcctcttccaagctagagaggtcagaggagctgctccagttgatgtactaaaagcactagattttcacaattctccagagggaatatcaaaaacaacgggattttgcacaaacagaaagaattctaaaggctcagatactgcttacagagtttcaaagcaagcacaactcagtgccccaacaaaacagttatttccaggtggaactttcccagaagacttttcaatactatttacagtaaaaccaaaaaaaggaattcagtctttccttttatctatatataatgagcatggtattcagcaaattggtgttgaggttgggagatcacctgtttttctgtttgaagaccacactggaaaacctgccccagaagactatcccctcttcagaactgttaacatcgctgacgggaagtggcatcgggtagcaatcagcgtggagaagaaaactgtgacaatgattgttgattgtaagaagaaaaccacgaaaccacttgatagaagtgagagagcaattgttgataccaatggaatcacggtttttggaacaaggattttggatgaagaagtttttgagggggacattcagcagtttttgatcacaggtgatcccaaggcagcatatgactactgtgagcattatagtccagactgtgactcttcagcacccaaggctgctcaagctcaggaacctcagatagatgagtatgcaccagaggatataatcgaatatgactatgagtatggggaagcagagtataaagaggctgaaagtgtaacagagggacccactgtaactgaggagacaatagcacagacggagataaatggccatggtgcatatggagagaaaggacagaaaggagaaccagcagtggttgagcctggtatgcttgtcgaaggaccaccaggaccagcaggacctgcaggtattatgggtcctccaggtctacaaggccccactggaccccctggtgaccctggcgataggggccccccaggacgtcctggcttaccaggggctgatggtctacctggtcctcctggtactatgttgatgttaccgttccgttatggtggtgatggttccaaaggaccaaccatctctgctcaggaagctcaggctcaagctattcttcagcaggctcggattgctctgagaggcccacctggcccaatgggtctaactggaagaccaggtcctgtgggggggcctggttcatctggggccaaaggtgagagtggtgatccaggtcctcagggccctcgaggcgtccagggtccccctggtccaacgggaaaacctggaaaaaggggtcgtccaggtgcagatggaggaagaggaatgccaggagaacctggggcaaagggagatcgagggtttgatggacttccgggtctgccaggtgacaaaggtcacaggggtgaacgaggtcctcaaggtcctccaggtcctcctggtgatgatggaatgaggggagaagatggagaaattggaccaagaggtcttccaggtgaagctggcccacgaggtttgctgggtccaaggggaactccaggagctccagggcagcctggtatggcaggtgtagatggccccccaggaccaaaagggaacatgggtccccaaggggagcctgggcctccaggtcaacaagggaatccaggacctcagggtcttcctggtccacaaggtccaattggtcctcctggtgaaaaaggaccacaaggaaaaccaggacttgctggacttcctggtgctgatgggcctcctggtcatcctgggaaagaaggccagtctggagaaaagggggctctgggtccccctggtccacaaggtcctattggatacccgggcccccggggagtaaagggagcagatggtgtcagaggtctcaagggatctaaaggtgaaaagggtgaagatggttttccaggattcaaaggtgacatgggtctaaaaggtgacagaggagaagttggtcaaattggcccaagaggggaagatggccctgaaggacccaaaggtcgagcaggcccaactggagacccaggtccttcaggtcaagcaggagaaaagggaaaacttggagttccaggattaccaggatatccaggaagacaaggtccaaagggttccactggattccctgggtttccaggtgccaatggagagaaaggtgcacggggagtagctggcaaaccaggccctcggggtcagcgtggtccaacgggtcctcgaggttcaagaggtgcaagaggtcccactgggaaacctgggccaaagggcacttcaggtggcgatggccctcctggccctccaggtgaaagaggtcctcaaggacctcagggtccagttggattccctggaccaaaaggccctcctggaccacctgggaaggatgggctgccaggacaccctgggcaacgtggggagactggatttcaaggcaagaccggccctcctgggccagggggagtggttggaccacagggaccaaccggtgagactggtccaataggggaacgtgggcatcctggccctcctggccctcctggtgagcaaggtcttcctggtgctgcaggaaaagaaggtgcaaagggtgatccaggtcctcaaggtatctcagggaaagatggaccagcaggattacgtggtttcccaggggaaagaggtcttcctggagctcagggtgcacctggactgaaaggaggggaaggtccccagggcccaccaggtccagttggctcaccaggagaacgtgggtcagcaggtacagctggcccaattggtttaccagggcgcccgggacctcagggtcctcctggtccagctggagagaaaggtgctcctggagaaaaaggtccccaagggcctgcagggagagatggagttcaaggtcctgttggtctcccagggccagctggtcctgccggctcccctggggaagacggagacaagggtgaaattggtgagccgggacaaaaaggcagcaagggtgacaagggagaaaatggccctcccggtcccccaggtcttcaaggaccagttggtgcccctggaattgctggaggtgatggtgaaccaggtcctagaggacagcaggggatgtttgggcaaaaaggtgatgagggtgccagaggcttccctggacctcctggtccaataggtcttcagggtctgccaggcccacctggtgaaaaaggtgaaaatggggatgttggtcccatggggccacctggtcctccaggcccaagaggccctcaaggtcccaatggagctgatggaccacaaggacccccagggtctgttggttcagttggtggtgttggagaaaagggtgaacctggagaagcagggaacccagggcctcctggggaagcaggtgtaggcggtcccaaaggagaaagaggagagaaaggggaagctggtccacctggagctgctggacctccaggtgccaaggggccaccaggtgatgatggccctaagggtaacccgggtcctgttggttttcctggagatcctggtcctcctggggaacctggccctgcaggtcaagatggtgttggtggtgacaagggtgaagatggagatcctggtcaaccgggtcctcctggcccatctggtgaggctggcccaccaggtcctcctggaaaacgaggtcctcctggagctgcaggtgcagagggaagacaaggtgaaaaaggtgctaagggggaagcaggtgcagaaggtcctcctggaaaaaccggcccagtcggtcctcagggacctgcaggaaagcctggtccagaaggtcttcggggcatccctggtcctgtgggagaacaaggtctccctggagctgcaggccaagatggaccacctggtcctatgggacctcctggcttacctggtctcaaaggtgaccctggctccaagggtgaaaagggacatcctggtttaattggcctgattggtcctccaggagaacaaggggaaaaaggtgaccgagggctccctggaactcaaggatctccaggagcaaaaggggatgggggaattcctggtcctgctggtcccttaggtccacctggtcctccaggtttaccaggtcctcaaggcccaaagggtaacaaaggctctactggacccgctggccagaaaggtgacagtggtcttccagggcctcctgggtctccaggtccacctggtgaagtcattcagcctttaccaatcttgtcctccaaaaaaacgagaagacatactgaaggcatgcaagcagatgcagatgataatattcttgattactcggatggaatggaagaaatatttggttccctcaattccctgaaacaagacattgagcatatgaaatttccaatgggtactcagaccaatccagcccgaacttgtaaagacctgcaactcagccatcctgacttcccagatggtgaatattggattgatcctaaccaaggttgctcaggagattccttcaaagtttactgtaatttcacatctggtggtgagacttgcatttatccagacaaaaaatctgagggagtaagaatttcatcatggccaaaggagaaaccaggaagttggtttagtgaatttaagaggggaaaactgctttcatacttagatgttgaaggaaattccatcaatatggtgcaaatgacattcctgaaacttctgactgcctctgctcggcaaaatttcacctaccactgtcatcagtcagcagcctggtatgatgtgtcatcaggaagttatgacaaagcacttcgcttcctgggatcaaatgatgaggagatgtcctatgacaataatccttttatcaaaacactgtatgatggttgtgcgtccagaaaaggctatgaaaagactgtcattgaaatcaatacaccaaaaattgatcaagtacctattgttgatgtcatgatcaatgactttggtgatcagaatcagaagttcggatttgaagttggtcctgtttgttttcttggctaagattaagacaaagaacatatcaaatcaacagaaaatataccttggtgccaccaacccattttgtgcca

SEQ ID NO: 4502 - DNA, 297 bp, Homo sapiens
  source 1..297: mol_type = unassigned DNA
ttcctggtgctgcaggaaaagaaggtgcaaagggtgatccaggtcctcaaggtatctcagggaaagatggaccagcaggattacgtggtttcccaggggaaagaggtcttcctggagctcagggtgcacctggactgaaaggaggggaaggtccccagggcccaccaggtccagttgtaagtatgatgataataaatagccagacaatcatggttgtgaattacagctcttctttcattactctcatgctgtgattccacagtgtgtgggagagaaaataaacacatgtcaatcaaa

SEQ ID NO: 4503 - DNA, 678 bp, Homo sapiens
  source 1..678: mol_type = unassigned DNA
caaaggtgagagtggtgatccaggtcctcagggccctcgaggcgtccagggtccccctggtccaacgggaaaacctggaaaaaggggtcgtccaggtgcagatggaggaagaggaatgccaggagaacctggggcaaagggagatcgagggtttgatggacttccgggtctgccaggtgacaaaggtcacaggggtgaacgaggtcctcaaggtcctccaggtcctcctggtgatgatggaatgaggggagaagatggagaaattggaccaagaggtcttccaggtgaagctggcccacgaggtttgctgggtccaaggggaactccaggagctccagggcagcctggtatggcaggtgtagatggccccccaggaccaaaagggaacatgggtccccaaggggagcctgggcctccaggtcaacaagggaatccaggacctcagggtcttcctggtccacaaggtccaattggtcctcctggtgaaaaaatgtgctgcaatctaagtttcggaatacttataccactccagaaataatcctcgtgttaatattcagtccatgtttccaccccctcagacctagctaacaattaatttgctttctgtctctgtagatttgagttttctgaatatttcatgtgaatgaaacttatgaataaatttatgatttaatcata

SEQ ID NO: 4504 - DNA, 377 bp, Homo sapiens
  source 1..377: mol_type = unassigned DNA
atggagaaattggaccaagaggtcttccaggtgaagctggtatggcaggtgtagatggccccccaggaccaaaagggaacatgggtccccaaggggagcctgggcctccaggtcaacaagggaatccaggacctcagggtcttcctggtccacaaggtccaattggtcctcctggtgaaaaagtctccttttctttctcattattttacaaaaaagtaattaagtttgcttgtgacaaaagatttgtaggaagacatgatgaaaggaaagttgtgaagttgtcattgccattatatctcatatatgaatagcaaatgatgttcttgttaataactcaatgtctggatcaaaacaagaataaatctataattaaacac

SEQ ID NO: 4505 - DNA, 1709 bp, Homo sapiens
  source 1..1709: mol_type = unassigned DNA
atggagccgtggtcctctaggtggaaaacgaaacggtggctctgggatttcaccgtaacaaccctcgcattgaccttcctcttccaagctagagaggtcagaggagctgctccagttgatgtactaaaagcactagattttcacaattctccagagggaatatcaaaaacaacgggattttgcacaaacagaaagaattctaaaggctcagatactgcttacagagtttcaaagcaagcacaactcagtgccccaacaaaacagttatttccaggtggaactttcccagaagacttttcaatactatttacagtaaaaccaaaaaaaggaattcagtctttccttttatctatatataatgagcatggtattcagcaaattggtgttgaggttgggagatcacctgtttttctgtttgaagaccacactggaaaacctgccccagaagactatcccctcttcagaactgttaacatcgctgacgggaagtggcatcgggtagcaatcagcgtggagaagaaaactgtgacaatgattgttgattgtaagaagaaaaccacgaaaccacttgatagaagtgagagagcaattgttgataccaatggaatcacggtttttggaacaaggattttggatgaagaagtttttgagggggacattcagcagtttttgatcacaggtgatcccaaggcagcatatgactactgtgagcattatagtccagactgtgactcttcagcacccaaggctgctcaagctcaggaacctcagatagatgagaaaaagaaatccaatttcaaaaagaagatgaggacagtggctactaaatcaaaggaaaaatccaaaaagtttacaccccccaaatctgaaaaattttcatccaagaagaagaaaagttatcaagcatcagcaaaagccaaactaggggtaaaggcaaacatcgttgatgattttcaagaatacaactatggaacaatggaaagttaccagacagaagctcctaggcatgtttctgggacaaatgagccaaatccagttgaagaaatatttactgaagaatatctaacgggagaggattatgattcccagaggaaaaattctgaggatacactatatgaaaacaaagaaatagacggcagggattctgatcttctggtagatggagatttaggcgaatatgatttttatgaatataaagaatatgaagataaaccaacaagcccccctaatgaagaatttggtccaggtgtaccagcagaaactgatattacagaaacaagcataaatggccatggtgcatatggagagaaaggacagaaaggagaaccagcagtggttgagcctggtatgcttgtcgaaggaccaccaggaccagcaggacctgcaggtattatgggtcctccaggtctacaaggccccactggaccccctggtgaccctggcgataggggccccccaggacgtcctggcttaccaggggctgatggtctacctggtcctcctggtactatgttgatgttaccgttccgttatggtggtgatggttccaaaggaccaaccatctctgctcaggaagctcaggctcaagctattcttcagcaggctcggattgctctgagaggcccacctggcccaatgggtctaactggaagaccaggtcctgtgggggggcctggttcatctggggccaaaggtgagagtggtgatcc

SEQ ID NO: 4506 - DNA, 776 bp, Homo sapiens
  source 1..776: mol_type = unassigned DNA
tacagagtttcaaagcaagcacaactcagtgccccaacaaaacagttatttccaggtggaactttcccagaagacttttcaatactatttacagtaaaaccaaaaaaaggaattcagtctttccttttatctatatataatgagcatggtattcagcaaattggtgttgaggttgggagatcacctgtttttctgtttgaagaccacactggaaaacctgccccagaagactatcccctcttcagaactgttaacatcgctgacgggaagtggcatcgggtagcaatcagcgtggagaagaaaactgtgacaatgattgttgattgtaagaagaaaaccacgaaaccacttgatagaagtgagagagcaattgttgataccaatggaatcacggtttttggaacaaggattttggatgaagaagtttttgagggggacattcagcagtttttgatcacaggtgatcccaaggcagcatatgactactgtgagcattatagtccagactgtgactcttcagcacccaaggctgctcaagctcaggaacctcagatagatgaggtgaggagcacaagaccagagaaggtcttcgtatttcagtgatatggacatcgcagtgcagtttttgaacttatacttatttattccattttaattaagctatgctttgtattttaattgtgttgtaatatttccaggaaaaagtgacttgaatatatttggtacttgttttcttgctgtttaagcatttgattacataaatttattagcaataa

SEQ ID NO: 4507 - DNA, 7173 bp, Homo sapiens
  source 1..7173: mol_type = unassigned DNA
acacagtactctcagcttgttggtggaagcccctcatctgccttcattctgaaggcagggcccggcagaggaaggatcagagggtcgcggccggagggtcccggccggtggggccaactcagagggagaggaaagggctagagacacgaagaacgcaaaccatcaaatttagaagaaaaagccctttgactttttccccctctccctccccaatggctgtgtagcaaacatccctggcgataccttggaaaggacgaagttggtctgcagtcgcaatttcgtgggttgagttcacagttgtgagtgcggggctcggagatggagccgtggtcctctaggtggaaaacgaaacggtggctctgggatttcaccgtaacaaccctcgcattgaccttcctcttccaagctagagaggtcagaggagctgctccagttgatgtactaaaagcactagattttcacaattctccagagggaatatcaaaaacaacgggattttgcacaaacagaaagaattctaaaggctcagatactgcttacagagtttcaaagcaagcacaactcagtgccccaacaaaacagttatttccaggtggaactttcccagaagacttttcaatactatttacagtaaaaccaaaaaaaggaattcagtctttccttttatctatatataatgagcatggtattcagcaaattggtgttgaggttgggagatcacctgtttttctgtttgaagaccacactggaaaacctgccccagaagactatcccctcttcagaactgttaacatcgctgacgggaagtggcatcgggtagcaatcagcgtggagaagaaaactgtgacaatgattgttgattgtaagaagaaaaccacgaaaccacttgatagaagtgagagagcaattgttgataccaatggaatcacggtttttggaacaaggattttggatgaagaagtttttgagggggacattcagcagtttttgatcacaggtgatcccaaggcagcatatgactactgtgagcattatagtccagactgtgactcttcagcacccaaggctgctcaagctcaggaacctcagatagatgaggcaaacatcgttgatgattttcaagaatacaactatggaacaatggaaagttaccagacagaagctcctaggcatgtttctgggacaaatgagccaaatccagttgaagaaatatttactgaagaatatctaacgggagaggattatgattcccagaggaaaaattctgaggatacactatatgaaaacaaagaaatagacggcagggattctgatcttctggtagatggagatttaggcgaatatgatttttatgaatataaagaatatgaagataaaccaacaagcccccctaatgaagaatttggtccaggtgtaccagcagaaactgatattacagaaacaagcataaatggccatggtgcatatggagagaaaggacagaaaggagaaccagcagtggttgagcctggtatgcttgtcgaaggaccaccaggaccagcaggacctgcaggtattatgggtcctccaggtctacaaggccccactggaccccctggtgaccctggcgataggggccccccaggacgtcctggcttaccaggggctgatggtctacctggtcctcctggtactatgttgatgttaccgttccgttatggtggtgatggttccaaaggaccaaccatctctgctcaggaagctcaggctcaagctattcttcagcaggctcggattgctctgagaggcccacctggcccaatgggtctaactggaagaccaggtcctgtgggggggcctggttcatctggggccaaaggtgagagtggtgatccaggtcctcagggccctcgaggcgtccagggtccccctggtccaacgggaaaacctggaaaaaggggtcgtccaggtgcagatggaggaagaggaatgccaggagaacctggggcaaagggagatcgagggtttgatggacttccgggtctgccaggtgacaaaggtcacaggggtgaacgaggtcctcaaggtcctccaggtcctcctggtgatgatggaatgaggggagaagatggagaaattggaccaagaggtcttccaggtgaagctggcccacgaggtttgctgggtccaaggggaactccaggagctccagggcagcctggtatggcaggtgtagatggccccccaggaccaaaagggaacatgggtccccaaggggagcctgggcctccaggtcaacaagggaatccaggacctcagggtcttcctggtccacaaggtccaattggtcctcctggtgaaaaaggaccacaaggaaaaccaggacttgctggacttcctggtgctgatgggcctcctggtcatcctgggaaagaaggccagtctggagaaaagggggctctgggtccccctggtccacaaggtcctattggatacccgggcccccggggagtaaagggagcagatggtgtcagaggtctcaagggatctaaaggtgaaaagggtgaagatggttttccaggattcaaaggtgacatgggtctaaaaggtgacagaggagaagttggtcaaattggcccaagaggggaagatggccctgaaggacccaaaggtcgagcaggcccaactggagacccaggtccttcaggtcaagcaggagaaaagggaaaacttggagttccaggattaccaggatatccaggaagacaaggtccaaagggttccactggattccctgggtttccaggtgccaatggagagaaaggtgcacggggagtagctggcaaaccaggccctcggggtcagcgtggtccaacgggtcctcgaggttcaagaggtgcaagaggtcccactgggaaacctgggccaaagggcacttcaggtggcgatggccctcctggccctccaggtgaaagaggtcctcaaggacctcagggtccagttggattccctggaccaaaaggccctcctggaccacctgggaaggatgggctgccaggacaccctgggcaacgtggggagactggatttcaaggcaagaccggccctcctgggccagggggagtggttggaccacagggaccaaccggtgagactggtccaataggggaacgtgggcatcctggccctcctggccctcctggtgagcaaggtcttcctggtgctgcaggaaaagaaggtgcaaagggtgatccaggtcctcaaggtatctcagggaaagatggaccagcaggattacgtggtttcccaggggaaagaggtcttcctggagctcagggtgcacctggactgaaaggaggggaaggtccccagggcccaccaggtccagttggctcaccaggagaacgtgggtcagcaggtacagctggcccaattggtttaccagggcgcccgggacctcagggtcctcctggtccagctggagagaaaggtgctcctggagaaaaaggtccccaagggcctgcagggagagatggagttcaaggtcctgttggtctcccagggccagctggtcctgccggctcccctggggaagacggagacaagggtgaaattggtgagccgggacaaaaaggcagcaagggtgacaagggagaaaatggccctcccggtcccccaggtcttcaaggaccagttggtgcccctggaattgctggaggtgatggtgaaccaggtcctagaggacagcaggggatgtttgggcaaaaaggtgatgagggtgccagaggcttccctggacctcctggtccaataggtcttcagggtctgccaggcccacctggtgaaaaaggtgaaaatggggatgttggtcccatggggccacctggtcctccaggcccaagaggccctcaaggtcccaatggagctgatggaccacaaggacccccagggtctgttggttcagttggtggtgttggagaaaagggtgaacctggagaagcagggaacccagggcctcctggggaagcaggtgtaggcggtcccaaaggagaaagaggagagaaaggggaagctggtccacctggagctgctggacctccaggtgccaaggggccaccaggtgatgatggccctaagggtaacccgggtcctgttggttttcctggagatcctggtcctcctggggaacctggccctgcaggtcaagatggtgttggtggtgacaagggtgaagatggagatcctggtcaaccgggtcctcctggcccatctggtgaggctggcccaccaggtcctcctggaaaacgaggtcctcctggagctgcaggtgcagagggaagacaaggtgaaaaaggtgctaagggggaagcaggtgcagaaggtcctcctggaaaaaccggcccagtcggtcctcagggacctgcaggaaagcctggtccagaaggtcttcggggcatccctggtcctgtgggagaacaaggtctccctggagctgcaggccaagatggaccacctggtcctatgggacctcctggcttacctggtctcaaaggtgaccctggctccaagggtgaaaagggacatcctggtttaattggcctgattggtcctccaggagaacaaggggaaaaaggtgaccgagggctccctggaactcaaggatctccaggagcaaaaggggatgggggaattcctggtcctgctggtcccttaggtccacctggtcctccaggtttaccaggtcctcaaggcccaaagggtaacaaaggctctactggacccgctggccagaaaggtgacagtggtcttccagggcctcctgggtctccaggtccacctggtgaagtcattcagcctttaccaatcttgtcctccaaaaaaacgagaagacatactgaaggcatgcaagcagatgcagatgataatattcttgattactcggatggaatggaagaaatatttggttccctcaattccctgaaacaagacattgagcatatgaaatttccaatgggtactcagaccaatccagcccgaacttgtaaagacctgcaactcagccatcctgacttcccagatggtgaatattggattgatcctaaccaaggttgctcaggagattccttcaaagtttactgtaatttcacatctggtggtgagacttgcatttatccagacaaaaaatctgagggagtaagaatttcatcatggccaaaggagaaaccaggaagttggtttagtgaatttaagaggggaaaactgctttcatacttagatgttgaaggaaattccatcaatatggtgcaaatgacattcctgaaacttctgactgcctctgctcggcaaaatttcacctaccactgtcatcagtcagcagcctggtatgatgtgtcatcaggaagttatgacaaagcacttcgcttcctgggatcaaatgatgaggagatgtcctatgacaataatccttttatcaaaacactgtatgatggttgtgcgtccagaaaaggctatgaaaagactgtcattgaaatcaatacaccaaaaattgatcaagtacctattgttgatgtcatgatcaatgactttggtgatcagaatcagaagttcggatttgaagttggtcctgtttgttttcttggctaagattaagacaaagaacatatcaaatcaacagaaaatataccttggtgccaccaacccattttgtgccacatgcaagttttgaataaggatggtatagaaaacaacgctgcatatacaggtaccatttaggaaataccgatgcctttgtgggggcagaatcacatggcaaaagctttgaaaatcataaagatataagttggtgtggctaagatggaaacagggctgattcttgattcccaattctcaactctccttttcctatttgaatttctttggtgctgtagaaaacaaaaaaagaaaaatatatattcataaaaaatatggtgctcattctcatccatccaggatgtactaaaacagtgtgtttaataaattgtaattattttgtgtacagttctatactgttatctgtgtccatttccaaaacttgcacgtgtccctgaattccatctgactctaattttatgagaattgcagaactctgatggcaataaatatatgtattatgaaaaaataaagttgtaatttctgatgactctaagtccctttctttggttaataataaaatgcctttgtatatattgatgttgaagagttcaattatttgatgtcgccaacaaaattctcagagggcaaaaatctggaagacttttggaagcacactctgatcaactcttctctgccgacagtcattttgctgaatttcagccaaaaatattatgcattttgatgctttattcaaggctatacctcaaactttttcttctcagaatccaggatttcacaggatacttgtatatatggaaaacaagcaagtttatatttttggacagggaaatgtgtgtaagaaagtatattaacaaatcaatgcctccgtcaagcaaacaatcatatgtatactttttttctacgttatctcatctccttgttttcagtgtgcttcaataatgcaggttaatattaaagatggaaattaagcaattatttatgaatttgtgcaatgttagattttcttatcaatcaagttcttgaatttgattctaagttgcatattataacagtctcgaaaattattttacttgcccaacaaatattacttttttcctttcaagataattttataaatcatttgacctacctaattgctaaatgaataacatatggtggactgttattaagagtatttgttttaagtcattcaggaaaatctaaacttttttttccactaaggtatttactttaaggtagcttgaaatagcaatacaatttaaaaattaaaaactgaattttgtatctattttaagtaatatatgtaagacttgaaaataaatgttttatttcttatataaagtgttaaattaattgataccagatttcactggaacagtttcaactgataatttatgacaaaagaacatacctgtaatattgaaattaaaaagtgaaatttgtcataaagaatttcttttatttttgaaatcgagtttgtaaatgtccttttaagaagggagatatgaatccaataaataaactcaagtcttggctacctgg

SEQ ID NO: 4508 - DNA, 7327 bp, Homo sapiens
  source 1..7327: mol_type = unassigned DNA
acacagtactctcagcttgttggtggaagcccctcatctgccttcattctgaaggcagggcccggcagaggaaggatcagagggtcgcggccggagggtcccggccggtggggccaactcagagggagaggaaagggctagagacacgaagaacgcaaaccatcaaatttagaagaaaaagccctttgactttttccccctctccctccccaatggctgtgtagcaaacatccctggcgataccttggaaaggacgaagttggtctgcagtcgcaatttcgtgggttgagttcacagttgtgagtgcggggctcggagatggagccgtggtcctctaggtggaaaacgaaacggtggctctgggatttcaccgtaacaaccctcgcattgaccttcctcttccaagctagagaggtcagaggagctgctccagttgatgtactaaaagcactagattttcacaattctccagagggaatatcaaaaacaacgggattttgcacaaacagaaagaattctaaaggctcagatactgcttacagagtttcaaagcaagcacaactcagtgccccaacaaaacagttatttccaggtggaactttcccagaagacttttcaatactatttacagtaaaaccaaaaaaaggaattcagtctttccttttatctatatataatgagcatggtattcagcaaattggtgttgaggttgggagatcacctgtttttctgtttgaagaccacactggaaaacctgccccagaagactatcccctcttcagaactgttaacatcgctgacgggaagtggcatcgggtagcaatcagcgtggagaagaaaactgtgacaatgattgttgattgtaagaagaaaaccacgaaaccacttgatagaagtgagagagcaattgttgataccaatggaatcacggtttttggaacaaggattttggatgaagaagtttttgagggggacattcagcagtttttgatcacaggtgatcccaaggcagcatatgactactgtgagcattatagtccagactgtgactcttcagcacccaaggctgctcaagctcaggaacctcagatagatgagaaaaagaaatccaatttcaaaaagaagatgaggacagtggctactaaatcaaaggaaaaatccaaaaagtttacaccccccaaatctgaaaaattttcatccaagaagaagaaaagttatcaagcatcagcaaaagccaaactaggggtaaaggcaaacatcgttgatgattttcaagaatacaactatggaacaatggaaagttaccagacagaagctcctaggcatgtttctgggacaaatgagccaaatccagttgaagaaatatttactgaagaatatctaacgggagaggattatgattcccagaggaaaaattctgaggatacactatatgaaaacaaagaaatagacggcagggattctgatcttctggtagatggagatttaggcgaatatgatttttatgaatataaagaatatgaagataaaccaacaagcccccctaatgaagaatttggtccaggtgtaccagcagaaactgatattacagaaacaagcataaatggccatggtgcatatggagagaaaggacagaaaggagaaccagcagtggttgagcctggtatgcttgtcgaaggaccaccaggaccagcaggacctgcaggtattatgggtcctccaggtctacaaggccccactggaccccctggtgaccctggcgataggggccccccaggacgtcctggcttaccaggggctgatggtctacctggtcctcctggtactatgttgatgttaccgttccgttatggtggtgatggttccaaaggaccaaccatctctgctcaggaagctcaggctcaagctattcttcagcaggctcggattgctctgagaggcccacctggcccaatgggtctaactggaagaccaggtcctgtgggggggcctggttcatctggggccaaaggtgagagtggtgatccaggtcctcagggccctcgaggcgtccagggtccccctggtccaacgggaaaacctggaaaaaggggtcgtccaggtgcagatggaggaagaggaatgccaggagaacctggggcaaagggagatcgagggtttgatggacttccgggtctgccaggtgacaaaggtcacaggggtgaacgaggtcctcaaggtcctccaggtcctcctggtgatgatggaatgaggggagaagatggagaaattggaccaagaggtcttccaggtgaagctggcccacgaggtttgctgggtccaaggggaactccaggagctccagggcagcctggtatggcaggtgtagatggccccccaggaccaaaagggaacatgggtccccaaggggagcctgggcctccaggtcaacaagggaatccaggacctcagggtcttcctggtccacaaggtccaattggtcctcctggtgaaaaaggaccacaaggaaaaccaggacttgctggacttcctggtgctgatgggcctcctggtcatcctgggaaagaaggccagtctggagaaaagggggctctgggtccccctggtccacaaggtcctattggatacccgggcccccggggagtaaagggagcagatggtgtcagaggtctcaagggatctaaaggtgaaaagggtgaagatggttttccaggattcaaaggtgacatgggtctaaaaggtgacagaggagaagttggtcaaattggcccaagaggggaagatggccctgaaggacccaaaggtcgagcaggcccaactggagacccaggtccttcaggtcaagcaggagaaaagggaaaacttggagttccaggattaccaggatatccaggaagacaaggtccaaagggttccactggattccctgggtttccaggtgccaatggagagaaaggtgcacggggagtagctggcaaaccaggccctcggggtcagcgtggtccaacgggtcctcgaggttcaagaggtgcaagaggtcccactgggaaacctgggccaaagggcacttcaggtggcgatggccctcctggccctccaggtgaaagaggtcctcaaggacctcagggtccagttggattccctggaccaaaaggccctcctggaccacctgggaaggatgggctgccaggacaccctgggcaacgtggggagactggatttcaaggcaagaccggccctcctgggccagggggagtggttggaccacagggaccaaccggtgagactggtccaataggggaacgtgggcatcctggccctcctggccctcctggtgagcaaggtcttcctggtgctgcaggaaaagaaggtgcaaagggtgatccaggtcctcaaggtatctcagggaaagatggaccagcaggattacgtggtttcccaggggaaagaggtcttcctggagctcagggtgcacctggactgaaaggaggggaaggtccccagggcccaccaggtccagttggctcaccaggagaacgtgggtcagcaggtacagctggcccaattggtttaccagggcgcccgggacctcagggtcctcctggtccagctggagagaaaggtgctcctggagaaaaaggtccccaagggcctgcagggagagatggagttcaaggtcctgttggtctcccagggccagctggtcctgccggctcccctggggaagacggagacaagggtgaaattggtgagccgggacaaaaaggcagcaagggtgacaagggagaaaatggccctcccggtcccccaggtcttcaaggaccagttggtgcccctggaattgctggaggtgatggtgaaccaggtcctagaggacagcaggggatgtttgggcaaaaaggtgatgagggtgccagaggcttccctggacctcctggtccaataggtcttcagggtctgccaggcccacctggtgaaaaaggtgaaaatggggatgttggtcccatggggccacctggtcctccaggcccaagaggccctcaaggtcccaatggagctgatggaccacaaggacccccagggtctgttggttcagttggtggtgttggagaaaagggtgaacctggagaagcagggaacccagggcctcctggggaagcaggtgtaggcggtcccaaaggagaaagaggagagaaaggggaagctggtccacctggagctgctggacctccaggtgccaaggggccaccaggtgatgatggccctaagggtaacccgggtcctgttggttttcctggagatcctggtcctcctggggaacctggccctgcaggtcaagatggtgttggtggtgacaagggtgaagatggagatcctggtcaaccgggtcctcctggcccatctggtgaggctggcccaccaggtcctcctggaaaacgaggtcctcctggagctgcaggtgcagagggaagacaaggtgaaaaaggtgctaagggggaagcaggtgcagaaggtcctcctggaaaaaccggcccagtcggtcctcagggacctgcaggaaagcctggtccagaaggtcttcggggcatccctggtcctgtgggagaacaaggtctccctggagctgcaggccaagatggaccacctggtcctatgggacctcctggcttacctggtctcaaaggtgaccctggctccaagggtgaaaagggacatcctggtttaattggcctgattggtcctccaggagaacaaggggaaaaaggtgaccgagggctccctggaactcaaggatctccaggagcaaaaggggatgggggaattcctggtcctgctggtcccttaggtccacctggtcctccaggtttaccaggtcctcaaggcccaaagggtaacaaaggctctactggacccgctggccagaaaggtgacagtggtcttccagggcctcctgggtctccaggtccacctggtgaagtcattcagcctttaccaatcttgtcctccaaaaaaacgagaagacatactgaaggcatgcaagcagatgcagatgataatattcttgattactcggatggaatggaagaaatatttggttccctcaattccctgaaacaagacattgagcatatgaaatttccaatgggtactcagaccaatccagcccgaacttgtaaagacctgcaactcagccatcctgacttcccagatggtgaatattggattgatcctaaccaaggttgctcaggagattccttcaaagtttactgtaatttcacatctggtggtgagacttgcatttatccagacaaaaaatctgagggagtaagaatttcatcatggccaaaggagaaaccaggaagttggtttagtgaatttaagaggggaaaactgctttcatacttagatgttgaaggaaattccatcaatatggtgcaaatgacattcctgaaacttctgactgcctctgctcggcaaaatttcacctaccactgtcatcagtcagcagcctggtatgatgtgtcatcaggaagttatgacaaagcacttcgcttcctgggatcaaatgatgaggagatgtcctatgacaataatccttttatcaaaacactgtatgatggttgtgcgtccagaaaaggctatgaaaagactgtcattgaaatcaatacaccaaaaattgatcaagtacctattgttgatgtcatgatcaatgactttggtgatcagaatcagaagttcggatttgaagttggtcctgtttgttttcttggctaagattaagacaaagaacatatcaaatcaacagaaaatataccttggtgccaccaacccattttgtgccacatgcaagttttgaataaggatggtatagaaaacaacgctgcatatacaggtaccatttaggaaataccgatgcctttgtgggggcagaatcacatggcaaaagctttgaaaatcataaagatataagttggtgtggctaagatggaaacagggctgattcttgattcccaattctcaactctccttttcctatttgaatttctttggtgctgtagaaaacaaaaaaagaaaaatatatattcataaaaaatatggtgctcattctcatccatccaggatgtactaaaacagtgtgtttaataaattgtaattattttgtgtacagttctatactgttatctgtgtccatttccaaaacttgcacgtgtccctgaattccatctgactctaattttatgagaattgcagaactctgatggcaataaatatatgtattatgaaaaaataaagttgtaatttctgatgactctaagtccctttctttggttaataataaaatgcctttgtatatattgatgttgaagagttcaattatttgatgtcgccaacaaaattctcagagggcaaaaatctggaagacttttggaagcacactctgatcaactcttctctgccgacagtcattttgctgaatttcagccaaaaatattatgcattttgatgctttattcaaggctatacctcaaactttttcttctcagaatccaggatttcacaggatacttgtatatatggaaaacaagcaagtttatatttttggacagggaaatgtgtgtaagaaagtatattaacaaatcaatgcctccgtcaagcaaacaatcatatgtatactttttttctacgttatctcatctccttgttttcagtgtgcttcaataatgcaggttaatattaaagatggaaattaagcaattatttatgaatttgtgcaatgttagattttcttatcaatcaagttcttgaatttgattctaagttgcatattataacagtctcgaaaattattttacttgcccaacaaatattacttttttcctttcaagataattttataaatcatttgacctacctaattgctaaatgaataacatatggtggactgttattaagagtatttgttttaagtcattcaggaaaatctaaacttttttttccactaaggtatttactttaaggtagcttgaaatagcaatacaatttaaaaattaaaaactgaattttgtatctattttaagtaatatatgtaagacttgaaaataaatgttttatttcttatataaagtgttaaattaattgataccagatttcactggaacagtttcaactgataatttatgacaaaagaacatacctgtaatattgaaattaaaaagtgaaatttgtcataaagaatttcttttatttttgaaatcgagtttgtaaatgtccttttaagaagggagatatgaatccaataaataaactcaagtcttggctacctgga

SEQ ID NO: 4509 - DNA, 6209 bp, Homo sapiens
  source 1..6209: mol_type = unassigned DNA
tgggggctctgggcgccagggtggccggggacacacagaagcggcagccaccgaggagggagcagtgccgggagccccgacggcgccttgctgcatggagctgggccgctgacagctgtcgctgcccgcagcctctgacctccctgggaccccggcgtctgaggctcatagtctgctccctgtcttctgtcagcctcagggcatccagcgtctcaggccgacctgggtccctgggacccggcgtttcggcttctcagccatggagcggtgcagccgctgccatcgcctcctcctcctcctacctctggtgctggggctgagcgcggccccaggctgggcaggtgcaccccctgtggatgtgctccgggccctgaggttcccctccctccctgatggtgtccggagagcgaaaggcatctgtccagctgatgtggcctaccgagtggcacgacctgcccagctcagtgcacccactcgccagcttttcccaggaggatttcccaaagatttctctctgctgactgttgtccggacccgccctggtctccaagctcccctcctgactctctacagtgcccagggtgtccgacagctgggcctggagctgggcccacctgtccgcttcctgtatgaagaccagactgggcggcctcaacctccctctcagccagtcttccgaggcctcagcctagcagatggcaagtggcaccgtgtggctgtggctgtgaagggccagtctgtcaccctcattgttgactgcaagaagcgagtcacccggcctctcccccgaagtgctcgtccagtattggacacccatggagtgatcatctttggtgcccgtattctggatgaagaagtctttgagggtgatgtccaggagctggccattgtcccaggggtccaggcagcctatgaatcatgtgaacagaaggagctggaatgcgaggggggccagagggaaagaccccaaaaccaacagcctcacagagcccagagatctccacagcagcaaccatcaagacttcacaggccacaaaatcaggaaccccagagccaggaccccaccccaggtgaagaggaagaaatcctggagtcgagcctcttgccaccccttgaggaggctgcccatggaccccgagggctgaagggagagaaaggagagcctgcagtgttggaacctggtatgctcgtggaggggccccctggcccagaaggccctgcgggattgattggtccccctggcatccaggggaacccaggcccagttggagaccctggagagaggggcccccctggccgagcagggctccctggatcagatggggctcctggtcctcctggcacatctctcatgctcccattccggtttggcagtggtgggggtgacaagggccctgtggtggcggcccaggaggctcaggcccaggcgatcctgcagcaggcgaggctggcgctccgtggaccccctggccccatgggatacacagggcgccctggacccttgggccaacctgggagccctggcctgaaaggagagtctggagacttaggacctcagggccccagaggacctcagggcctcacaggccctcctggcaaggctgggcgaaggggccgggcaggtgctgatggagcccgagggatgcctggagatcctggagtgaagggtgaccgaggttttgatggactcccagggctccctggagagaagggccataggggtgatactggtgcccagggccttcctggtccccctggtgaggatggagagaggggagatgacggggagattgggcctcgagggctgcctggagagtcgggacctcgaggtctccttggccccaaaggcccacctggtattcctggaccccctggcgtccgaggcatggatggtccccagggccccaaagggagcttgggaccccagggagagccaggacctcctggacaacagggcacccctgggacccagggtcttcccgggccccagggtgccatcggccctcatggagagaagggtcctcaagggaagccagggctccccggcatgcctggctcagacggacccccgggtcacccagggaaggaaggtccccctggaaccaaaggaaaccagggtccctctggacctcagggacctctaggatacccaggacctcgaggggtcaagggtgtggacggaattcggggtctgaagggtcataagggtgagaagggtgaggatggctttcctgggttcaaaggtgacataggcgtgaaaggtgacaggggcgaagttggagtccctggttccaggggagaggatggtcctgaggggccaaagggacgcactggaccgactggagaccctgggcccccagggctcatgggcgagaagggcaagctgggtgttcctggtctgcctggctatcctggacgtcagggacccaaggggtccctaggatttcctggctttcctggtgccagtggagagaagggagcccggggcctgtcggggaagtcagggcctcggggagaacggggccccacgggtccacggggtcagcggggaccccgaggtgccactgggaagtctggagctaagggaacatctggtggtgatggcccccatgggccccctggagagaggggcctccctggacctcagggtcccaacgggtttcctggaccgaaaggacccccgggcccccctgggaaggacgggctgccgggacacccaggccaaagaggagaagtgggtttccaagggaagaccggcccccctggtcctccaggagtggtgggacctcagggagcagcaggagaaaccggccctatgggggagagaggtcacccaggccccccggggccccctggagagcagggactacctgggacagctggaaaagaaggaacaaagggtgaccctggtccccctggggccccagggaaggatggtcctgctggtctgaggggattcccaggagagagaggcctcccaggcactgctggtggacctggtttgaaggggaatgaaggtccgtctggcccccctggccctgcaggctcccctggggaacgaggtgcagcaggatcagggggacccattggtccgccagggcgcccaggcccgcagggtccccctggagcagcaggagagaaaggtgtcccaggtgagaagggccccattggcccaactggccgagatggagtgcagggtcctgtggggcttcctggtcctgctgggcctccaggtgtggctggagaggatggagacaagggtgaggtgggggaccccggacagaagggcaccaaagggaacaagggtgaacatggccctcctggaccccctggacccattggtcctgtggggcagcctggagcagcgggagcagatggggagcctggagctcggggaccccagggacactttggagccaaaggtgatgaaggaacaagaggattcaatgggcccccaggacccattggcctacagggtttgccaggcccctctggggagaagggagaaacaggagatgtgggtcctatgggaccacctggccccccaggacctcgaggtccagctggacccaatggcgctgatggcccacaaggtcccccaggaggtgttgggaacctgggtccccctggagagaagggggaaccaggagagtcaggatctccagggatccagggcgagccaggtgtcaagggtccacgcggggaacgtggagagaaaggagagtcggggcagccaggagagccagggccaccagggcctaaaggccccacaggcgatgatggccccaaagggaaccctggtcctgttggttttcctggtgaccctggcccccctggagaaggtggccctcggggccaggatggtgctaagggtgaccgaggcgaggatggtgagccaggacagcctggatcccctggtcccaccggggagaatggacccccagggccacttggaaagcgaggtcctgctggctcgcctggttccgaggggcgacaaggagggaagggagccaagggagatcctggcgctataggtgccccggggaagacaggcccggtgggtcctgcaggcccagcagggaaacctggccctgatggtctgagggggctcccaggctcagtgggtcagcaaggccgacctggagctacaggccaggctgggcccccaggtcctgtgggacccccagggctgcctggtctccggggcgatgctggagccaagggagagaagggccacccaggtctcattggactgattgggcccccgggtgagcagggagagaagggagatcggggacttcctgggcctcagggctcccctgggcagaagggtgagatgggtatcccaggagcatccggccccattggtcctggaggtccccccggcctccccggacctgctggccccaaaggagccaaaggagccacaggcccaggcggacccaagggagagaagggtgtgcagggccctccaggacacccgggtcccccaggcgaggtgatccagccactgcccattcagatgcccaagaagactcggcgctcggtggatggaagccgtctgatgcaggaagatgaggccataccgaccgggggagcccccggcagtcctggggggctggaggagatctttggctcactcgactccctgcgggaggagatcgagcagatgaggcggccaacagggacccaggacagccctgctcgcacctgccaggacctgaagctgtgccacccagagcttcccgatggagagtactgggtcgaccccaaccagggctgtgctcgggatgccttccgagttttctgcaacttcacagcagggggtgagacctgtgtgacgcctagggatgacgtcacgcagttctcttacgtggactcagagggctccccagtgggtgtggtccagctcaccttcctgcggctgctcagcgtctcagcccaccaggacgtctcctacccctgctctggagcagcccgtgacggtcccctgagactccgtggggccaatgaggatgagctgagcccggagactagcccctatgtcaaagaattcagagatggctgccagacacagcaaggccggacggtgctggaggtgcgaacgcctgtgctggagcagctgccagtgctggatgcctccttctcagacctgggagccccaccgaggcggggaggggtgctgctggggcctgtctgcttcatgggataggaccgtctctgtctgatcctgtccattcggaaccaggcccacctggaatcccacaacatcagctctgtgccacctcccaagagggctcctcactatctagggagccctgggccagggcgtggagagccctcagtcggggcaggccaggggaggggtgaagtggttgcctggacaccccacgggaggagtggcatctggggctcttggccctcccacctggagcctgttacccgttagagagctgagacccttatttaaaactcacctcccaatcaccccaaacaaatggaagagaagagaaaggacatggcgtattttgtatttaaaagtaattgtattaattatttaaagtgtggaaagcaaaataacaaaaaagagaaacgccaacaaaaatcagcagatgttgaagacaggggtctcgggggtgggctccggcacccacatcctggagtcaggactttcctcagtgactgtgtgtaggggggtttcagggctgaaccccacctccctcccaccttcctcccacctcacctgtcgcacccactgtgaaagttggaatatgtggtctccctggcctcagggctctgactctgccagggtggggctctctaacccacaggtgttggctgcctggcccatgtgcccactgtctcttccacttggtctgggtttggcaggcactgcctgctacttgagggccaggatgctcccccagggaagaaacggaatagtgtggggtgtgtgcagggctgcatcccgcagatggctggaatattaaaattcttctatattggctggtaaattgccatggccctgagccactgagtatgttcattgccacccctgtccctcccctgggcacccctcactttccctgatcctgcaattaaagggttaatgtgtggcatatggaagggactcccaggaccctgtgcccagcttccatgctgactgatggttaaataatgtgattgtctcctcccaggtgtctgtgtca

SEQ ID NO: 4510 - DNA, 1984 bp, Homo sapiens
  source 1..1984: mol_type = unassigned DNA
aaaaccaaagcccacaagcccacagatccacagtcccacacactgcaggcctgggccagctgtgtttgcttgggtttgggatggattggagggcgtccgaggcatggatggtccccagggccccaaagggagcttgggaccccagggagagccaggacctcctggacaacagggcacccctgggacccagggtcttcccgggccccagggtgccatcggccctcatggagagaagggtcctcaagggaagccagggctccccggcatgcctgggtcccccaggcgaggtgatccagccactgcccattcagatgcccaagaagactcggcgctcggtggatggaagccgtctgatgcaggaagatgaggccataccgaccgggggagcccccggcagtcctggggggctggaggagatctttggctcactcgactccctgcgggaggagatcgagcagatgaggcggccaacagggacccaggacagccctgctcgcacctgccaggacctgaagctgtgccacccagagcttcccgatggagagtactgggtcgaccccaaccagggctgtgctcgggatgccttccgagttttctgcaacttcacagcagggggtgagacctgtgtgacgcctagggatgacgtcacgcagttctcttacgtggactcagagggctccccagtgggtgtggtccagctcaccttcctgcggctgctcagcgtctcagcccaccaggacgtctcctacccctgctctggagcagcccgtgacggtcccctgagactccgtggggccaatgaggatgagctgagcccggagactagcccctatgtcaaagaattcagagatggctgccagacacagcaaggccggacggtgctggaggtgcgaacgcctgtgctggagcagctgccagtgctggatgcctccttctcagacctgggagccccaccgaggcggggaggggtgctgctggggcctgtctgcttcatgggataggaccgtctctgtctgatcctgtccattcggaaccaggcccacctggaatcccacaacatcagctctgtgccacctcccaagagggctcctcactatctagggagccctgggccagggcgtggagagccctcagtcggggcaggccaggggaggggtgaagtggttgcctggacaccccacgggaggagtggcatctggggctcttggccctcccacctggagcctgttacccgttagagagctgagacccttatttaaaactcacctcccaatcaccccaaacaaatggaagagaagagaaaggacatggcgtattttgtatttaaaagtaattgtattaattatttaaagtgtggaaagcaaaataacaaaaaagagaaacgccaacaaaaatcagcagatgttgaagacaggggtctcgggggtgggctccggcacccacatcctggagtcaggactttcctcagtgactgtgtgtaggggggtttcagggctgaaccccacctccctcccaccttcctcccacctcacctgtcgcacccactgtgaaagttggaatatgtggtctccctggcctcagggctctgactctgccagggtggggctctctaacccacaggtgttggctgcctggcccatgtgcccactgtctcttccacttggtctgggtttggcaggcactgcctgctacttgagggccaggatgctcccccagggaagaaacggaatagtgtggggtgtgtgcagggctgcatcccgcagatggctggaatattaaaattcttctatattggctggtaaattgccatggccctgagccactgagtatgttcattgccacccctgtccctcccctgggcacccctcactttccctgatcctgcaattaaagggttaatgtgtggcatatggaagggactcccaggaccctgtgcccagcttccatgctgactgatggttaaataatgtgattgtctcctccc

SEQ ID NO: 4511 - DNA, 2099 bp, Homo sapiens
  source 1..2099: mol_type = unassigned DNA
acacagaagcggcagccaccgaggagggagcagtgccgggagccccgacggcgccttgctgcatggagctgggccgctgacagctgtcgctgcccgcagcctctgacctccctgggaccccggcgtctgaggctcatagtctgctccctgtcttctgtcagcctcagggcatccagcgtctcaggccgacctgggtccctgggacccggcgtttcggcttctcagccatggagcggtgcagccgctgccatcgcctcctcctcctcctacctctggtgctggggctgagcgcggccccaggctgggcaggtgcaccccctgtggatgtgctccgggccctgaggttcccctccctccctgatggtgtccggagagcgaaaggcatctgtccagctgatgtggcctaccgagtggcacgacctgcccagctcagtgcacccactcgccagcttttcccaggaggatttcccaaagatttctctctgctgactgttgtccggacccgccctggtctccaagctcccctcctgactctctacagtgcccagggtgtccgacagctgggcctggagctgggcccacctgtccgcttcctgtatgaagaccagactgggcggcctcaacctccctctcagccagtcttccgaggcctcagcctagcagatggcaagtggcaccgtgtggctgtggctgtgaagggccagtctgtcaccctcattgttgactgcaagaagcgagtcacccggcctctcccccgaagtgctcgtccagtattggacacccatggagtgatcatctttggtgcccgtattctggatgaagaagtctttgagggtgatgtccaggagctggccattgtcccaggggtccaggcagcctatgaatcatgtgaacagaaggagctggaatgcgaggggggccagagggaaagaccccaaaaccaacagcctcacagagcccagagatctccacagcagcaaccatcaagacttcacaggccacaaaatcaggaaccccagagccagcccactgagtctctctactatgactacaagcccccctattatgatgtgatgactacggggacaacccctgattatcaggaccccaccccaggtgaagaggaagaaatcctggagtcgagcctcttgccaccccttgaggaggagcagacagatctccaggtcccccccacagccgacaggttccaggcagaggaatatggggagggtggcacagacccccctgaagggccctacgattacacctatggctatggggatgattatcgtgaggagacagagcttggccctgccctctctgcggagacagcccactcaggagccgctgcccatggaccccgagggctgaagggagagaaaggagagcctgcagtgttggaacctggtatgctcgtggaggggccccctggcccagaaggccctgcgggattgattggtccccctggcatccaggggaacccaggcccagttggagaccctggagagaggggcccccctggccgagcagggctccctggatcagatggggctcctggtcctcctggcacatctctcatgctcccattccggtttggcagtggtgggggtgacaagggccctgtggtggcggcccaggaggctcaggcccaggcgatcctgcagcaggcgaggctggcgctccgtggaccccctggccccatgggatacacagggcgccctggacccttgggccaacctgggagccctggcctgaaaggagagtctggagacttaggacctcagggccccagaggacctcagggcctcacaggccctcctggcaaggctgggcgaaggggccgggcaggtgctgatggagcccgagggatgcctggagatcctggagtgaagggtgaccgaggttttgatggactcccagggctccctggagagaagggccataggggtgatactggtgcccagggccttcctggtccccctggtgaggatggagagaggggagatgacggggagattgggcctcgagggctgcctggagagtcgggacctcgaggtctccttggccccaaaggcccacctggtattcctggaccccct

SEQ ID NO: 4512 - DNA, 1194 bp, Homo sapiens
  source 1..1194: mol_type = unassigned DNA
agccaccgaggagggagcagtgccgggagccccgacggcgccttgctgcatggagctgggccgctgacagctgtcgctgcccgcagcctctgacctccctgggaccccggcgtctgaggctcatagtctgctccctgtcttctgtcagcctcagggcatccagcgtctcaggccgacctgggtccctgggacccggcgtttcggcttctcagccatggagcggtgcagccgctgccatcgcctcctcctcctcctacctctggtgctggggctgagcgcggccccaggctgggcaggtgcaccccctgtggatgtgctccgggccctgaggttcccctccctccctgatggtgtccggagagcgaaaggcatctgtccagctgatgtggcctaccgagtggcacgacctgcccagctcagtgcacccactcgccagcttttcccaggaggatttcccaaagatttctctctgctgactgttgtccggacccgccctggtctccaagctcccctcctgactctctacagtgcccagggtgtccgacagctgggcctggagctgggcccacctgtccgcttcctgtatgaagaccagactgggcggcctcaacctccctctcagccagtcttccgaggcctcagcctagcagatggcaagtggcaccgtgtggctgtggctgtgaagggccagtctgtcaccctcattgttgactgcaagaagcgagtcacccggcctctcccccgaagtgctcgtccagtattggacacccatggagtgatcatctttggtgcccgtattctggatgaagaagtctttgagggtgatgtccaggagctggccattgtcccaggggtccaggcagcctatgaatcatgtgaacagaaggagctggaatgcgaggggggccagagggaaagaccccaaaaccaacagcctcacagagcccagagatctccacagcagcaaccatcaagacttcacaggccacaaaatcaggaaccccagagccaggtgagggagctgggagaacccccaagtgcagcacaccccagagagggaagacacccaggcatctctcctccttagttgtcctccccaccctcatctccctattcccatcaccccctcctcctagtcctcattcatcagcctttttattttcatctaaaaataaaaagagttgttatgaagaa

SEQ ID NO: 4513 - DNA, 6104 bp, Homo sapiens
  source 1..6104: mol_type = unassigned DNA
cacacagaagcggcagccaccgaggagggagcagtgccgggagccccgacggcgccttgctgcatggagctgggccgctgacagctgtcgctgcccgcagcctctgacctccctgggaccccggcgtctgaggctcatagtctgctccctgtcttctgtcagcctcagggcatccagcgtctcaggccgacctgggtccctgggacccggcgtttcggcttctcagccatggagcggtgcagccgctgccatcgcctcctcctcctcctacctctggtgctggggctgagcgcggccccaggctgggcaggtgcaccccctgtggatgtgctccgggccctgaggttcccctccctccctgatggtgtccggagagcgaaaggcatctgtccagctgatgtggcctaccgagtggcacgacctgcccagctcagtgcacccactcgccagcttttcccaggaggatttcccaaagatttctctctgctgactgttgtccggacccgccctggtctccaagctcccctcctgactctctacagtgcccagggtgtccgacagctgggcctggagctgggcccacctgtccgcttcctgtatgaagaccagactgggcggcctcaacctccctctcagccagtcttccgaggcctcagcctagcagatggcaagtggcaccgtgtggctgtggctgtgaagggccagtctgtcaccctcattgttgactgcaagaagcgagtcacccggcctctcccccgaagtgctcgtccagtattggacacccatggagtgatcatctttggtgcccgtattctggatgaagaagtctttgagggtgatgtccaggagctggccattgtcccaggggtccaggcagcctatgaatcatgtgaacagaaggagctggaatgcgaggggggccagagggaaagaccccaaaaccaacagcctcacagagcccagagatctccacagcagcaaccatcaagacttcacaggccacaaaatcaggaaccccagagccaggctgcccatggaccccgagggctgaagggagagaaaggagagcctgcagtgttggaacctggtatgctcgtggaggggccccctggcccagaaggccctgcgggattgattggtccccctggcatccaggggaacccaggcccagttggagaccctggagagaggggcccccctggccgagcagggctccctggatcagatggggctcctggtcctcctggcacatctctcatgctcccattccggtttggcagtggtgggggtgacaagggccctgtggtggcggcccaggaggctcaggcccaggcgatcctgcagcaggcgaggctggcgctccgtggaccccctggccccatgggatacacagggcgccctggacccttgggccaacctgggagccctggcctgaaaggagagtctggagacttaggacctcagggccccagaggacctcagggcctcacaggccctcctggcaaggctgggcgaaggggccgggcaggtgctgatggagcccgagggatgcctggagatcctggagtgaagggtgaccgaggttttgatggactcccagggctccctggagagaagggccataggggtgatactggtgcccagggccttcctggtccccctggtgaggatggagagaggggagatgacggggagattgggcctcgagggctgcctggagagtcgggacctcgaggtctccttggccccaaaggcccacctggtattcctggaccccctggcgtccgaggcatggatggtccccagggccccaaagggagcttgggaccccagggagagccaggacctcctggacaacagggcacccctgggacccagggtcttcccgggccccagggtgccatcggccctcatggagagaagggtcctcaagggaagccagggctccccggcatgcctggctcagacggacccccgggtcacccagggaaggaaggtccccctggaaccaaaggaaaccagggtccctctggacctcagggacctctaggatacccaggacctcgaggggtcaagggtgtggacggaattcggggtctgaagggtcataagggtgagaagggtgaggatggctttcctgggttcaaaggtgacataggcgtgaaaggtgacaggggcgaagttggagtccctggttccaggggagaggatggtcctgaggggccaaagggacgcactggaccgactggagaccctgggcccccagggctcatgggcgagaagggcaagctgggtgttcctggtctgcctggctatcctggacgtcagggacccaaggggtccctaggatttcctggctttcctggtgccagtggagagaagggagcccggggcctgtcggggaagtcagggcctcggggagaacggggccccacgggtccacggggtcagcggggaccccgaggtgccactgggaagtctggagctaagggaacatctggtggtgatggcccccatgggccccctggagagaggggcctccctggacctcagggtcccaacgggtttcctggaccgaaaggacccccgggcccccctgggaaggacgggctgccgggacacccaggccaaagaggagaagtgggtttccaagggaagaccggcccccctggtcctccaggagtggtgggacctcagggagcagcaggagaaaccggccctatgggggagagaggtcacccaggccccccggggccccctggagagcagggactacctgggacagctggaaaagaaggaacaaagggtgaccctggtccccctggggccccagggaaggatggtcctgctggtctgaggggattcccaggagagagaggcctcccaggcactgctggtggacctggtttgaaggggaatgaaggtccgtctggcccccctggccctgcaggctcccctggggaacgaggtgcagcaggatcagggggacccattggtccgccagggcgcccaggcccgcagggtccccctggagcagcaggagagaaaggtgtcccaggtgagaagggccccattggcccaactggccgagatggagtgcagggtcctgtggggcttcctggtcctgctgggcctccaggtgtggctggagaggatggagacaagggtgaggtgggggaccccggacagaagggcaccaaagggaacaagggtgaacatggccctcctggaccccctggacccattggtcctgtggggcagcctggagcagcgggagcagatggggagcctggagctcggggaccccagggacactttggagccaaaggtgatgaaggaacaagaggattcaatgggcccccaggacccattggcctacagggtttgccaggcccctctggggagaagggagaaacaggagatgtgggtcctatgggaccacctggccccccaggacctcgaggtccagctggacccaatggcgctgatggcccacaaggtcccccaggaggtgttgggaacctgggtccccctggagagaagggggaaccaggagagtcaggatctccagggatccagggcgagccaggtgtcaagggtccacgcggggaacgtggagagaaaggagagtcggggcagccaggagagccagggccaccagggcctaaaggccccacaggcgatgatggccccaaagggaaccctggtcctgttggttttcctggtgaccctggcccccctggagaaggtggccctcggggccaggatggtgctaagggtgaccgaggcgaggatggtgagccaggacagcctggatcccctggtcccaccggggagaatggacccccagggccacttggaaagcgaggtcctgctggctcgcctggttccgaggggcgacaaggagggaagggagccaagggagatcctggcgctataggtgccccggggaagacaggcccggtgggtcctgcaggcccagcagggaaacctggccctgatggtctgagggggctcccaggctcagtgggtcagcaaggccgacctggagctacaggccaggctgggcccccaggtcctgtgggacccccagggctgcctggtctccggggcgatgctggagccaagggagagaagggccacccaggtctcattggactgattgggcccccgggtgagcagggagagaagggagatcggggacttcctgggcctcagggctcccctgggcagaagggtgagatgggtatcccaggagcatccggccccattggtcctggaggtccccccggcctccccggacctgctggccccaaaggagccaaaggagccacaggcccaggcggacccaagggagagaagggtgtgcagggccctccaggacacccgggtcccccaggcgaggtgatccagccactgcccattcagatgcccaagaagactcggcgctcggtggatggaagccgtctgatgcaggaagatgaggccataccgaccgggggagcccccggcagtcctggggggctggaggagatctttggctcactcgactccctgcgggaggagatcgagcagatgaggcggccaacagggacccaggacagccctgctcgcacctgccaggacctgaagctgtgccacccagagcttcccgatggagagtactgggtcgaccccaaccagggctgtgctcgggatgccttccgagttttctgcaacttcacagcagggggtgagacctgtgtgacgcctagggatgacgtcacgcagttctcttacgtggactcagagggctccccagtgggtgtggtccagctcaccttcctgcggctgctcagcgtctcagcccaccaggacgtctcctacccctgctctggagcagcccgtgacggtcccctgagactccgtggggccaatgaggatgagctgagcccggagactagcccctatgtcaaagaattcagagatggctgccagacacagcaaggccggacggtgctggaggtgcgaacgcctgtgctggagcagctgccagtgctggatgcctccttctcagacctgggagccccaccgaggcggggaggggtgctgctggggcctgtctgcttcatgggataggaccgtctctgtctgatcctgtccattcggaaccaggcccacctggaatcccacaacatcagctctgtgccacctcccaagagggctcctcactatctagggagccctgggccagggcgtggagagccctcagtcggggcaggccaggggaggggtgaagtggttgcctggacaccccacgggaggagtggcatctggggctcttggccctcccacctggagcctgttacccgttagagagctgagacccttatttaaaactcacctcccaatcaccccaaacaaatggaagagaagagaaaggacatggcgtattttgtatttaaaagtaattgtattaattatttaaagtgtggaaagcaaaataacaaaaaagagaaacgccaacaaaaatcagcagatgttgaagacaggggtctcgggggtgggctccggcacccacatcctggagtcaggactttcctcagtgactgtgtgtaggggggtttcagggctgaaccccacctccctcccaccttcctcccacctcacctgtcgcacccactgtgaaagttggaatatgtggtctccctggcctcagggctctgactctgccagggtggggctctctaacccacaggtgttggctgcctggcccatgtgcccactgtctcttccacttggtctgggtttggcaggcactgcctgctacttgagggccaggatgctcccccagggaagaaacggaatagtgtggggtgtgtgcagggctgcatcccgcagatggctggaatattaaaattcttctatattggctggtaaattgccatggccctgagccactgagtatgttcattgccacccctgtccctcccctgggcacccctcactttccctgatcctgcaattaaagggttaatgtgtggcatatggaagggactcccaggaccctgtgcccagcttccatgctgactgatggttaaataatgtgattgtctcctcccagg

SEQ ID NO: 4514 - DNA, 6425 bp, Homo sapiens
  source 1..6425: mol_type = unassigned DNA
cacacagaagcggcagccaccgaggagggagcagtgccgggagccccgacggcgccttgctgcatggagctgggccgctgacagctgtcgctgcccgcagcctctgacctccctgggaccccggcgtctgaggctcatagtctgctccctgtcttctgtcagcctcagggcatccagcgtctcaggccgacctgggtccctgggacccggcgtttcggcttctcagccatggagcggtgcagccgctgccatcgcctcctcctcctcctacctctggtgctggggctgagcgcggccccaggctgggcaggtgcaccccctgtggatgtgctccgggccctgaggttcccctccctccctgatggtgtccggagagcgaaaggcatctgtccagctgatgtggcctaccgagtggcacgacctgcccagctcagtgcacccactcgccagcttttcccaggaggatttcccaaagatttctctctgctgactgttgtccggacccgccctggtctccaagctcccctcctgactctctacagtgcccagggtgtccgacagctgggcctggagctgggcccacctgtccgcttcctgtatgaagaccagactgggcggcctcaacctccctctcagccagtcttccgaggcctcagcctagcagatggcaagtggcaccgtgtggctgtggctgtgaagggccagtctgtcaccctcattgttgactgcaagaagcgagtcacccggcctctcccccgaagtgctcgtccagtattggacacccatggagtgatcatctttggtgcccgtattctggatgaagaagtctttgagggtgatgtccaggagctggccattgtcccaggggtccaggcagcctatgaatcatgtgaacagaaggagctggaatgcgaggggggccagagggaaagaccccaaaaccaacagcctcacagagcccagagatctccacagcagcaaccatcaagacttcacaggccacaaaatcaggaaccccagagccagcccactgagtctctctactatgactacaagcccccctattatgatgtgatgactacggggacaacccctgattatcaggaccccaccccaggtgaagaggaagaaatcctggagtcgagcctcttgccaccccttgaggaggagcagacagatctccaggtcccccccacagccgacaggttccaggcagaggaatatggggagggtggcacagacccccctgaagggccctacgattacacctatggctatggggatgattatcgtgaggagacagagcttggccctgccctctctgcggagacagcccactcaggagccgctgcccatggaccccgagggctgaagggagagaaaggagagcctgcagtgttggaacctggtatgctcgtggaggggccccctggcccagaaggccctgcgggattgattggtccccctggcatccaggggaacccaggcccagttggagaccctggagagaggggcccccctggccgagcagggctccctggatcagatggggctcctggtcctcctggcacatctctcatgctcccattccggtttggcagtggtgggggtgacaagggccctgtggtggcggcccaggaggctcaggcccaggcgatcctgcagcaggcgaggctggcgctccgtggaccccctggccccatgggatacacagggcgccctggacccttgggccaacctgggagccctggcctgaaaggagagtctggagacttaggacctcagggccccagaggacctcagggcctcacaggccctcctggcaaggctgggcgaaggggccgggcaggtgctgatggagcccgagggatgcctggagatcctggagtgaagggtgaccgaggttttgatggactcccagggctccctggagagaagggccataggggtgatactggtgcccagggccttcctggtccccctggtgaggatggagagaggggagatgacggggagattgggcctcgagggctgcctggagagtcgggacctcgaggtctccttggccccaaaggcccacctggtattcctggaccccctggcgtccgaggcatggatggtccccagggccccaaagggagcttgggaccccagggagagccaggacctcctggacaacagggcacccctgggacccagggtcttcccgggccccagggtgccatcggccctcatggagagaagggtcctcaagggaagccagggctccccggcatgcctggctcagacggacccccgggtcacccagggaaggaaggtccccctggaaccaaaggaaaccagggtccctctggacctcagggacctctaggatacccaggacctcgaggggtcaagggtgtggacggaattcggggtctgaagggtcataagggtgagaagggtgaggatggctttcctgggttcaaaggtgacataggcgtgaaaggtgacaggggcgaagttggagtccctggttccaggggagaggatggtcctgaggggccaaagggacgcactggaccgactggagaccctgggcccccagggctcatgggcgagaagggcaagctgggtgttcctggtctgcctggctatcctggacgtcagggacccaaggggtccctaggatttcctggctttcctggtgccagtggagagaagggagcccggggcctgtcggggaagtcagggcctcggggagaacggggccccacgggtccacggggtcagcggggaccccgaggtgccactgggaagtctggagctaagggaacatctggtggtgatggcccccatgggccccctggagagaggggcctccctggacctcagggtcccaacgggtttcctggaccgaaaggacccccgggcccccctgggaaggacgggctgccgggacacccaggccaaagaggagaagtgggtttccaagggaagaccggcccccctggtcctccaggagtggtgggacctcagggagcagcaggagaaaccggccctatgggggagagaggtcacccaggccccccggggccccctggagagcagggactacctgggacagctggaaaagaaggaacaaagggtgaccctggtccccctggggccccagggaaggatggtcctgctggtctgaggggattcccaggagagagaggcctcccaggcactgctggtggacctggtttgaaggggaatgaaggtccgtctggcccccctggccctgcaggctcccctggggaacgaggtgcagcaggatcagggggacccattggtccgccagggcgcccaggcccgcagggtccccctggagcagcaggagagaaaggtgtcccaggtgagaagggccccattggcccaactggccgagatggagtgcagggtcctgtggggcttcctggtcctgctgggcctccaggtgtggctggagaggatggagacaagggtgaggtgggggaccccggacagaagggcaccaaagggaacaagggtgaacatggccctcctggaccccctggacccattggtcctgtggggcagcctggagcagcgggagcagatggggagcctggagctcggggaccccagggacactttggagccaaaggtgatgaaggaacaagaggattcaatgggcccccaggacccattggcctacagggtttgccaggcccctctggggagaagggagaaacaggagatgtgggtcctatgggaccacctggccccccaggacctcgaggtccagctggacccaatggcgctgatggcccacaaggtcccccaggaggtgttgggaacctgggtccccctggagagaagggggaaccaggagagtcaggatctccagggatccagggcgagccaggtgtcaagggtccacgcggggaacgtggagagaaaggagagtcggggcagccaggagagccagggccaccagggcctaaaggccccacaggcgatgatggccccaaagggaaccctggtcctgttggttttcctggtgaccctggcccccctggagaaggtggccctcggggccaggatggtgctaagggtgaccgaggcgaggatggtgagccaggacagcctggatcccctggtcccaccggggagaatggacccccagggccacttggaaagcgaggtcctgctggctcgcctggttccgaggggcgacaaggagggaagggagccaagggagatcctggcgctataggtgccccggggaagacaggcccggtgggtcctgcaggcccagcagggaaacctggccctgatggtctgagggggctcccaggctcagtgggtcagcaaggccgacctggagctacaggccaggctgggcccccaggtcctgtgggacccccagggctgcctggtctccggggcgatgctggagccaagggagagaagggccacccaggtctcattggactgattgggcccccgggtgagcagggagagaagggagatcggggacttcctgggcctcagggctcccctgggcagaagggtgagatgggtatcccaggagcatccggccccattggtcctggaggtccccccggcctccccggacctgctggccccaaaggagccaaaggagccacaggcccaggcggacccaagggagagaagggtgtgcagggccctccaggacacccgggtcccccaggcgaggtgatccagccactgcccattcagatgcccaagaagactcggcgctcggtggatggaagccgtctgatgcaggaagatgaggccataccgaccgggggagcccccggcagtcctggggggctggaggagatctttggctcactcgactccctgcgggaggagatcgagcagatgaggcggccaacagggacccaggacagccctgctcgcacctgccaggacctgaagctgtgccacccagagcttcccgatggagagtactgggtcgaccccaaccagggctgtgctcgggatgccttccgagttttctgcaacttcacagcagggggtgagacctgtgtgacgcctagggatgacgtcacgcagttctcttacgtggactcagagggctccccagtgggtgtggtccagctcaccttcctgcggctgctcagcgtctcagcccaccaggacgtctcctacccctgctctggagcagcccgtgacggtcccctgagactccgtggggccaatgaggatgagctgagcccggagactagcccctatgtcaaagaattcagagatggctgccagacacagcaaggccggacggtgctggaggtgcgaacgcctgtgctggagcagctgccagtgctggatgcctccttctcagacctgggagccccaccgaggcggggaggggtgctgctggggcctgtctgcttcatgggataggaccgtctctgtctgatcctgtccattcggaaccaggcccacctggaatcccacaacatcagctctgtgccacctcccaagagggctcctcactatctagggagccctgggccagggcgtggagagccctcagtcggggcaggccaggggaggggtgaagtggttgcctggacaccccacgggaggagtggcatctggggctcttggccctcccacctggagcctgttacccgttagagagctgagacccttatttaaaactcacctcccaatcaccccaaacaaatggaagagaagagaaaggacatggcgtattttgtatttaaaagtaattgtattaattatttaaagtgtggaaagcaaaataacaaaaaagagaaacgccaacaaaaatcagcagatgttgaagacaggggtctcgggggtgggctccggcacccacatcctggagtcaggactttcctcagtgactgtgtgtaggggggtttcagggctgaaccccacctccctcccaccttcctcccacctcacctgtcgcacccactgtgaaagttggaatatgtggtctccctggcctcagggctctgactctgccagggtggggctctctaacccacaggtgttggctgcctggcccatgtgcccactgtctcttccacttggtctgggtttggcaggcactgcctgctacttgagggccaggatgctcccccagggaagaaacggaatagtgtggggtgtgtgcagggctgcatcccgcagatggctggaatattaaaattcttctatattggctggtaaattgccatggccctgagccactgagtatgttcattgccacccctgtccctcccctgggcacccctcactttccctgatcctgcaattaaagggttaatgtgtggcatatggaagggactcccaggaccctgtgcccagcttccatgctgactgatggttaaataatgtgattgtctcctcccagg

SEQ ID NO: 4515 - DNA, 6209 bp, Homo sapiens
  source 1..6209: mol_type = unassigned DNA
tgggggctctgggcgccagggtggccggggacacacagaagcggcagccaccgaggagggagcagtgccgggagccccgacggcgccttgctgcatggagctgggccgctgacagctgtcgctgcccgcagcctctgacctccctgggaccccggcgtctgaggctcatagtctgctccctgtcttctgtcagcctcagggcatccagcgtctcaggccgacctgggtccctgggacccggcgtttcggcttctcagccatggagcggtgcagccgctgccatcgcctcctcctcctcctacctctggtgctggggctgagcgcggccccaggctgggcaggtgcaccccctgtggatgtgctccgggccctgaggttcccctccctccctgatggtgtccggagagcgaaaggcatctgtccagctgatgtggcctaccgagtggcacgacctgcccagctcagtgcacccactcgccagcttttcccaggaggatttcccaaagatttctctctgctgactgttgtccggacccgccctggtctccaagctcccctcctgactctctacagtgcccagggtgtccgacagctgggcctggagctgggccgacctgtccgcttcctgtatgaagaccagactgggcggcctcaacctccctctcagccagtcttccgaggcctcagcctagcagatggcaagtggcaccgtgtggctgtggctgtgaagggccagtctgtcaccctcattgttgactgcaagaagcgagtcacccggcctctcccccgaagtgctcgtccagtattggacacccatggagtgatcatctttggtgcccgtattctggatgaagaagtctttgagggtgatgtccaggagctggccattgtcccaggggtccaggcagcctatgaatcatgtgaacagaaggagctggaatgcgaggggggccagagggaaagaccccaaaaccaacagcctcacagagcccagagatctccacagcagcaaccatcaagacttcacaggccacaaaatcaggaaccccagagccaggaccccaccccaggtgaagaggaagaaatcctggagtcgagcctcttgccaccccttgaggaggctgcccatggaccccgagggctgaagggagagaaaggagagcctgcagtgttggaacctggtatgctcgtggaggggccccctggcccagaaggccctgcgggattgattggtccccctggcatccaggggaacccaggcccagttggagaccctggagagaggggcccccctggccgagcagggctccctggatcagatggggctcctggtcctcctggcacatctctcatgctcccattccggtttggcagtggtgggggtgacaagggccctgtggtggcggcccaggaggctcaggcccaggcgatcctgcagcaggcgaggctggcgctccgtggaccccctggccccatgggatacacagggcgccctggacccttgggccaacctgggagccctggcctgaaaggagagtctggagacttaggacctcagggccccagaggacctcagggcctcacaggccctcctggcaaggctgggcgaaggggccgggcaggtgctgatggagcccgagggatgcctggagatcctggagtgaagggtgaccgaggttttgatggactcccagggctccctggagagaagggccataggggtgatactggtgcccagggccttcctggtccccctggtgaggatggagagaggggagatgacggggagattgggcctcgagggctgcctggagagtcgggacctcgaggtctccttggccccaaaggcccacctggtattcctggaccccctggcgtccgaggcatggatggtccccagggccccaaagggagcttgggaccccagggagagccaggacctcctggacaacagggcacccctgggacccagggtcttcccgggccccagggtgccatcggccctcatggagagaagggtcctcaagggaagccagggctccccggcatgcctggctcagacggacccccgggtcacccagggaaggaaggtccccctggaaccaaaggaaaccagggtccctctggacctcagggacctctaggatacccaggacctcgaggggtcaagggtgtggacggaattcggggtctgaagggtcataagggtgagaagggtgaggatggctttcctgggttcaaaggtgacataggcgtgaaaggtgacaggggcgaagttggagtccctggttccaggggagaggatggtcctgaggggccaaagggacgcactggaccgactggagaccctgggcccccagggctcatgggcgagaagggcaagctgggtgttcctggtctgcctggctatcctggacgtcagggacccaaggggtccctaggatttcctggctttcctggtgccagtggagagaagggagcccggggcctgtcggggaagtcagggcctcggggagaacggggccccacgggtccacggggtcagcggggaccccgaggtgccactgggaagtctggagctaagggaacatctggtggtgatggcccccatgggccccctggagagaggggcctccctggacctcagggtcccaacgggtttcctggaccgaaaggacccccgggcccccctgggaaggacgggctgccgggacacccaggccaaagaggagaagtgggtttccaagggaagaccggcccccctggtcctccaggagtggtgggacctcagggagcagcaggagaaaccggccctatgggggagagaggtcacccaggccccccggggccccctggagagcagggactacctgggacagctggaaaagaaggaacaaagggtgaccctggtccccctggggccccagggaaggatggtcctgctggtctgaggggattcccaggagagagaggcctcccaggcactgctggtggacctggtttgaaggggaatgaaggtccgtctggcccccctggccctgcaggctcccctggggaacgaggtgcagcaggatcagggggacccattggtccgccagggcgcccaggcccgcagggtccccctggagcagcaggagagaaaggtgtcccaggtgagaagggccccattggcccaactggccgagatggagtgcagggtcctgtggggcttcctggtcctgctgggcctccaggtgtggctggagaggatggagacaagggtgaggtgggggaccccggacagaagggcaccaaagggaacaagggtgaacatggccctcctggaccccctggacccattggtcctgtggggcagcctggagcagcgggagcagatggggagcccggagctcggggaccccagggacactttggagccaaaggtgatgaaggaacaagaggattcaatgggcccccaggacccattggcctacagggtttgccaggcccctctggggagaagggagaaacaggagatgtgggtcctatgggaccacctggccccccaggacctcgaggtccagctggacccaatggcgctgatggcccacaaggtcccccaggaggtgttgggaacctgggtccccctggagagaagggggaaccaggagagtcaggatctccagggatccagggcgagccaggtgtcaagggtccacgcggggaacgtggagagaaaggagagtcggggcagccaggagagccagggccaccagggcctaaaggccccacaggcgatgatggccccaaagggaaccctggtcctgttggttttcctggtgaccctggcccccctggagaaggtggccctcggggccaggatggtgctaagggtgaccgaggcgaggatggtgagccaggacagcctggatcccctggtcccaccggggagaatggacccccagggccacttggaaagcgaggtcctgctggctcgcctggttccgaggggcgacaaggagggaagggagccaagggagatcctggcgctataggtgccccggggaagacaggcccggtgggtcctgcaggcccagcagggaaacctggccctgatggtctgagggggctcccaggctcagtgggtcagcaaggccgacctggagctacaggccaggctgggcccccaggtcctgtgggacccccagggctgcctggtctccggggcgatgctggagccaagggagagaagggccacccaggtctcattggactgattgggcccccgggtgagcagggagagaagggagatcggggacttcctgggcctcagggctcccctgggcagaagggtgagatgggtatcccaggagcatccggccccattggtcctggaggtccccccggcctccccggacctgctggccccaaaggagccaaaggagccacaggcccaggcggacccaagggagagaagggtgtgcagggccctccaggacacccgggtcccccaggcgaggtgatccagccactgcccattcagatgcccaagaagactcggcgctcggtggatggaagccgtctgatgcaggaagatgaggccataccgaccgggggagcccccggcagtcctggggggctggaggagatctttggctcactcgactccctgcgggaggagatcgagcagatgaggcggccaacagggacccaggacagccctgctcgcacctgccaggacctgaagctgtgccacccagagcttcccgatggagagtactgggtcgaccccaaccagggctgtgctcgggatgccttccgagttttctgcaacttcacagcagggggtgagacctgtgtgacgcctagggatgacgtcacgcagttctcttacgtggactcagagggctccccagtgggtgtggtccagctcaccttcctgcggctgctcagcgtctcagcccaccaggacgtctcctacccctgctctggagcagcccgtgacggtcccctgagactccgtggggccaatgaggatgagctgagcccggagactagcccctatgtcaaagaattcagagatggctgccagacacagcaaggccggacggtgctggaggtgcgaacgcctgtgctggagcagctgccagtgctggatgcctccttctcagacctgggagccccaccgaggcggggaggggtgctgctggggcctgtctgcttcatgggataggaccgtctctgtctgatcctgtccattcggaaccaggcccacctggaatcccacaacatcagctctgtgccacctcccaagagggctcctcactatctagggagccctgggccagggcgtggagagccctcagtcggggcaggccaggggaggggtgaagtggttgcctggacaccccacgggaggagtggcatctggggctcttggccctcccacctggagcctgttacccgttagagagctgagacccttatttaaaactcacctcccaatcaccccaaacaaatggaagagaagagaaaggacatggcgtattttgtatttaaaagtaattgtattaattatttaaagtgtggaaagcaaaataacaaaaaagagaaacgccaacaaaaatcagcagatgttgaagacaggggtctcgggggtgggctccggcacccacatcctggagtcaggactttcctcagtgactgtgtgtaggggggtttcagggctgaaccccacctccctcccaccttcctcccacctcacctgtcgcacccactgtgaaagttggaatatgtggtctccctggcctcagggctctgactctgccagggtggggctctctaacccacaggtgttggctgcctggcccatgtgcccactgtctcttccacttggtctgggtttggcaggcactgcctgctacttgagggccaggatgctcccccagggaagaaacggaatagtgtggggtgtgtgcagggctgcatcccgcagatggctggaatattaaaattcttctatattggctggtaaattgccatggccctgagccactgagtatgttcattgccacccctgtccctcccctgggcacccctcactttccctgatcctgcaattaaagggttaatgtgtggcatatggaagggactcccaggaccctgtgcccagcttccatgctgactgatggttaaataatgtgattgtctcctcccaggtgtctgtgtca

SEQ ID NO: 4516 - DNA, 1984 bp, Homo sapiens; identical to SEQ ID NO: 4510
  source 1..1984: mol_type = unassigned DNA

SEQ ID NO: 4517 - DNA, 2099 bp, Homo sapiens
  source 1..2099: mol_type = unassigned DNA
acacagaagcggcagccaccgaggagggagcagtgccgggagccccgacggcgccttgctgcatggagctgggccgctgacagctgtcgctgcccgcagcctctgacctccctgggaccccggcgtctgaggctcatagtctgctccctgtcttctgtcagcctcagggcatccagcgtctcaggccgacctgggtccctgggacccggcgtttcggcttctcagccatggagcggtgcagccgctgccatcgcctcctcctcctcctacctctggtgctggggctgagcgcggccccaggctgggcaggtgcaccccctgtggatgtgctccgggccctgaggttcccctccctccctgatggtgtccggagagcgaaaggcatctgtccagctgatgtggcctaccgagtggcacgacctgcccagctcagtgcacccactcgccagcttttcccaggaggatttcccaaagatttctctctgctgactgttgtccggacccgccctggtctccaagctcccctcctgactctctacagtgcccagggtgtccgacagctgggcctggagctgggccgacctgtccgcttcctgtatgaagaccagactgggcggcctcaacctccctctcagccagtcttccgaggcctcagcctagcagatggcaagtggcaccgtgtggctgtggctgtgaagggccagtctgtcaccctcattgttgactgcaagaagcgagtcacccggcctctcccccgaagtgctcgtccagtattggacacccatggagtgatcatctttggtgcccgtattctggatgaagaagtctttgagggtgatgtccaggagctggccattgtcccaggggtccaggcagcctatgaatcatgtgaacagaaggagctggaatgcgaggggggccagagggaaagaccccaaaaccaacagcctcacagagcccagagatctccacagcagcaaccatcaagacttcacaggccacaaaatcaggaaccccagagccagcccactgagtctctctactatgactacaagcccccctattatgatgtgatgactacggggacaacccctgattatcaggaccccaccccaggtgaagaggaagaaatcctggagtcgagcctcttgccaccccttgaggaggagcagacagatctccaggtcccccccacagccgacaggttccaggcagaggaatatggggagggtggcacagacccccctgaagggccctacgattacacctatggctatggggatgattatcgtgaggagacagagcttggccctgccctctctgcggagacagcccactcaggagccgctgcccatggaccccgagggctgaagggagagaaaggagagcctgcagtgttggaacctggtatgctcgtggaggggccccctggcccagaaggccctgcgggattgattggtccccctggcatccaggggaacccaggcccagttggagaccctggagagaggggcccccctggccgagcagggctccctggatcagatggggctcctggtcctcctggcacatctctcatgctcccattccggtttggcagtggtgggggtgacaagggccctgtggtggcggcccaggaggctcaggcccaggcgatcctgcagcaggcgaggctggcgctccgtggaccccctggccccatgggatacacagggcgccctggacccttgggccaacctgggagccctggcctgaaaggagagtctggagacttaggacctcagggccccagaggacctcagggcctcacaggccctcctggcaaggctgggcgaaggggccgggcaggtgctgatggagcccgagggatgcctggagatcctggagtgaagggtgaccgaggttttgatggactcccagggctccctggagagaagggccataggggtgatactggtgcccagggccttcctggtccccctggtgaggatggagagaggggagatgacggggagattgggcctcgagggctgcctggagagtcgggacctcgaggtctccttggccccaaaggcccacctggtattcctggaccccct

SEQ ID NO: 4518 - DNA, 1194 bp, Homo sapiens
  source 1..1194: mol_type = unassigned DNA
agccaccgaggagggagcagtgccgggagccccgacggcgccttgctgcatggagctgggccgctgacagctgtcgctgcccgcagcctctgacctccctgggaccccggcgtctgaggctcatagtctgctccctgtcttctgtcagcctcagggcatccagcgtctcaggccgacctgggtccctgggacccggcgtttcggcttctcagccatggagcggtgcagccgctgccatcgcctcctcctcctcctacctctggtgctggggctgagcgcggccccaggctgggcaggtgcaccccctgtggatgtgctccgggccctgaggttcccctccctccctgatggtgtccggagagcgaaaggcatctgtccagctgatgtggcctaccgagtggcacgacctgcccagctcagtgcacccactcgccagcttttcccaggaggatttcccaaagatttctctctgctgactgttgtccggacccgccctggtctccaagctcccctcctgactctctacagtgcccagggtgtccgacagctgggcctggagctgggccgacctgtccgcttcctgtatgaagaccagactgggcggcctcaacctccctctcagccagtcttccgaggcctcagcctagcagatggcaagtggcaccgtgtggctgtggctgtgaagggccagtctgtcaccctcattgttgactgcaagaagcgagtcacccggcctctcccccgaagtgctcgtccagtattggacacccatggagtgatcatctttggtgcccgtattctggatgaagaagtctttgagggtgatgtccaggagctggccattgtcccaggggtccaggcagcctatgaatcatgtgaacagaaggagctggaatgcgaggggggccagagggaaagaccccaaaaccaacagcctcacagagcccagagatctccacagcagcaaccatcaagacttcacaggccacaaaatcaggaaccccagagccaggtgagggagctgggagaacccccaagtgcagcacaccccagagagggaagacacccaggcatctctcctccttagttgtcctccccaccctcatctccctattcccatcaccccctcctcctagtcctcattcatcagcctttttattttcatctaaaaataaaaagagttgttatgaagaa

SEQ ID NO: 4519 - DNA, 6104 bp, Homo sapiens
  source 1..6104: mol_type = unassigned DNA
cacacagaagcggcagccaccgaggagggagcagtgccgggagccccgacggcgccttgctgcatggagctgggccgctgacagctgtcgctgcccgcagcctctgacctccctgggaccccggcgtctgaggctcatagtctgctccctgtcttctgtcagcctcagggcatccagcgtctcaggccgacctgggtccctgggacccggcgtttcggcttctcagccatggagcggtgcagccgctgccatcgcctcctcctcctcctacctctggtgctggggctgagcgcggccccaggctgggcaggtgcaccccctgtggatgtgctccgggccctgaggttcccctccctccctgatggtgtccggagagcgaaaggcatctgtccagctgatgtggcctaccgagtggcacgacctgcccagctcagtgcacccactcgccagcttttcccaggaggatttcccaaagatttctctctgctgactgttgtccggacccgccctggtctccaagctcccctcctgactctctacagtgcccagggtgtccgacagctgggcctggagctgggccgacctgtccgcttcctgtatgaagaccagactgggcggcctcaacctccctctcagccagtcttccgaggcctcagcctagcagatggcaagtggcaccgtgtggctgtggctgtgaagggccagtctgtcaccctcattgttgactgcaagaagcgagtcacccggcctctcccccgaagtgctcgtccagtattggacacccatggagtgatcatctttggtgcccgtattctggatgaagaagtctttgagggtgatgtccaggagctggccattgtcccaggggtccaggcagcctatgaatcatgtgaacagaaggagctggaatgcgaggggggccagagggaaagaccccaaaaccaacagcctcacagagcccagagatctccacagcagcaaccatcaagacttcacaggccacaaaatcaggaaccccagagccaggctgcccatggaccccgagggctgaagggagagaaaggagagcctgcagtgttggaacctggtatgctcgtggaggggccccctggcccagaaggccctgcgggattgattggtccccctggcatccaggggaacccaggcccagttggagaccctggagagaggggcccccctggccgagcagggctccctggatcagatggggctcctggtcctcctggcacatctctcatgctcccattccggtttggcagtggtgggggtgacaagggccctgtggtggcggcccaggaggctcaggcccaggcgatcctgcagcaggcgaggctggcgctccgtggaccccctggccccatgggatacacagggcgccctggacccttgggccaacctgggagccctggcctgaaaggagagtctggagacttaggacctcagggccccagaggacctcagggcctcacaggccctcctggcaaggctgggcgaaggggccgggcaggtgctgatggagcccgagggatgcctggagatcctggagtgaagggtgaccgaggttttgatggactcccagggctccctggagagaagggccataggggtgatactggtgcccagggccttcctggtccccctggtgaggatggagagaggggagatgacggggagattgggcctcgagggctgcctggagagtcgggacctcgaggtctccttggccccaaaggcccacctggtattcctggaccccctggcgtccgaggcatggatggtccccagggccccaaagggagcttgggaccccagggagagccaggacctcctggacaacagggcacccctgggacccagggtcttcccgggccccagggtgccatcggccctcatggagagaagggtcctcaagggaagccagggctccccggcatgcctggctcagacggacccccgggtcacccagggaaggaaggtccccctggaaccaaaggaaaccagggtccctctggacctcagggacctctaggatacccaggacctcgaggggtcaagggtgtggacggaattcggggtctgaagggtcataagggtgagaagggtgaggatggctttcctgggttcaaaggtgacataggcgtgaaaggtgacaggggcgaagttggagtccctggttccaggggagaggatggtcctgaggggccaaagggacgcactggaccgactggagaccctgggcccccagggctcatgggcgagaagggcaagctgggtgttcctggtctgcctggctatcctggacgtcagggacccaaggggtccctaggatttcctggctttcctggtgccagtggagagaagggagcccggggcctgtcggggaagtcagggcctcggggagaacggggccccacgggtccacggggtcagcggggaccccgaggtgccactgggaagtctggagctaagggaacatctggtggtgatggcccccatgggccccctggagagaggggcctccctggacctcagggtcccaacgggtttcctggaccgaaaggacccccgggcccccctgggaaggacgggctgccgggacacccaggccaaagaggagaagtgggtttccaagggaagaccggcccccctggtcctccaggagtggtgggacctcagggagcagcaggagaaaccggccctatgggggagagaggtcacccaggccccccggggccccctggagagcagggactacctgggacagctggaaaagaaggaacaaagggtgaccctggtccccctggggccccagggaaggatggtcctgctggtctgaggggattcccaggagagagaggcctcccaggcactgctggtggacctggtttgaaggggaatgaaggtccgtctggcccccctggccctgcaggctcccctggggaacgaggtgcagcaggatcagggggacccattggtccgccagggcgcccaggcccgcagggtccccctggagcagcaggagagaaaggtgtcccaggtgagaagggccccattggcccaactggccgagatggagtgcagggtcctgtggggcttcctggtcctgctgggcctccaggtgtggctggagaggatggagacaagggtgaggtgggggaccccggacagaagggcaccaaagggaacaagggtgaacatggccctcctggaccccctggacccattggtcctgtggggcagcctggagcagcgggagcagatggggagcccggagctcggggaccccagggacactttggagccaaaggtgatgaaggaacaagaggattcaatgggcccccaggacccattggcctacagggtttgccaggcccctctggggagaagggagaaacaggagatgtgggtcctatgggaccacctggccccccaggacctcgaggtccagctggacccaatggcgctgatggcccacaaggtcccccaggaggtgttgggaacctgggtccccctggagagaagggggaaccaggagagtcaggatctccagggatccagggcgagccaggtgtcaagggtccacgcggggaacgtggagagaaaggagagtcggggcagccaggagagccagggccaccagggcctaaaggccccacaggcgatgatggccccaaagggaaccctggtcctgttggttttcctggtgaccctggcccccctggagaaggtggccctcggggccaggatggtgctaagggtgaccgaggcgaggatggtgagccaggacagcctggatcccctggtcccaccggggagaatggacccccagggccacttggaaagcgaggtcctgctggctcgcctggttccgaggggcgacaaggagggaagggagccaagggagatcctggcgctataggtgccccggggaagacaggcccggtgggtcctgcaggcccagcagggaaacctggccctgatggtctgagggggctcccaggctcagtgggtcagcaaggccgacctggagctacaggccaggctgggcccccaggtcctgtgggacccccagggctgcctggtctccggggcgatgctggagccaagggagagaagggccacccaggtctcattggactgattgggcccccgggtgagcagggagagaagggagatcggggacttcctgggcctcagggctcccctgggcagaagggtgagatgggtatcccaggagcatccggccccattggtcctggaggtccccccggcctccccggacctgctggccccaaaggagccaaaggagccacaggcccaggcggacccaagggagagaagggtgtgcagggccctccaggacacccgggtcccccaggcgaggtgatccagccactgcccattcagatgcccaagaagactcggcgctcggtggatggaagccgtctgatgcaggaagatgaggccataccgaccgggggagcccccggcagtcctggggggctggaggagatctttggctcactcgactccctgcgggaggagatcgagcagatgaggcggccaacagggacccaggacagccctgctcgcacctgccaggacctgaagctgtgccacccagagcttcccgatggagagtactgggtcgaccccaaccagggctgtgctcgggatgccttccgagttttctgcaacttcacagcagggggtgagacctgtgtgacgcctagggatgacgtcacgcagttctcttacgtggactcagagggctccccagtgggtgtggtccagctcaccttcctgcggctgctcagcgtctcagcccaccaggacgtctcctacccctgctctggagcagcccgtgacggtcccctgagactccgtggggccaatgaggatgagctgagcccggagactagcccctatgtcaaagaattcagagatggctgccagacacagcaaggccggacggtgctggaggtgcgaacgcctgtgctggagcagctgccagtgctggatgcctccttctcagacctgggagccccaccgaggcggggaggggtgctgctggggcctgtctgcttcatgggataggaccgtctctgtctgatcctgtccattcggaaccaggcccacctggaatcccacaacatcagctctgtgccacctcccaagagggctcctcactatctagggagccctgggccagggcgtggagagccctcagtcggggcaggccaggggaggggtgaagtggttgcctggacaccccacgggaggagtggcatctggggctcttggccctcccacctggagcctgttacccgttagagagctgagacccttatttaaaactcacctcccaatcaccccaaacaaatggaagagaagagaaaggacatggcgtattttgtatttaaaagtaattgtattaattatttaaagtgtggaaagcaaaataacaaaaaagagaaacgccaacaaaaatcagcagatgttgaagacaggggtctcgggggtgggctccggcacccacatcctggagtcaggactttcctcagtgactgtgtgtaggggggtttcagggctgaaccccacctccctcccaccttcctcccacctcacctgtcgcacccactgtgaaagttggaatatgtggtctccctggcctcagggctctgactctgccagggtggggctctctaacccacaggtgttggctgcctggcccatgtgcccactgtctcttccacttggtctgggtttggcaggcactgcctgctacttgagggccaggatgctcccccagggaagaaacggaatagtgtggggtgtgtgcagggctgcatcccgcagatggctggaatattaaaattcttctatattggctggtaaattgccatggccctgagccactgagtatgttcattgccacccctgtccctcccctgggcacccctcactttccctgatcctgcaattaaagggttaatgtgtggcatatggaagggactcccaggaccctgtgcccagcttccatgctgactgatggttaaataatgtgattgtctcctcccagg

SEQ ID NO: 4520 - DNA, 6425 bp, Homo sapiens
  source 1..6425: mol_type = unassigned DNA
cacacagaagcggcagccaccgaggagggagcagtgccgggagccccgacggcgccttgctgcatggagctgggccgctgacagctgtcgctgcccgcagcctctgacctccctgggaccccggcgtctgaggctcatagtctgctccctgtcttctgtcagcctcagggcatccagcgtctcaggccgacctgggtccctgggacccggcgtttcggcttctcagccatggagcggtgcagccgctgccatcgcctcctcctcctcctacctctggtgctggggctgagcgcggccccaggctgggcaggtgcaccccctgtggatgtgctccgggccctgaggttcccctccctccctgatggtgtccggagagcgaaaggcatctgtccagctgatgtggcctaccgagtggcacgacctgcccagctcagtgcacccactcgccagcttttcccaggaggatttcccaaagatttctctctgctgactgttgtccggacccgccctggtctccaagctcccctcctgactctctacagtgcccagggtgtccgacagctgggcctggagctgggccgacctgtccgcttcctgtatgaagaccagactgggcggcctcaacctccctctcagccagtcttccgaggcctcagcctagcagatggcaagtggcaccgtgtggctgtggctgtgaagggccagtctgtcaccctcattgttgactgcaagaagcgagtcacccggcctctcccccgaagtgctcgtccagtattggacacccatggagtgatcatctttggtgcccgtattctggatgaagaagtctttgagggtgatgtccaggagctggccattgtcccaggggtccaggcagcctatgaatcatgtgaacagaaggagctggaatgcgaggggggccagagggaaagaccccaaaaccaacagcctcacagagcccagagatctccacagcagcaaccatcaagacttcacaggccacaaaatcaggaaccccagagccagcccactgagtctctctactatgactacaagcccccctattatgatgtgatgactacggggacaacccctgattatcaggaccccaccccaggtgaagaggaagaaatcctggagtcgagcctcttgccaccccttgaggaggagcagacagatctccaggtcccccccacagccgacaggttccaggcagaggaatatggggagggtggcacagacccccctgaagggccctacgattacacctatggctatggggatgattatcgtgaggagacagagcttggccctgccctctctgcggagacagcccactcaggagccgctgcccatggaccccgagggctgaagggagagaaaggagagcctgcagtgttggaacctggtatgctcgtggaggggccccctggcccagaaggccctgcgggattgattggtccccctggcatccaggggaacccaggcccagttggagaccctggagagaggggcccccctggccgagcagggctccctggatcagatggggctcctggtcctcctggcacatctctcatgctcccattccggtttggcagtggtgggggtgacaagggccctgtggtggcggcccaggaggctcaggcccaggcgatcctgcagcaggcgaggctggcgctccgtggaccccctggccccatgggatacacagggcgccctggacccttgggccaacctgggagccctggcctgaaaggagagtctggagacttaggacctcagggccccagaggacctcagggcctcacaggccctcctggcaaggctgggcgaaggggccgggcaggtgctgatggagcccgagggatgcctggagatcctggagtgaagggtgaccgaggttttgatggactcccagggctccctggagagaagggccataggggtgatactggtgcccagggccttcctggtccccctggtgaggatggagagaggggagatgacggggagattgggcctcgagggctgcctggagagtcgggacctcgaggtctccttggccccaaaggcccacctggtattcctggaccccctggcgtccgaggcatggatggtccccagggccccaaagggagcttgggaccccagggagagccaggacctcctggacaacagggcacccctgggacccagggtcttcccgggccccagggtgccatcggccctcatggagagaagggtcctcaagggaagccagggctccccggcatgcctggctcagacggacccccgggtcacccagggaaggaaggtccccctggaaccaaaggaaaccagggtccctctggacctcagggacctctaggatacccaggacctcgaggggtcaagggtgtggacggaattcggggtctgaagggtcataagggtgagaagggtgaggatggctttcctgggttcaaaggtgacataggcgtgaaaggtgacaggggcgaagttggagtccctggttccaggggagaggatggtcctgaggggccaaagggacgcactggaccgactggagaccctgggcccccagggctcatgggcgagaagggcaagctgggtgttcctggtctgcctggctatcctggacgtcagggacccaaggggtccctaggatttcctggctttcctggtgccagtggagagaagggagcccggggcctgtcggggaagtcagggcctcggggagaacggggccccacgggtccacggggtcagcggggaccccgaggtgccactgggaagtctggagctaagggaacatctggtggtgatggcccccatgggccccctggagagaggggcctccctggacctcagggtcccaacgggtttcctggaccgaaaggacccccgggcccccctgggaaggacgggctgccgggacacccaggccaaagaggagaagtgggtttccaagggaagaccggcccccctggtcctccaggagtggtgggacctcagggagcagcaggagaaaccggccctatgggggagagaggtcacccaggccccccggggccccctggagagcagggactacctgggacagctggaaaagaaggaacaaagggtgaccctggtccccctggggccccagggaaggatggtcctgctggtctgaggggattcccaggagagagaggcctcccaggcactgctggtggacctggtttgaaggggaatgaaggtccgtctggcccccctggccctgcaggctcccctggggaacgaggtgcagcaggatcagggggacccattggtccgccagggcgcccaggcccgcagggtccccctggagcagcaggagagaaaggtgtcccaggtgagaagggccccattggcccaactggccgagatggagtgcagggtcctgtggggcttcctggtcctgctgggcctccaggtgtggctggagaggatggagacaagggtgaggtgggggaccccggacagaagggcaccaaagggaacaagggtgaacatggccctcctggaccccctggacccattggtcctgtggggcagcctggagcagcgggagcagatggggagcccggagctcggggaccccagggacactttggagccaaaggtgatgaaggaacaagaggattcaatgggcccccaggacccattggcctacagggtttgccaggcccctctggggagaagggagaaacaggagatgtgggtcctatgggaccacctggccccccaggacctcgaggtccagctggacccaatggcgctgatggcccacaaggtcccccaggaggtgttgggaacctgggtccccctggagagaagggggaaccaggagagtcaggatctccagggatccagggcgagccaggtgtcaagggtccacgcggggaacgtggagagaaaggagagtcggggcagccaggagagccagggccaccagggcctaaaggccccacaggcgatgatggccccaaagggaaccctggtcctgttggttttcctggtgaccctggcccccctggagaaggtggccctcggggccaggatggtgctaagggtgaccgaggcgaggatggtgagccaggacagcctggatcccctggtcccaccggggagaatggacccccagggccacttggaaagcgaggtcctgctggctcgcctggttccgaggggcgacaaggagggaagggagccaagggagatcctggcgctataggtgccccggggaagacaggcccggtgggtcctgcaggcccagcagggaaacctggccctgatggtctgagggggctcccaggctcagtgggtcagcaaggccgacctggagctacaggccaggctgggcccccaggtcctgtgggacccccagggctgcctggtctccggggcgatgctggagccaagggagagaagggccacccaggtctcattggactgattgggcccccgggtgagcagggagagaagggagatcggggacttcctgggcctcagggctcccctgggcagaagggtgagatgggtatcccaggagcatccggccccattggtcctggaggtccccccggcctccccggacctgctggccccaaaggagccaaaggagccacaggcccaggcggacccaagggagagaagggtgtgcagggccctccaggacacccgggtcccccaggcgaggtgatccagccactgcccattcagatgcccaagaagactcggcgctcggtggatggaagccgtctgatgcaggaagatgaggccataccgaccgggggagcccccggcagtcctggggggctggaggagatctttggctcactcgactccctgcgggaggagatcgagcagatgaggcggccaacagggacccaggacagccctgctcgcacctgccaggacctgaagctgtgccacccagagcttcccgatggagagtactgggtcgaccccaaccagggctgtgctcgggatgccttccgagttttctgcaacttcacagcagggggtgagacctgtgtgacgcctagggatgacgtcacgcagttctcttacgtggactcagagggctccccagtgggtgtggtccagctcaccttcctgcggctgctcagcgtctcagcccaccaggacgtctcctacccctgctctggagcagcccgtgacggtcccctgagactccgtggggccaatgaggatgagctgagcccggagactagcccctatgtcaaagaattcagagatggctgccagacacagcaaggccggacggtgctggaggtgcgaacgcctgtgctggagcagctgccagtgctggatgcctccttctcagacctgggagccccaccgaggcggggaggggtgctgctggggcctgtctgcttcatgggataggaccgtctctgtctgatcctgtccattcggaaccaggcccacctggaatcccacaacatcagctctgtgccacctcccaagagggctcctcactatctagggagccctgggccagggcgtggagagccctcagtcggggcaggccaggggaggggtgaagtggttgcctggacaccccacgggaggagtggcatctggggctcttggccctcccacctggagcctgttacccgttagagagctgagacccttatttaaaactcacctcccaatcaccccaaacaaatggaagagaagagaaaggacatggcgtattttgtatttaaaagtaattgtattaattatttaaagtgtggaaagcaaaataacaaaaaagagaaacgccaacaaaaatcagcagatgttgaagacaggggtctcgggggtgggctccggcacccacatcctggagtcaggactttcctcagtgactgtgtgtaggggggtttcagggctgaaccccacctccctcccaccttcctcccacctcacctgtcgcacccactgtgaaagttggaatatgtggtctccctggcctcagggctctgactctgccagggtggggctctctaacccacaggtgttggctgcctggcccatgtgcccactgtctcttccacttggtctgggtttggcaggcactgcctgctacttgagggccaggatgctcccccagggaagaaacggaatagtgtggggtgtgtgcagggctgcatcccgcagatggctggaatattaaaattcttctatattggctggtaaattgccatggccctgagccactgagtatgttcattgccacccctgtccctcccctgggcacccctcactttccctgatcctgcaattaaagggttaatgtgtggcatatggaagggactcccaggaccctgtgcccagcttccatgctgactgatggttaaataatgtgattgtctcctcccagg

SEQ ID NO: 4521 - DNA, 6209 bp, Homo sapiens
  source 1..6209: mol_type = unassigned DNA
tgggggctctgggcgccagggtggccggggacacacagaagcggcagccaccgaggagggagcagtgccgggagccccgacggcgccttgctgcatggagctgggccgctgacagctgtcgctgcccgcagcctctgacctccctgggaccccggcgtctgaggctcatagtctgctccctgtcttctgtcagcctcagggcatccagcgtctcaggccgacctgggtccctgggacccggcgtttcggcttctcagccatggagcggtgcagccgctgccatcgcctcctcctcctcctacctctggtgctggggctgagcgcggccccaggctgggcaggtgcaccccctgtggatgtgctccgggccctgaggttcccctccctccctgatggtgtccggagagcgaaaggcatctgtccagctgatgtggcctaccgagtggcacgacctgcccagctcagtgcacccactcgccagcttttcccaggaggatttcccaaagatttctctctgctgactgttgtccggacccgccctggtctccaagctcccctcctgactctctacagtgcccagggtgtccgacagctgggcctggagctgggccgacctgtccgcttcctgtatgaagaccagactgggcggcctcaacctccctctcagccagtcttccgaggcctcagcctagcagatggcaagtggcaccgtgtggctgtggctgtgaagggccagtctgtcaccctcattgttgactgcaagaagcgagtcacccggcctctcccccgaagtgctcgtccagtattggacacccatggagtgatcatctttggtgcccgtattctggatgaagaagtctttgagggtgatgtccaggagctggccattgtcccaggggtccaggcagcctatgaatcatgtgaacagaaggagctggaatgcgaggggggccagagggaaagaccccaaaaccaacagcctcacagagcccagagatctccacagcagcaaccatcaagacttcacaggccacaaaatcaggaaccccagagccaggaccccaccccaggtgaagaggaagaaatcctggagtcgagcctcttgccaccccttgaggaggctgcccatggaccccgagggctgaagggagagaaaggagagcctgcagtgttggaacctggtatgctcgtggaggggccccctggcccagaaggccctgcgggattgattggtccccctggcatccaggggaacccaggcccagttggagaccctggagagaggggcccccctggccgagcagggctccctggatcagatggggctcctggtcctcctggcacatctctcatgctcccattccggtttggcagtggtgggggtgacaagggccctgtggtggcggcccaggaggctcaggcccaggcgatcctgcagcaggcgaggctggcgctccgtggaccccctggccccatgggatacacagggcgccctggacccttgggccaacctgggagccctggcctgaaaggagagtctggagacttaggacctcagggccccagaggacctcagggcctcacaggccctcctggcaaggctgggcgaaggggccgggcaggtgctgatggagcccgagggatgcctggagatcctggagtgaagggtgaccgaggttttgatggactcccagggctccctggagagaagggccataggggtgatactggtgcccagggccttcctggtccccctggtgaggatggagagaggggagatgacggggagattgggcctcgagggctgcctggagagtcgggacctcgaggtctccttggccccaaaggcccacctggtattcctggaccccctggcgtccgaggcatggatggtccccagggccccaaagggagcttgggaccccagggagagccaggacctcctggacaacagggcacccctgggacccagggtcttcccgggccccagggtgccatcggccctcatggagagaagggtcctcaagggaagccagggctccccggcatgcctggctcagacggacccccgggtcacccagggaaggaaggtccccctggaaccaaaggaaaccagggtccctctggacctcagggacctctaggatacccaggacctcgaggggtcaagggtgtggacggaattcggggtctgaagggtcataagggtgagaagggtgaggatggctttcctgggttcaaaggtgacataggcgtgaaaggtgacaggggcgaagttggagtccctggttccaggggagaggatggtcctgaggggccaaagggacgcactggaccgactggagaccctgggcccccagggctcatgggcgagaagggcaagctgggtgttcctggtctgcctggctatcctggacgtcagggacccaaggggtccctaggatttcctggctttcctggtgccagtggagagaagggagcccggggcctgtcggggaagtcagggcctcggggagaacggggccccacgggtccacggggtcagcggggaccccgaggtgccactgggaagtctggagctaagggaacatctggtggtgatggcccccatgggccccctggagagaggggcctccctggacctcagggtcccaacgggtttcctggaccgaaaggacccccgggcccccctgggaaggacgggctgccgggacacccaggccaaagaggagaagtgggtttccaagggaagaccggcccccctggtcctccaggagtggtgggacctcagggagcagcaggagaaaccggccctatgggggagagaggtcacccaggccccccggggccccctggagagcagggactacctgggacagctggaaaagaaggaacaaagggtgaccctggtccccctggggccccagggaaggatggtcctgctggtctgaggggattcccaggagagagaggcctcccaggcactgctggtggacctggtttgaaggggaatgaaggtccgtctggcccccctggccctgcaggctcccctggggaacgaggtgcagcaggatcagggggacccattggtccgccagggcgcccaggcccgcagggtccccctggagcagcaggagagaaaggtgtcccaggtgagaagggccccattggcccaactggccgagatggagtgcagggtcctgtggggcttcctggtcctgctgggcctccaggtgtggctggagaggatggagacaagggtgaggtgggggaccccggacagaagggcaccaaagggaacaagggtgaacatggccctcctggaccccctggacccattggtcctgtggggcagcctggagcagcgggagcagatggggagcctggagctcggggaccccagggacactttggagccaaaggtgatgaaggaacaagaggattcaatgggcccccaggacccattggcctacagggtttgccaggcccctctggggagaagggagaaacaggagatgtgggtcctatgggaccacctggccccccaggacctcgaggtccagctggacccaatggcgctgatggcccacaaggtcccccaggaggtgttgggaacctgggtccccctggagagaagggggaaccaggagagtcaggatctccagggatccagggcgagccaggtgtcaagggtccacgcggggaacgtggagagaaaggagagtcggggcagccaggagagccagggccaccagggcctaaaggccccacaggcgatgatggccccaaagggaaccctggtcctgttggttttcctggtgaccctggcccccctggagaaggtggccctcggggccaggatggtgctaagggtgaccgaggcgaggatggtgagccaggacagcctggatcccctggtcccaccggggagaatggacccccagggccacttggaaagcgaggtcctgctggctcgcctggttccgaggggcgacaaggagggaagggagccaagggagatcctggcgctataggtgccccggggaagacaggcccggtgggtcctgcaggcccagcagggaaacctggccctgatggtctgagggggctcccaggctcagtgggtcagcaaggccgacctggagctacaggccaggctgggcccccaggtcctgtgggacccccagggctgcctggtctccggggcgatgctggagccaagggagagaagggccacccaggtctcattggactgattgggcccccgggtgagcagggagagaagggagatcggggacttcctgggcctcagggctcccctgggcagaagggtgagatgggtatcccaggagcatccggccccattggtcctggaggtccccccggcctccccggacctgctggccccaaaggagccaaaggagccacaggcccaggcggacccaagggagagaagggtgtgcagggccctccaggacacccgggtcccccaggcgaggtgatccagccactgcccattcagatgcccaagaagactcggcgctcggtggatggaagccgtctgatgcaggaagatgaggccataccgaccgggggagcccccggcagtcctggggggctggaggagatctttggctcactcgactccctgcgggaggagatcgagcagatgaggcggccaacagggacccaggacagccctgctcgcacctgccaggacctgaagctgtgccacccagagcttcccgatggagagtactgggtcgaccccaaccagggctgtgctcgggatgccttccgagttttctgcaacttcacagcagggggtgagacctgtgtgacgcctagggatgacgtcacgcagttctcttacgtggactcagagggctccccagtgggtgtggtccagctcaccttcctgcggctgctcagcgtctcagcccaccaggacgtctcctacccctgctctggagcagcccgtgacggtcccctgagactccgtggggccaatgaggatgagctgagcccggagactagcccctatgtcaaagaattcagagatggctgccagacacagcaaggccggacggtgctggaggtgcgaacgcctgtgctggagcagctgccagtgctggatgcctccttctcagacctgggagccccaccgaggcggggaggggtgctgctggggcctgtctgcttcatgggataggaccgtctctgtctgatcctgtccattcggaaccaggcccacctggaatcccacaacatcagctctgtgccacctcccaagagggctcctcactatctagggagccctgggccagggcgtggagagccctcagtcggggcaggccaggggaggggtgaagtggttgcctggacaccccacgggaggagtggcatctggggctcttggccctcccacctggagcctgttacccgttagagagctgagacccttatttaaaactcacctcccaatcaccccaaacaaatggaagagaagagaaaggacatggcgtattttgtatttaaaagtaattgtattaattatttaaagtgtggaaagcaaaataacaaaaaagagaaacgccaacaaaaatcagcagatgttgaagacaggggtctcgggggtgggctccggcacccacatcctggagtcaggactttcctcagtgactgtgtgtaggggggtttcagggctgaaccccacctccctcccaccttcctcccacctcacctgtcgcacccactgtgaaagttggaatatgtggtctccctggcctcagggctctgactctgccagggtggggctctctaacccacaggtgttggctgcctggcccatgtgcccactgtctcttccacttggtctgggtttggcaggcactgcctgctacttgagggccaggatgctcccccagggaagaaacggaatagtgtggggtgtgtgcagggctgcatcccgcagatggctggaatattaaaattcttctatattggctggtaaattgccatggccctgagccactgagtatgttcattgccacccctgtccctcccctgggcacccctcactttccctgatcctgcaattaaagggttaatgtgtggcatatggaagggactcccaggaccctgtgcccagcttccatgctgactgatggttaaataatgtgattgtctcctcccaggtgtctgtgtca

SEQ ID NO: 4522 - DNA, 2099 bp, Homo sapiens; identical to SEQ ID NO: 4517
  source 1..2099: mol_type = unassigned DNA

SEQ ID NO: 4523 - DNA, 1194 bp, Homo sapiens; identical to SEQ ID NO: 4518
  source 1..1194: mol_type = unassigned DNA

SEQ ID NO: 4524 - DNA, 1984 bp, Homo sapiens; identical to SEQ ID NO: 4510
  source 1..1984: mol_type = unassigned DNA

SEQ ID NO: 4525 - DNA, 6425 bp, Homo sapiens
  source 1..6425: mol_type = unassigned DNA
cacacagaagcggcagccaccgaggagggagcagtgccgggagccccgacggcgccttgctgcatggagctgggccgctgacagctgtcgctgcccgcagcctctgacctccctgggaccccggcgtctgaggctcatagtctgctccctgtcttctgtcagcctcagggcatccagcgtctcaggccgacctgggtccctgggacccggcgtttcggcttctcagccatggagcggtgcagccgctgccatcgcctcctcctcctcctacctctggtgctggggctgagcgcggccccaggctgggcaggtgcaccccctgtggatgtgctccgggccctgaggttcccctccctccctgatggtgtccggagagcgaaaggcatctgtccagctgatgtggcctaccgagtggcacgacctgcccagctcagtgcacccactcgccagcttttcccaggaggatttcccaaagatttctctctgctgactgttgtccggacccgccctggtctccaagctcccctcctgactctctacagtgcccagggtgtccgacagctgggcctggagctgggccgacctgtccgcttcctgtatgaagaccagactgggcggcctcaacctccctctcagccagtcttccgaggcctcagcctagcagatggcaagtggcaccgtgtggctgtggctgtgaagggccagtctgtcaccctcattgttgactgcaagaagcgagtcacccggcctctcccccgaagtgctcgtccagtattggacacccatggagtgatcatctttggtgcccgtattctggatgaagaagtctttgagggtgatgtccaggagctggccattgtcccaggggtccaggcagcctatgaatcatgtgaacagaaggagctggaatgcgaggggggccagagggaaagaccccaaaaccaacagcctcacagagcccagagatctccacagcagcaaccatcaagacttcacaggccacaaaatcaggaaccccagagccagcccactgagtctctctactatgactacaagcccccctattatgatgtgatgactacggggacaacccctgattatcaggaccccaccccaggtgaagaggaagaaatcctggagtcgagcctcttgccaccccttgaggaggagcagacagatctccaggtcccccccacagccgacaggttccaggcagaggaatatggggagggtggcacagacccccctgaagggccctacgattacacctatggctatggggatgattatcgtgaggagacagagcttggccctgccctctctgcggagacagcccactcaggagccgctgcccatggaccccgagggctgaagggagagaaaggagagcctgcagtgttggaacctggtatgctcgtggaggggccccctggcccagaaggccctgcgggattgattggtccccctggcatccaggggaacccaggcccagttggagaccctggagagaggggcccccctggccgagcagggctccctggatcagatggggctcctggtcctcctggcacatctctcatgctcccattccggtttggcagtggtgggggtgacaagggccctgtggtggcggcccaggaggctcaggcccaggcgatcctgcagcaggcgaggctggcgctccgtggaccccctggccccatgggatacacagggcgccctggacccttgggccaacctgggagccctggcctgaaaggagagtctggagacttaggacctcagggccccagaggacctcagggcctcacaggccctcctggcaaggctgggcgaaggggccgggcaggtgctgatggagcccgagggatgcctggagatcctggagtgaagggtgaccgaggttttgatggactcccagggctccctggagagaagggccataggggtgatactggtgcccagggccttcctggtccccctggtgaggatggagagaggggagatgacggggagattgggcctcgagggctgcctggagagtcgggacctcgaggtctccttggccccaaaggcccacctggtattcctggaccccctggcgtccgaggcatggatggtccccagggccccaaagggagcttgggaccccagggagagccaggacctcctggacaacagggcacccctgggacccagggtcttcccgggccccagggtgccatcggccctcatggagagaagggtcctcaagggaagccagggctccccggcatgcctggctcagacggacccccgggtcacccagggaaggaaggtccccctggaaccaaaggaaaccagggtccctctggacctcagggacctctaggatacccaggacctcgaggggtcaagggtgtggacggaattcggggtctgaagggtcataagggtgagaagggtgaggatggctttcctgggttcaaaggtgacataggcgtgaaaggtgacaggggcgaagttggagtccctggttccaggggagaggatggtcctgaggggccaaagggacgcactggaccgactggagaccctgggcccccagggctcatgggcgagaagggcaagctgggtgttcctggtctgcctggctatcctggacgtcagggacccaaggggtccctaggatttcctggctttcctggtgccagtggagagaagggagcccggggcctgtcggggaagtcagggcctcggggagaacggggccccacgggtccacggggtcagcggggaccccgaggtgccactgggaagtctggagctaagggaacatctggtggtgatggcccccatgggccccctggagagaggggcctccctggacctcagggtcccaacgggtttcctggaccgaaaggacccccgggcccccctgggaaggacgggctgccgggacacccaggccaaagaggagaagtgggtttccaagggaagaccggcccccctggtcctccaggagtggtgggacctcagggagcagcaggagaaaccggccctatgggggagagaggtcacccaggccccccggggccccctggagagcagggactacctgggacagctggaaaagaaggaacaaagggtgaccctggtccccctggggccccagggaaggatggtcctgctggtctgaggggattcccaggagagagaggcctcccaggcactgctggtggacctggtttgaaggggaatgaaggtccgtctggcccccctggccctgcaggctcccctggggaacgaggtgcagcaggatcagggggacccattggtccgccagggcgcccaggcccgcagggtccccctggagcagcaggagagaaaggtgtcccaggtgagaagggccccattggcccaactggccgagatggagtgcagggtcctgtggggcttcctggtcctgctgggcctccaggtgtggctggagaggatggagacaagggtgaggtgggggaccccggacagaagggcaccaaagggaacaagggtgaacatggccctcctggaccccctggacccattggtcctgtggggcagcctggagcagcgggagcagatggggagcctggagctcggggaccccagggacactttggagccaaaggtgatgaaggaacaagaggattcaatgggcccccaggacccattggcctacagggtttgccaggcccctctggggagaagggagaaacaggagatgtgggtcctatgggaccacctggccccccaggacctcgaggtccagctggacccaatggcgctgatggcccacaaggtcccccaggaggtgttgggaacctgggtccccctggagagaagggggaaccaggagagtcaggatctccagggatccagggcgagccaggtgtcaagggtccacgcggggaacgtggagagaaaggagagtcggggcagccaggagagccagggccaccagggcctaaaggccccacaggcgatgatggccccaaagggaaccctggtcctgttggttttcctggtgaccctggcccccctggagaaggtggccctcggggccaggatggtgctaagggtgaccgaggcgaggatggtgagccaggacagcctggatcccctggtcccaccggggagaatggacccccagggccacttggaaagcgaggtcctgctggctcgcctggttccgaggggcgacaaggagggaagggagccaagggagatcctggcgctataggtgccccggggaagacaggcccggtgggtcctgcaggcccagcagggaaacctggccctgatggtctgagggggctcccaggctcagtgggtcagcaaggccgacctggagctacaggccaggctgggcccccaggtcctgtgggacccccagggctgcctggtctccggggcgatgctggagccaagggagagaagggccacccaggtctcattggactgattgggcccccgggtgagcagggagagaagggagatcggggacttcctgggcctcagggctcccctgggcagaagggtgagatgggtatcccaggagcatccggccccattggtcctggaggtccccccggcctccccggacctgctggccccaaaggagccaaaggagccacaggcccaggcggacccaagggagagaagggtgtgcagggccctccaggacacccgggtcccccaggcgaggtgatccagccactgcccattcagatgcccaagaagactcggcgctcggtggatggaagccgtctgatgcaggaagatgaggccataccgaccgggggagcccccggcagtcctggggggctggaggagatctttggctcactcgactccctgcgggaggagatcgagcagatgaggcggccaacagggacccaggacagccctgctcgcacctgccaggacctgaagctgtgccacccagagcttcccgatggagagtactgggtcgaccccaaccagggctgtgctcgggatgccttccgagttttctgcaacttcacagcagggggtgagacctgtgtgacgcctagggatgacgtcacgcagttctcttacgtggactcagagggctccccagtgggtgtggtccagctcaccttcctgcggctgctcagcgtctcagcccaccaggacgtctcctacccctgctctggagcagcccgtgacggtcccctgagactccgtggggccaatgaggatgagctgagcccggagactagcccctatgtcaaagaattcagagatggctgccagacacagcaaggccggacggtgctggaggtgcgaacgcctgtgctggagcagctgccagtgctggatgcctccttctcagacctgggagccccaccgaggcggggaggggtgctgctggggcctgtctgcttcatgggataggaccgtctctgtctgatcctgtccattcggaaccaggcccacctggaatcccacaacatcagctctgtgccacctcccaagagggctcctcactatctagggagccctgggccagggcgtggagagccctcagtcggggcaggccaggggaggggtgaagtggttgcctggacaccccacgggaggagtggcatctggggctcttggccctcccacctggagcctgttacccgttagagagctgagacccttatttaaaactcacctcccaatcaccccaaacaaatggaagagaagagaaaggacatggcgtattttgtatttaaaagtaattgtattaattatttaaagtgtggaaagcaaaataacaaaaaagagaaacgccaacaaaaatcagcagatgttgaagacaggggtctcgggggtgggctccggcacccacatcctggagtcaggactttcctcagtgactgtgtgtaggggggtttcagggctgaaccccacctccctcccaccttcctcccacctcacctgtcgcacccactgtgaaagttggaatatgtggtctccctggcctcagggctctgactctgccagggtggggctctctaacccacaggtgttggctgcctggcccatgtgcccactgtctcttccacttggtctgggtttggcaggcactgcctgctacttgagggccaggatgctcccccagggaagaaacggaatagtgtggggtgtgtgcagggctgcatcccgcagatggctggaatattaaaattcttctatattggctggtaaattgccatggccctgagccactgagtatgttcattgccacccctgtccctcccctgggcacccctcactttccctgatcctgcaattaaagggttaatgtgtggcatatggaagggactcccaggaccctgtgcccagcttccatgctgactgatggttaaataatgtgattgtctcctcccagg

SEQ ID NO: 4526 - DNA, 6104 bp, Homo sapiens
  source 1..6104: mol_type = unassigned DNA
cacacagaagcggcagccaccgaggagggagcagtgccgggagccccgacggcgccttgctgcatggagctgggccgctgacagctgtcgctgcccgcagcctctgacctccctgggaccccggcgtctgaggctcatagtctgctccctgtcttctgtcagcctcagggcatccagcgtctcaggccgacctgggtccctgggacccggcgtttcggcttctcagccatggagcggtgcagccgctgccatcgcctcctcctcctcctacctctggtgctggggctgagcgcggccccaggctgggcaggtgcaccccctgtggatgtgctccgggccctgaggttcccctccctccctgatggtgtccggagagcgaaaggcatctgtccagctgatgtggcctaccgagtggcacgacctgcccagctcagtgcacccactcgccagcttttcccaggaggatttcccaaagatttctctctgctgactgttgtccggacccgccctggtctccaagctcccctcctgactctctacagtgcccagggtgtccgacagctgggcctggagctgggccgacctgtccgcttcctgtatgaagaccagactgggcggcctcaacctccctctcagccagtcttccgaggcctcagcctagcagatggcaagtggcaccgtgtggctgtggctgtgaagggccagtctgtcaccctcattgttgactgcaagaagcgagtcacccggcctctcccccgaagtgctcgtccagtattggacacccatggagtgatcatctttggtgcccgtattctggatgaagaagtctttgagggtgatgtccaggagctggccattgtcccaggggtccaggcagcctatgaatcatgtgaacagaaggagctggaatgcgaggggggccagagggaaagaccccaaaaccaacagcctcacagagcccagagatctccacagcagcaaccatcaagacttcacaggccacaaaatcaggaaccccagagccaggctgcccatggaccccgagggctgaagggagagaaaggagagcctgcagtgttggaacctggtatgctcgtggaggggccccctggcccagaaggccctgcgggattgattggtccccctggcatccaggggaacccaggcccagttggagaccctggagagaggggcccccctggccgagcagggctccctggatcagatggggctcctggtcctcctggcacatctctcatgctcccattccggtttggcagtggtgggggtgacaagggccctgtggtggcggcccaggaggctcaggcccaggcgatcctgcagcaggcgaggctggcgctccgtggaccccctggccccatgggatacacagggcgccctggacccttgggccaacctgggagccctggcctgaaaggagagtctggagacttaggacctcagggccccagaggacctcagggcctcacaggccctcctggcaaggctgggcgaaggggccgggcaggtgctgatggagcccgagggatgcctggagatcctggagtgaagggtgaccgaggttttgatggactcccagggctccctggagagaagggccataggggtgatactggtgcccagggccttcctggtccccctggtgaggatggagagaggggagatgacggggagattgggcctcgagggctgcctggagagtcgggacctcgaggtctccttggccccaaaggcccacctggtattcctggaccccctggcgtccgaggcatggatggtccccagggccccaaagggagcttgggaccccagggagagccaggacctcctggacaacagggcacccctgggacccagggtcttcccgggccccagggtgccatcggccctcatggagagaagggtcctcaagggaagccagggctccccggcatgcctggctcagacggacccccgggtcacccagggaaggaaggtccccctggaaccaaaggaaaccagggtccctctggacctcagggacctctaggatacccaggacctcgaggggtcaagggtgtggacggaattcggggtctgaagggtcataagggtgagaagggtgaggatggctttcctgggttcaaaggtgacataggcgtgaaaggtgacaggggcgaagttggagtccctggttccaggggagaggatggtcctgaggggccaaagggacgcactggaccgactggagaccctgggcccccagggctcatgggcgagaagggcaagctgggtgttcctggtctgcctggctatcctggacgtcagggacccaaggggtccctaggatttcctggctttcctggtgccagtggagagaagggagcccggggcctgtcggggaagtcagggcctcggggagaacggggccccacgggtccacggggtcagcggggaccccgaggtgccactgggaagtctggagctaagggaacatctggtggtgatggcccccatgggccccctggagagaggggcctccctggacctcagggtcccaacgggtttcctggaccgaaaggacccccgggcccccctgggaaggacgggctgccgggacacccaggccaaagaggagaagtgggtttccaagggaagaccggcccccctggtcctccaggagtggtgggacctcagggagcagcaggagaaaccggccctatgggggagagaggtcacccaggccccccggggccccctggagagcagggactacctgggacagctggaaaagaaggaacaaagggtgaccctggtccccctggggccccagggaaggatggtcctgctggtctgaggggattcccaggagagagaggcctcccaggcactgctggtggacctggtttgaaggggaatgaaggtccgtctggcccccctggccctgcaggctcccctggggaacgaggtgcagcaggatcagggggacccattggtccgccagggcgcccaggcccgcagggtccccctggagcagcaggagagaaaggtgtcccaggtgagaagggccccattggcccaactggccgagatggagtgcagggtcctgtggggcttcctggtcctgctgggcctccaggtgtggctggagaggatggagacaagggtgaggtgggggaccccggacagaagggcaccaaagggaacaagggtgaacatggccctcctggaccccctggacccattggtcctgtggggcagcctggagcagcgggagcagatggggagcctggagctcggggaccccagggacactttggagccaaaggtgatgaaggaacaagaggattcaatgggcccccaggacccattggcctacagggtttgccaggcccctctggggagaagggagaaacaggagatgtgggtcctatgggaccacctggccccccaggacctcgaggtccagctggacccaatggcgctgatggcccacaaggtcccccaggaggtgttgggaacctgggtccccctggagagaagggggaaccaggagagtcaggatctccagggatccagggcgagccaggtgtcaagggtccacgcggggaacgtggagagaaaggagagtcggggcagccaggagagccagggccaccagggcctaaaggccccacaggcgatgatggccccaaagggaaccctggtcctgttggttttcctggtgaccctggcccccctggagaaggtggccctcggggccaggatggtgctaagggtgaccgaggcgaggatggtgagccaggacagcctggatcccctggtcccaccggggagaatggacccccagggccacttggaaagcgaggtcctgctggctcgcctggttccgaggggcgacaaggagggaagggagccaagggagatcctggcgctataggtgccccggggaagacaggcccggtgggtcctgcaggcccagcagggaaacctggccctgatggtctgagggggctcccaggctcagtgggtcagcaaggccgacctggagctacaggccaggctgggcccccaggtcctgtgggacccccagggctgcctggtctccggggcgatgctggagccaagggagagaagggccacccaggtctcattggactgattgggcccccgggtgagcagggagagaagggagatcggggacttcctgggcctcagggctcccctgggcagaagggtgagatgggtatcccaggagcatccggccccattggtcctggaggtccccccggcctccccggacctgctggccccaaaggagccaaaggagccacaggcccaggcggacccaagggagagaagggtgtgcagggccctccaggacacccgggtcccccaggcgaggtgatccagccactgcccattcagatgcccaagaagactcggcgctcggtggatggaagccgtctgatgcaggaagatgaggccataccgaccgggggagcccccggcagtcctggggggctggaggagatctttggctcactcgactccctgcgggaggagatcgagcagatgaggcggccaacagggacccaggacagccctgctcgcacctgccaggacctgaagctgtgccacccagagcttcccgatggagagtactgggtcgaccccaaccagggctgtgctcgggatgccttccgagttttctgcaacttcacagcagggggtgagacctgtgtgacgcctagggatgacgtcacgcagttctcttacgtggactcagagggctccccagtgggtgtggtccagctcaccttcctgcggctgctcagcgtctcagcccaccaggacgtctcctacccctgctctggagcagcccgtgacggtcccctgagactccgtggggccaatgaggatgagctgagcccggagactagcccctatgtcaaagaattcagagatggctgccagacacagcaaggccggacggtgctggaggtgcgaacgcctgtgctggagcagctgccagtgctggatgcctccttctcagacctgggagccccaccgaggcggggaggggtgctgctggggcctgtctgcttcatgggataggaccgtctctgtctgatcctgtccattcggaaccaggcccacctggaatcccacaacatcagctctgtgccacctcccaagagggctcctcactatctagggagccctgggccagggcgtggagagccctcagtcggggcaggccaggggaggggtgaagtggttgcctggacaccccacgggaggagtggcatctggggctcttggccctcccacctggagcctgttacccgttagagagctgagacccttatttaaaactcacctcccaatcaccccaaacaaatggaagagaagagaaaggacatggcgtattttgtatttaaaagtaattgtattaattatttaaagtgtggaaagcaaaataacaaaaaagagaaacgccaacaaaaatcagcagatgttgaagacaggggtctcgggggtgggctccggcacccacatcctggagtcaggactttcctcagtgactgtgtgtaggggggtttcagggctgaaccccacctccctcccaccttcctcccacctcacctgtcgcacccactgtgaaagttggaatatgtggtctccctggcctcagggctctgactctgccagggtggggctctctaacccacaggtgttggctgcctggcccatgtgcccactgtctcttccacttggtctgggtttggcaggcactgcctgctacttgagggccaggatgctcccccagggaagaaacggaatagtgtggggtgtgtgcagggctgcatcccgcagatggctggaatattaaaattcttctatattggctggtaaattgccatggccctgagccactgagtatgttcattgccacccctgtccctcccctgggcacccctcactttccctgatcctgcaattaaagggttaatgtgtggcatatggaagggactcccaggaccctgtgcccagcttccatgctgactgatggttaaataatgtgattgtctcctcccagg

SEQ ID NO: 4527 - DNA, 5868 bp, Homo sapiens
  source 1..5868: mol_type = unassigned DNA
gtgcaccccctgtggatgtgctccgggccctgaggttcccctccctccctgatggtgtccggagagcgaaaggcatctgtccagctgatgtggcctaccgagtggcacgacctgcccagctcagtgcacccactcgccagcttttcccaggaggatttcccaaagatttctctctgctgactgttgtccggacccgccctggtctccaagctcccctcctgactctctacagtgcccagggtgtccgacagctgggcctggagctgggccgacctgtccgcttcctgtatgaagaccagactgggcggcctcaacctccctctcagccagtcttccgaggcctcagcctagcagatggcaagtggcaccgtgtggctgtggctgtgaagggccagtctgtcaccctcattgttgactgcaagaagcgagtcacccggcctctcccccgaagtgctcgtccagtattggacacccatggagtgatcatctttggtgcccgtattctggatgaagaagtctttgagggtgatgtccaggagctggccattgtcccaggggtccaggcagcctatgaatcatgtgaacagaaggagctggaatgcgaggggggccagagggaaagaccccaaaaccaacagcctcacagagcccagagatctccacagcagcaaccatcaagacttcacaggccacaaaatcaggaaccccagagccaggaccccaccccaggtgaagaggaagaaatcctggagtcgagcctcttgccaccccttgaggaggctgcccatggaccccgagggctgaagggagagaaaggagagcctgcagtgttggaacctggtatgctcgtggaggggccccctggcccagaaggccctgcgggattgattggtccccctggcatccaggggaacccaggcccagttggagaccctggagagaggggcccccctggccgagcagggctccctggatcagatggggctcctggtcctcctggcacatctctcatgctcccattccggtttggcagtggtgggggtgacaagggccctgtggtggcggcccaggaggctcaggcccaggcgatcctgcagcaggcgaggctggcgctccgtggaccccctggccccatgggatacacagggcgccctggacccttgggccaacctgggagccctggcctgaaaggagagtctggagacttaggacctcagggccccagaggacctcagggcctcacaggccctcctggcaaggctgggcgaaggggccgggcaggtgctgatggagcccgagggatgcctggagatcctggagtgaagggtgaccgaggttttgatggactcccagggctccctggagagaagggccataggggtgatactggtgcccagggccttcctggtccccctggtgaggatggagagaggggagatgacggggagattgggcctcgagggctgcctggagagtcgggacctcgaggtctccttggccccaaaggcccacctggtattcctggaccccctggcgtccgaggcatggatggtccccagggccccaaagggagcttgggaccccagggagagccaggacctcctggacaacagggcacccctgggacccagggtcttcccgggccccagggtgccatcggccctcatggagagaagggtcctcaagggaagccagggctccccggcatgcctggctcagacggacccccgggtcacccagggaaggaaggtccccctggaaccaaaggaaaccagggtccctctggacctcagggacctctaggatacccaggacctcgaggggtcaagggtgtggacggaattcggggtctgaagggtcataagggtgagaagggtgaggatggctttcctgggttcaaaggtgacataggcgtgaaaggtgacaggggcgaagttggagtccctggttccaggggagaggatggtcctgaggggccaaagggacgcactggaccgactggagaccctgggcccccagggctcatgggcgagaagggcaagctgggtgttcctggtctgcctggctatcctggacgtcagggacccaaggggtccctaggatttcctggctttcctggtgccagtggagagaagggagcccggggcctgtcggggaagtcagggcctcggggagaacggggccccacgggtccacggggtcagcggggaccccgaggtgccactgggaagtctggagctaagggaacatctggtggtgatggcccccatgggccccctggagagaggggcctccctggacctcagggtcccaacgggtttcctggaccgaaaggacccccgggcccccctgggaaggacgggctgccgggacacccaggccaaagaggagaagtgggtttccaagggaagaccggcccccctggtcctccaggagtggtgggacctcagggagcagcaggagaaaccggccctatgggggagagaggtcacccaggccccccggggccccctggagagcagggactacctgggacagctggaaaagaaggaacaaagggtgaccctggtccccctggggccccagggaaggatggtcctgctggtctgaggggattcccaggagagagaggcctcccaggcactgctggtggacctggtttgaaggggaatgaaggtccgtctggcccccctggccctgcaggctcccctggggaacgaggtgcagcaggatcagggggacccattggtccgccagggcgcccaggcccgcagggtccccctggagcagcaggagagaaaggtgtcccaggtgagaagggccccattggcccaactggccgagatggagtgcagggtcctgtggggcttcctggtcctgctgggcctccaggtgtggctggagaggatggagacaagggtgaggtgggggaccccggacagaagggcaccaaagggaacaagggtgaacatggccctcctggaccccctggacccattggtcctgtggggcagcctggagcagcgggagcagatggggagcctggagctcggggaccccagggacactttggagccaaaggtgatgaaggaacaagaggattcaatgggcccccaggacccattggcctacagggtttgccaggcccctctggggagaagggagaaacaggagatgtgggtcctatgggaccacctggccccccaggacctcgaggtccagctggacccaatggcgctgatggcccacaaggtcccccaggaggtgttgggaacctgggtccccctggagagaagggggaaccaggagagtcaggatctccagggatccagggcgagccaggtgtcaagggtccacgcggggaacgtggagagaaaggagagtcggggcagccaggagagccagggccaccagggcctaaaggccccacaggcgatgatggccccaaagggaaccctggtcctgttggttttcctggtgaccctggcccccctggagaaggtggccctcggggccaggatggtgctaagggtgaccgaggcgaggatggtgagccaggacagcctggatcccctggtcccaccggggagaatggacccccagggccacttggaaagcgaggtcctgctggctcgcctggttccgaggggcgacaaggagggaagggagccaagggagatcctggcgctataggtgccccggggaagacaggcccggtgggtcctgcaggcccagcagggaaacctggccctgatggtctgagggggctcccaggctcagtgggtcagcaaggccgacctggagctacaggccaggctgggcccccaggtcctgtgggacccccagggctgcctggtctccggggcgatgctggagccaagggagagaagggccacccaggtctcattggactgattgggcccccgggtgagcagggagagaagggagatcggggacttcctgggcctcagggctcccctgggcagaagggtgagatgggtatcccaggagcatccggccccattggtcctggaggtccccccggcctccccggacctgctggccccaaaggagccaaaggagccacaggcccaggcggacccaagggagagaagggtgtgcagggccctccaggacacccgggtcccccaggcgaggtgatccagccactgcccattcagatgcccaagaagactcggcgctcggtggatggaagccgtctgatgcaggaagatgaggccataccgaccgggggagcccccggcagtcctggggggctggaggagatctttggctcactcgactccctgcgggaggagatcgagcagatgaggcggccaacagggacccaggacagccctgctcgcacctgccaggacctgaagctgtgccacccagagcttcccgatggagagtactgggtcgaccccaaccagggctgtgctcgggatgccttccgagttttctgcaacttcacagcagggggtgagacctgtgtgacgcctagggatgacgtcacgcagttctcttacgtggactcagagggctccccagtgggtgtggtccagctcaccttcctgcggctgctcagcgtctcagcccaccaggacgtctcctacccctgctctggagcagcccgtgacggtcccctgagactccgtggggccaatgaggatgagctgagcccggagactagcccctatgtcaaagaattcagagatggctgccagacacagcaaggccggacggtgctggaggtgcgaacgcctgtgctggagcagctgccagtgctggatgcctccttctcagacctgggagccccaccgaggcggggaggggtgctgctggggcctgtctgcttcatgggataggaccgtctctgtctgatcctgtccattcggaaccaggcccacctggaatcccacaacatcagctctgtgccacctcccaagagggctcctcactatctagggagccctgggccagggcgtggagagccctcagtcggggcaggccaggggaggggtgaagtggttgcctggacaccccacgggaggagtggcatctggggctcttggccctcccacctggagcctgttacccgttagagagctgagacccttatttaaaactcacctcccaatcaccccaaacaaatggaagagaagagaaaggacatggcgtattttgtatttaaaagtaattgtattaattatttaaagtgtggaaagcaaaataacaaaaaagagaaacgccaacaaaaatcagcagatgttgaagacaggggtctcgggggtgggctccggcacccacatcctggagtcaggactttcctcagtgactgtgtgtaggggggtttcagggctgaaccccacctccctcccaccttcctcccacctcacctgtcgcacccactgtgaaagttggaatatgtggtctccctggcctcagggctctgactctgccagggtggggctctctaacccacaggtgttggctgcctggcccatgtgcccactgtctcttccacttggtctgggtttggcaggcactgcctgctacttgagggccaggatgctcccccagggaagaaacggaatagtgtggggtgtgtgcagggctgcatcccgcagatggctggaatattaaaattcttctatattggctggtaaattgccatggccctgagccactgagtatgttcattgccacccctgtccctcccctgggcacccctcactttccctgatcctgcaattaaagggttaatgtgtggcatatggaagggactcccaggaccctgtgcccagcttccatgctgactgatggttaaataatgtgattgtctcctcccaggtgtctgtgtca

SEQ ID NO: 4528 - DNA, 1790 bp, Homo sapiens
  source 1..1790: mol_type = unassigned DNA
gtgcaccccctgtggatgtgctccgggccctgaggttcccctccctccctgatggtgtccggagagcgaaaggcatctgtccagctgatgtggcctaccgagtggcacgacctgcccagctcagtgcacccactcgccagcttttcccaggaggatttcccaaagatttctctctgctgactgttgtccggacccgccctggtctccaagctcccctcctgactctctacagtgcccagggtgtccgacagctgggcctggagctgggccgacctgtccgcttcctgtatgaagaccagactgggcggcctcaacctccctctcagccagtcttccgaggcctcagcctagcagatggcaagtggcaccgtgtggctgtggctgtgaagggccagtctgtcaccctcattgttgactgcaagaagcgagtcacccggcctctcccccgaagtgctcgtccagtattggacacccatggagtgatcatctttggtgcccgtattctggatgaagaagtctttgagggtgatgtccaggagctggccattgtcccaggggtccaggcagcctatgaatcatgtgaacagaaggagctggaatgcgaggggggccagagggaaagaccccaaaaccaacagcctcacagagcccagagatctccacagcagcaaccatcaagacttcacaggccacaaaatcaggaaccccagagccagcccactgagtctctctactatgactacaagcccccctattatgatgtgatgactacggggacaacccctgattatcaggaccccaccccaggtgaagaggaagaaatcctggagtcgagcctcttgccaccccttgaggaggagcagacagatctccaggtcccccccacagccgacaggttccaggcagaggaatatggggagggtggcacagacccccctgaagggccctacgattacacctatggctatggggatgattatcgtgaggagacagagcttggccctgccctctctgcggagacagcccactcaggagccgctgcccatggaccccgagggctgaagggagagaaaggagagcctgcagtgttggaacctggtatgctcgtggaggggccccctggcccagaaggccctgcgggattgattggtccccctggcatccaggggaacccaggcccagttggagaccctggagagaggggcccccctggccgagcagggctccctggatcagatggggctcctggtcctcctggcacatctctcatgctcccattccggtttggcagtggtgggggtgacaagggccctgtggtggcggcccaggaggctcaggcccaggcgatcctgcagcaggcgaggctggcgctccgtggaccccctggccccatgggatacacagggcgccctggacccttgggccaacctgggagccctggcctgaaaggagagtctggagacttaggacctcagggccccagaggacctcagggcctcacaggccctcctggcaaggctgggcgaaggggccgggcaggtgctgatggagcccgagggatgcctggagatcctggagtgaagggtgaccgaggttttgatggactcccagggctccctggagagaagggccataggggtgatactggtgcccagggccttcctggtccccctggtgaggatggagagaggggagatgacggggagattgggcctcgagggctgcctggagagtcgggacctcgaggtctccttggccccaaaggcccacctggtattcctggaccccct

SEQ ID NO: 4529 - DNA, 898 bp, Homo sapiens
  source 1..898: mol_type = unassigned DNA
gtgcaccccctgtggatgtgctccgggccctgaggttcccctccctccctgatggtgtccggagagcgaaaggcatctgtccagctgatgtggcctaccgagtggcacgacctgcccagctcagtgcacccactcgccagcttttcccaggaggatttcccaaagatttctctctgctgactgttgtccggacccgccctggtctccaagctcccctcctgactctctacagtgcccagggtgtccgacagctgggcctggagctgggccgacctgtccgcttcctgtatgaagaccagactgggcggcctcaacctccctctcagccagtcttccgaggcctcagcctagcagatggcaagtggcaccgtgtggctgtggctgtgaagggccagtctgtcaccctcattgttgactgcaagaagcgagtcacccggcctctcccccgaagtgctcgtccagtattggacacccatggagtgatcatctttggtgcccgtattctggatgaagaagtctttgagggtgatgtccaggagctggccattgtcccaggggtccaggcagcctatgaatcatgtgaacagaaggagctggaatgcgaggggggccagagggaaagaccccaaaaccaacagcctcacagagcccagagatctccacagcagcaaccatcaagacttcacaggccacaaaatcaggaaccccagagccaggtgagggagctgggagaacccccaagtgcagcacaccccagagagggaagacacccaggcatctctcctccttagttgtcctccccaccctcatctccctattcccatcaccccctcctcctagtcctcattcatcagcctttttattttcatctaaaaataaaaagagttgttatgaagaa

SEQ ID NO: 4530 - DNA, 1984 bp, Homo sapiens; identical to SEQ ID NO: 4510
  source 1..1984: mol_type = unassigned DNA

SEQ ID NO: 4531 - DNA, 6209 bp, Homo sapiens
  source 1..6209: mol_type = unassigned DNA
tgggggctctgggcgccagggtggccggggacacacagaagcggcagccaccgaggagggagcagtgccgggagccccgacggcgccttgctgcatggagctgggccgctgacagctgtcgctgcccgcagcctctgacctccctgggaccccggcgtctgaggctcatagtctgctccctgtcttctgtcagcctcagggcatccagcgtctcaggccgacctgggtccctgggacccggcgtttcggcttctcagccatggagcggtgcagccgctgccatcgcctcctcctcctcctacctctggtgctggggctgagcgcggccccaggctgggcaggtgcaccccctgtggatgtgctccgggccctgaggttcccctccctccctgatggtgtccggagagcgaaaggcatctgtccagctgatgtggcctaccgagtggcacgacctgcccagctcagtgcacccactcgccagcttttcccaggaggatttcccaaagatttctctctgctgactgttgtccggacccgccctggtctccaagctcccctcctgactctctacagtgcccagggtgtccgacagctgggcctggagctgggccgacctgtccgcttcctgtatgaagaccagactgggcggcctcaacctccctctcagccagtcttccgaggcctcagcctagcagatggcaagtggcaccgtgtggctgtggctgtgaagggccagtctgtcaccctcattgttgactgcaagaagcgagtcacccggcctctcccccgaagtgctcgtccagtattggacacccatggagtgatcatctttggtgcccgtattctggatgaagaagtctttgagggtgatgtccaggagctggccattgtcccaggggtccaggcagcctatgaatcatgtgaacagaaggagctggaatgcgaggggggccagagggaaagaccccaaaaccaacagcctcacagagcccagagatctccacagcagcaaccatcaagacttcacaggccacaaaatcaggaaccccagagccaggaccccaccccaggtgaagaggaagaaatcctggagtcgagcctcttgccaccccttgaggaggctgcccatggaccccgagggctgaagggagagaaaggagagcctgcagtgttggaacctggtatgctcgtggaggggccccctggcccagaaggccctgcgggattgattggtccccctggcatccaggggaacccaggcccagttggagaccctggagagaggggcccccctggccgagcagggctccctggatcagatggggctcctggtcctcctggcacatctctcatgctcccattccggtttggcagtggtgggggtgacaagggccctgtggtggcggcccaggaggctcaggcccaggcgatcctgcagcaggcgaggctggcgctccgtggaccccctggccccatgggatacacagggcgccctggacccttgggccaacctgggagccctggcctgaaaggagagtctggagacttaggacctcagggccccagaggacctcagggcctcacaggccctcctggcaaggctgggcgaaggggccgggcaggtgctgatggagcccgagggatgcctggagatcctggagtgaagggtgaccgaggttttgatggactcccagggctccctggagagaagggccataggggtgatactggtgcccagggccttcctggtccccctggtgaggatggagagaggggagatgacggggagattgggcctcgagggctgcctggagagtcgggacctcgaggtctccttggccccaaaggcccacctggtattcctggaccccctggcgtccgaggcatggatggtccccagggccccaaagggagcttgggaccccagggagagccaggacctcctggacaacagggcacccctgggacccagggtcttcccgggccccagggtgccatcggccctcatggagagaagggtcctcaagggaagccagggctccccggcatgcctggctcagacggacccccgggtcacccagggaaggaaggtccccctggaaccaaaggaaaccagggtccctctggacctcagggtcctctaggatacccaggacctcgaggggtcaagggtgtggacggaattcggggtctgaagggtcataagggtgagaagggtgaggatggctttcctgggttcaaaggtgacataggcgtgaaaggtgacaggggcgaagttggagtccctggttccaggggagaggatggtcctgaggggccaaagggacgcactggaccgactggagaccctgggcccccagggctcatgggcgagaagggcaagctgggtgttcctggtctgcctggctatcctggacgtcagggacccaaggggtccctaggatttcctggctttcctggtgccagtggagagaagggagcccggggcctgtcggggaagtcagggcctcggggagaacggggccccacgggtccacggggtcagcggggaccccgaggtgccactgggaagtctggagctaagggaacatctggtggtgatggcccccatgggccccctggagagaggggcctccctggacctcagggtcccaacgggtttcctggaccgaaaggacccctgggcccccctgggaaggacgggctgccgggacacccaggccaaagaggagaagtgggtttccaagggaagaccggcccccctggtcctccaggagtggtgggacctcagggagcagcaggagaaaccggccctatgggggagagaggtcacccaggccccccggggccccctggagagcagggactacctgggacagctggaaaagaaggaacaaagggtgaccctggtccccctggggccccagggaaggatggtcctgctggtctgaggggattcccaggagagagaggcctcccaggcactgctggtggacctggtttgaaggggaatgaaggtccgtctggcccccctggccctgcaggctcccctggggaacgaggtgcagcaggatcagggggacccattggtccgccagggcgcccaggcccgcagggtccccctggagcagcaggagagaaaggtgtcccaggtgagaagggccccattggcccaactggccgagatggagtgcagggtcctgtggggcttcctggtcctgctgggcctccaggtgtggctggagaggatggagacaagggtgaggtgggggaccccggacagaagggcaccaaagggaacaagggtgaacatggccctcctggaccccctggacccattggtcctgtggggcagcctggagcagcgggagcagatggggagcccggagctcggggaccccagggacactttggagccaaaggtgatgaaggaacaagaggattcaatgggcccccaggacccattggcctacagggtttgccaggcccctctggggagaagggagaaacaggagatgtgggtcctatgggaccacctggccccccaggacctcgaggtccagctggacccaatggcgctgatggcccacaaggtcccccaggaggtgttgggaacctgggtccccctggagagaagggggaaccaggagagtcaggatctccagggatccagggcgagccaggtgtcaagggtccacgcggggaacgtggagagaaaggagagtcggggcagccaggagagccagggccaccagggcctaaaggccccacaggcgatgatggccccaaagggaaccctggtcctgttggttttcctggtgaccctggcccccctggagaaggtggccctcggggccaggatggtgctaagggtgaccgaggcgaggatggtgagccaggacagcctggatcccctggtcccaccggggagaatggacccccagggccacttggaaagcgaggtcctgctggctcgcctggttccgaggggcgacaaggagggaagggagccaagggagatcctggcgctataggtgccccggggaagacaggcccggtgggtcctgcaggcccagcagggaaacctggccctgatggtctgagggggctcccaggctcagtgggtcagcaaggccgacctggagctacaggccaggctgggcccccaggtcctgtgggacccccagggctgcctggtctccggggcgatgctggagccaagggagagaagggccacccaggtctcattggactgattgggcccccgggtgagcagggagagaagggagatcggggacttcctgggcctcagggctcccctgggcagaagggtgagatgggtatcccaggagcatccggccccattggtcctggaggtccccccggcctccccggacctgctggccccaaaggagccaaaggagccacaggcccaggcggacccaagggagagaagggtgtgcagggccctccaggacacccgggtcccccaggcgaggtgatccagccactgcccattcagatgcccaagaagactcggcgctcggtggatggaagccgtctgatgcaggaagatgaggccataccgaccgggggagcccccggcagtcctggggggctggaggagatctttggctcactcgactccctgcgggaggagatcgagcagatgaggcggccaacagggacccaggacagccctgctcgcacctgccaggacctgaagctgtgccacccagagcttcccgatggagagtactgggtcgaccccaaccagggctgtgctcgggatgccttccgagttttctgcaacttcacagcagggggtgagacctgtgtgacgcctagggatgacgtcacgcagttctcttacgtggactcagagggctccccagtgggtgtggtccagctcaccttcctgcggctgctcagcgtctcagcccaccaggacgtctcctacccctgctctggagcagcccgtgacggtcccctgagactccgtggggccaatgaggatgagctgagcccggagactagcccctatgtcaaagaattcagagatggctgccagacacagcaaggccggacggtgctggaggtgcgaacgcctgtgctggagcagctgccagtgctggatgcctccttctcagacctgggagccccaccgaggcggggaggggtgctgctggggcctgtctgcttcatgggataggaccgtctctgtctgatcctgtccattcggaaccaggcccacctggaatcccacaacatcagctctgtgccacctcccaagagggctcctcactatctagggagccctgggccagggcgtggagagccctcagtcggggcaggccaggggaggggtgaagtggttgcctggacaccccacgggaggagtggcatctggggctcttggccctcccacctggagcctgttacccgttagagagctgagacccttatttaaaactcacctcccaatcaccccaaacaaatggaagagaagagaaaggacatggcgtattttgtatttaaaagtaattgtattaattatttaaagtgtggaaagcaaaataacaaaaaagagaaacgccaacaaaaatcagcagatgttgaagacaggggtctcgggggtgggctccggcacccacatcctggagtcaggactttcctcagtgactgtgtgtaggggggtttcagggctgaaccccacctccctcccaccttcctcccacctcacctgtcgcacccactgtgaaagttggaatatgtggtctccctggcctcagggctctgactctgccagggtggggctctctaacccacaggtgttggctgcctggcccatgtgcccactgtctcttccacttggtctgggtttggcaggcactgcctgctacttgagggccaggatgctcccccagggaagaaacggaatagtgtggggtgtgtgcagggctgcatcccgcagatggctggaatattaaaattcttctatattggctggtaaattgccatggccctgagccactgagtatgttcattgccacccctgtccctcccctgggcacccctcactttccctgatcctgcaattaaagggttaatgtgtggcatatggaagggactcccaggaccctgtgcccagcttccatgctgactgatggttaaataatgtgattgtctcctcccaggtgtctgtgtca

SEQ ID NO: 4532 - DNA, 1984 bp, Homo sapiens; identical to SEQ ID NO: 4510
  source 1..1984: mol_type = unassigned DNA

SEQ ID NO: 4533 - DNA, 2099 bp, Homo sapiens
  source 1..2099: mol_type = unassigned DNA
acacagaagcggcagccaccgaggagggagcagtgccgggagccccgacggcgccttgctgcatggagctgggccgctgacagctgtcgctgcccgcagcctctgacctccctgggaccccggcgtctgaggctcatagtctgctccctgtcttctgtcagcctcagggcatccagcgtctcaggccgacctgggtccctgggacccggcgtttcggcttctcagccatggagcggtgcagccgctgccatcgcctcctcctcctcctacctctggtgctggggctgagcgcggccccaggctgggcaggtgcaccccctgtggatgtgctccgggccctgaggttcccctccctccctgatggtgtccggagagcgaaaggcatctgtccagctgatgtggcctaccgagtggcacgacctgcccagctcagtgcacccactcgccagcttttcccaggaggatttcccaaagatttctctctgctgactgttgtccggacccgccctggtctccaagctcccctcctgactctctacagtgcccagggtgtccgacagctgggcctggagctgggccgacctgtccgcttcctgtatgaagaccagactgggcggcctcaacctccctctcagccagtcttccgaggcctcagcctagcagatggcaagtggcaccgtgtggctgtggctgtgaagggccagtctgtcaccctcattgttgactgcaagaagcgagtcacccggcctctcccccgaagtgctcgtccagtattggacacccatggagtgatcatctttggtgcccgtattctggatgaagaagtctttgagggtgatgtccaggagctggccattgtcccaggggtccaggcagcctatgaatcatgtgaacagaaggagctggaatgcgaggggggccagagggaaagaccccaaaaccaacagcctcacagagcccagagatctccacagcagcaaccatcaagacttcacaggccacaaaatcaggaaccccagagccagcccactgagtctctctactatgactacgagcccccctattatgatgtgatgactacggggacaacccctgattatcaggaccccaccccaggtgaagaggaagaaatcctggagtcgagcctcttgccaccccttgaggaggagcagacagatctccaggtcccccccacagccgacaggttccaggcagaggaatatggggagggtggcacagacccccctgaagggccctacgattacacctatggctatggggatgattatcgtgaggagacagagcttggccctgccctctctgcggagacagcccactcaggagccgctgcccatggaccccgagggctgaagggagagaaaggagagcctgcagtgttggaacctggtatgctcgtggaggggccccctggcccagaaggccctgcgggattgattggtccccctggcatccaggggaacccaggcccagttggagaccctggagagaggggcccccctggccgagcagggctccctggatcagatggggctcctggtcctcctggcacatctctcatgctcccattccggtttggcagtggtgggggtgacaagggccctgtggtggcggcccaggaggctcaggcccaggcgatcctgcagcaggcgaggctggcgctccgtggaccccctggccccatgggatacacagggcgccctggacccttgggccaacctgggagccctggcctgaaaggagagtctggagacttaggacctcagggccccagaggacctcagggcctcacaggccctcctggcaaggctgggcgaaggggccgggcaggtgctgatggagcccgagggatgcctggagatcctggagtgaagggtgaccgaggttttgatggactcccagggctccctggagagaagggccataggggtgatactggtgcccagggccttcctggtccccctggtgaggatggagagaggggagatgacggggagattgggcctcgagggctgcctggagagtcgggacctcgaggtctccttggccccaaaggcccacctggtattcctggaccccct

SEQ ID NO: 4534 - DNA, 1194 bp, Homo sapiens; identical to SEQ ID NO: 4518
  source 1..1194: mol_type = unassigned DNA

SEQ ID NO: 4535 - DNA, 6425 bp, Homo sapiens
  source 1..6425: mol_type = unassigned DNA
cacacagaagcggcagccaccgaggagggagcagtgccgggagccccgacggcgccttgctgcatggagctgggccgctgacagctgtcgctgcccgcagcctctgacctccctgggaccccggcgtctgaggctcatagtctgctccctgtcttctgtcagcctcagggcatccagcgtctcaggccgacctgggtccctgggacccggcgtttcggcttctcagccatggagcggtgcagccgctgccatcgcctcctcctcctcctacctctggtgctggggctgagcgcggccccaggctgggcaggtgcaccccctgtggatgtgctccgggccctgaggttcccctccctccctgatggtgtccggagagcgaaaggcatctgtccagctgatgtggcctaccgagtggcacgacctgcccagctcagtgcacccactcgccagcttttcccaggaggatttcccaaagatttctctctgctgactgttgtccggacccgccctggtctccaagctcccctcctgactctctacagtgcccagggtgtccgacagctgggcctggagctgggccgacctgtccgcttcctgtatgaagaccagactgggcggcctcaacctccctctcagccagtcttccgaggcctcagcctagcagatggcaagtggcaccgtgtggctgtggctgtgaagggccagtctgtcaccctcattgttgactgcaagaagcgagtcacccggcctctcccccgaagtgctcgtccagtattggacacccatggagtgatcatctttggtgcccgtattctggatgaagaagtctttgagggtgatgtccaggagctggccattgtcccaggggtccaggcagcctatgaatcatgtgaacagaaggagctggaatgcgaggggggccagagggaaagaccccaaaaccaacagcctcacagagcccagagatctccacagcagcaaccatcaagacttcacaggccacaaaatcaggaaccccagagccagcccactgagtctctctactatgactacgagcccccctattatgatgtgatgactacggggacaacccctgattatcaggaccccaccccaggtgaagaggaagaaatcctggagtcgagcctcttgccaccccttgaggaggagcagacagatctccaggtcccccccacagccgacaggttccaggcagaggaatatggggagggtggcacagacccccctgaagggccctacgattacacctatggctatggggatgattatcgtgaggagacagagcttggccctgccctctctgcggagacagcccactcaggagccgctgcccatggaccccgagggctgaagggagagaaaggagagcctgcagtgttggaacctggtatgctcgtggaggggccccctggcccagaaggccctgcgggattgattggtccccctggcatccaggggaacccaggcccagttggagaccctggagagaggggcccccctggccgagcagggctccctggatcagatggggctcctggtcctcctggcacatctctcatgctcccattccggtttggcagtggtgggggtgacaagggccctgtggtggcggcccaggaggctcaggcccaggcgatcctgcagcaggcgaggctggcgctccgtggaccccctggccccatgggatacacagggcgccctggacccttgggccaacctgggagccctggcctgaaaggagagtctggagacttaggacctcagggccccagaggacctcagggcctcacaggccctcctggcaaggctgggcgaaggggccgggcaggtgctgatggagcccgagggatgcctggagatcctggagtgaagggtgaccgaggttttgatggactcccagggctccctggagagaagggccataggggtgatactggtgcccagggccttcctggtccccctggtgaggatggagagaggggagatgacggggagattgggcctcgagggctgcctggagagtcgggacctcgaggtctccttggccccaaaggcccacctggtattcctggaccccctggcgtccgaggcatggatggtccccagggccccaaagggagcttgggaccccagggagagccaggacctcctggacaacagggcacccctgggacccagggtcttcccgggccccagggtgccatcggccctcatggagagaagggtcctcaagggaagccagggctccccggcatgcctggctcagacggacccccgggtcacccagggaaggaaggtccccctggaaccaaaggaaaccagggtccctctggacctcagggtcctctaggatacccaggacctcgaggggtcaagggtgtggacggaattcggggtctgaagggtcataagggtgagaagggtgaggatggctttcctgggttcaaaggtgacataggcgtgaaaggtgacaggggcgaagttggagtccctggttccaggggagaggatggtcctgaggggccaaagggacgcactggaccgactggagaccctgggcccccagggctcatgggcgagaagggcaagctgggtgttcctggtctgcctggctatcctggacgtcagggacccaaggggtccctaggatttcctggctttcctggtgccagtggagagaagggagcccggggcctgtcggggaagtcagggcctcggggagaacggggccccacgggtccacggggtcagcggggaccccgaggtgccactgggaagtctggagctaagggaacatctggtggtgatggcccccatgggccccctggagagaggggcctccctggacctcagggtcccaacgggtttcctggaccgaaaggacccctgggcccccctgggaaggacgggctgccgggacacccaggccaaagaggagaagtgggtttccaagggaagaccggcccccctggtcctccaggagtggtgggacctcagggagcagcaggagaaaccggccctatgggggagagaggtcacccaggccccccggggccccctggagagcagggactacctgggacagctggaaaagaaggaacaaagggtgaccctggtccccctggggccccagggaaggatggtcctgctggtctgaggggattcccaggagagagaggcctcccaggcactgctggtggacctggtttgaaggggaatgaaggtccgtctggcccccctggccctgcaggctcccctggggaacgaggtgcagcaggatcagggggacccattggtccgccagggcgcccaggcccgcagggtccccctggagcagcaggagagaaaggtgtcccaggtgagaagggccccattggcccaactggccgagatggagtgcagggtcctgtggggcttcctggtcctgctgggcctccaggtgtggctggagaggatggagacaagggtgaggtgggggaccccggacagaagggcaccaaagggaacaagggtgaacatggccctcctggaccccctggacccattggtcctgtggggcagcctggagcagcgggagcagatggggagcccggagctcggggaccccagggacactttggagccaaaggtgatgaaggaacaagaggattcaatgggcccccaggacccattggcctacagggtttgccaggcccctctggggagaagggagaaacaggagatgtgggtcctatgggaccacctggccccccaggacctcgaggtccagctggacccaatggcgctgatggcccacaaggtcccccaggaggtgttgggaacctgggtccccctggagagaagggggaaccaggagagtcaggatctccagggatccagggcgagccaggtgtcaagggtccacgcggggaacgtggagagaaaggagagtcggggcagccaggagagccagggccaccagggcctaaaggccccacaggcgatgatggccccaaagggaaccctggtcctgttggttttcctggtgaccctggcccccctggagaaggtggccctcggggccaggatggtgctaagggtgaccgaggcgaggatggtgagccaggacagcctggatcccctggtcccaccggggagaatggacccccagggccacttggaaagcgaggtcctgctggctcgcctggttccgaggggcgacaaggagggaagggagccaagggagatcctggcgctataggtgccccggggaagacaggcccggtgggtcctgcaggcccagcagggaaacctggccctgatggtctgagggggctcccaggctcagtgggtcagcaaggccgacctggagctacaggccaggctgggcccccaggtcctgtgggacccccagggctgcctggtctccggggcgatgctggagccaagggagagaagggccacccaggtctcattggactgattgggcccccgggtgagcagggagagaagggagatcggggacttcctgggcctcagggctcccctgggcagaagggtgagatgggtatcccaggagcatccggccccattggtcctggaggtccccccggcctccccggacctgctggccccaaaggagccaaaggagccacaggcccaggcggacccaagggagagaagggtgtgcagggccctccaggacacccgggtcccccaggcgaggtgatccagccactgcccattcagatgcccaagaagactcggcgctcggtggatggaagccgtctgatgcaggaagatgaggccataccgaccgggggagcccccggcagtcctggggggctggaggagatctttggctcactcgactccctgcgggaggagatcgagcagatgaggcggccaacagggacccaggacagccctgctcgcacctgccaggacctgaagctgtgccacccagagcttcccgatggagagtactgggtcgaccccaaccagggctgtgctcgggatgccttccgagttttctgcaacttcacagcagggggtgagacctgtgtgacgcctagggatgacgtcacgcagttctcttacgtggactcagagggctccccagtgggtgtggtccagctcaccttcctgcggctgctcagcgtctcagcccaccaggacgtctcctacccctgctctggagcagcccgtgacggtcccctgagactccgtggggccaatgaggatgagctgagcccggagactagcccctatgtcaaagaattcagagatggctgccagacacagcaaggccggacggtgctggaggtgcgaacgcctgtgctggagcagctgccagtgctggatgcctccttctcagacctgggagccccaccgaggcggggaggggtgctgctggggcctgtctgcttcatgggataggaccgtctctgtctgatcctgtccattcggaaccaggcccacctggaatcccacaacatcagctctgtgccacctcccaagagggctcctcactatctagggagccctgggccagggcgtggagagccctcagtcggggcaggccaggggaggggtgaagtggttgcctggacaccccacgggaggagtggcatctggggctcttggccctcccacctggagcctgttacccgttagagagctgagacccttatttaaaactcacctcccaatcaccccaaacaaatggaagagaagagaaaggacatggcgtattttgtatttaaaagtaattgtattaattatttaaagtgtggaaagcaaaataacaaaaaagagaaacgccaacaaaaatcagcagatgttgaagacaggggtctcgggggtgggctccggcacccacatcctggagtcaggactttcctcagtgactgtgtgtaggggggtttcagggctgaaccccacctccctcccaccttcctcccacctcacctgtcgcacccactgtgaaagttggaatatgtggtctccctggcctcagggctctgactctgccagggtggggctctctaacccacaggtgttggctgcctggcccatgtgcccactgtctcttccacttggtctgggtttggcaggcactgcctgctacttgagggccaggatgctcccccagggaagaaacggaatagtgtggggtgtgtgcagggctgcatcccgcagatggctggaatattaaaattcttctatattggctggtaaattgccatggccctgagccactgagtatgttcattgccacccctgtccctcccctgggcacccctcactttccctgatcctgcaattaaagggttaatgtgtggcatatggaagggactcccaggaccctgtgcccagcttccatgctgactgatggttaaataatgtgattgtctcctcccagg

SEQ ID NO: 4536 - DNA, 6104 bp, Homo sapiens
  source 1..6104: mol_type = unassigned DNA
cacacagaagcggcagccaccgaggagggagcagtgccgggagccccgacggcgccttgctgcatggagctgggccgctgacagctgtcgctgcccgcagcctctgacctccctgggaccccggcgtctgaggctcatagtctgctccctgtcttctgtcagcctcagggcatccagcgtctcaggccgacctgggtccctgggacccggcgtttcggcttctcagccatggagcggtgcagccgctgccatcgcctcctcctcctcctacctctggtgctggggctgagcgcggccccaggctgggcaggtgcaccccctgtggatgtgctccgggccctgaggttcccctccctccctgatggtgtccggagagcgaaaggcatctgtccagctgatgtggcctaccgagtggcacgacctgcccagctcagtgcacccactcgccagcttttcccaggaggatttcccaaagatttctctctgctgactgttgtccggacccgccctggtctccaagctcccctcctgactctctacagtgcccagggtgtccgacagctgggcctggagctgggccgacctgtccgcttcctgtatgaagaccagactgggcggcctcaacctccctctcagccagtcttccgaggcctcagcctagcagatggcaagtggcaccgtgtggctgtggctgtgaagggccagtctgtcaccctcattgttgactgcaagaagcgagtcacccggcctctcccccgaagtgctcgtccagtattggacacccatggagtgatcatctttggtgcccgtattctggatgaagaagtctttgagggtgatgtccaggagctggccattgtcccaggggtccaggcagcctatgaatcatgtgaacagaaggagctggaatgcgaggggggccagagggaaagaccccaaaaccaacagcctcacagagcccagagatctccacagcagcaaccatcaagacttcacaggccacaaaatcaggaaccccagagccaggctgcccatggaccccgagggctgaagggagagaaaggagagcctgcagtgttggaacctggtatgctcgtggaggggccccctggcccagaaggccctgcgggattgattggtccccctggcatccaggggaacccaggcccagttggagaccctggagagaggggcccccctggccgagcagggctccctggatcagatggggctcctggtcctcctggcacatctctcatgctcccattccggtttggcagtggtgggggtgacaagggccctgtggtggcggcccaggaggctcaggcccaggcgatcctgcagcaggcgaggctggcgctccgtggaccccctggccccatgggatacacagggcgccctggacccttgggccaacctgggagccctggcctgaaaggagagtctggagacttaggacctcagggccccagaggacctcagggcctcacaggccctcctggcaaggctgggcgaaggggccgggcaggtgctgatggagcccgagggatgcctggagatcctggagtgaagggtgaccgaggttttgatggactcccagggctccctggagagaagggccataggggtgatactggtgcccagggccttcctggtccccctggtgaggatggagagaggggagatgacggggagattgggcctcgagggctgcctggagagtcgggacctcgaggtctccttggccccaaaggcccacctggtattcctggaccccctggcgtccgaggcatggatggtccccagggccccaaagggagcttgggaccccagggagagccaggacctcctggacaacagggcacccctgggacccagggtcttcccgggccccagggtgccatcggccctcatggagagaagggtcctcaagggaagccagggctccccggcatgcctggctcagacggacccccgggtcacccagggaaggaaggtccccctggaaccaaaggaaaccagggtccctctggacctcagggtcctctaggatacccaggacctcgaggggtcaagggtgtggacggaattcggggtctgaagggtcataagggtgagaagggtgaggatggctttcctgggttcaaaggtgacataggcgtgaaaggtgacaggggcgaagttggagtccctggttccaggggagaggatggtcctgaggggccaaagggacgcactggaccgactggagaccctgggcccccagggctcatgggcgagaagggcaagctgggtgttcctggtctgcctggctatcctggacgtcagggacccaaggggtccctaggatttcctggctttcctggtgccagtggagagaagggagcccggggcctgtcggggaagtcagggcctcggggagaacggggccccacgggtccacggggtcagcggggaccccgaggtgccactgggaagtctggagctaagggaacatctggtggtgatggcccccatgggccccctggagagaggggcctccctggacctcagggtcccaacgggtttcctggaccgaaaggacccctgggcccccctgggaaggacgggctgccgggacacccaggccaaagaggagaagtgggtttccaagggaagaccggcccccctggtcctccaggagtggtgggacctcagggagcagcaggagaaaccggccctatgggggagagaggtcacccaggccccccggggccccctggagagcagggactacctgggacagctggaaaagaaggaacaaagggtgaccctggtccccctggggccccagggaaggatggtcctgctggtctgaggggattcccaggagagagaggcctcccaggcactgctggtggacctggtttgaaggggaatgaaggtccgtctggcccccctggccctgcaggctcccctggggaacgaggtgcagcaggatcagggggacccattggtccgccagggcgcccaggcccgcagggtccccctggagcagcaggagagaaaggtgtcccaggtgagaagggccccattggcccaactggccgagatggagtgcagggtcctgtggggcttcctggtcctgctgggcctccaggtgtggctggagaggatggagacaagggtgaggtgggggaccccggacagaagggcaccaaagggaacaagggtgaacatggccctcctggaccccctggacccattggtcctgtggggcagcctggagcagcgggagcagatggggagcccggagctcggggaccccagggacactttggagccaaaggtgatgaaggaacaagaggattcaatgggcccccaggacccattggcctacagggtttgccaggcccctctggggagaagggagaaacaggagatgtgggtcctatgggaccacctggccccccaggacctcgaggtccagctggacccaatggcgctgatggcccacaaggtcccccaggaggtgttgggaacctgggtccccctggagagaagggggaaccaggagagtcaggatctccagggatccagggcgagccaggtgtcaagggtccacgcggggaacgtggagagaaaggagagtcggggcagccaggagagccagggccaccagggcctaaaggccccacaggcgatgatggccccaaagggaaccctggtcctgttggttttcctggtgaccctggcccccctggagaaggtggccctcggggccaggatggtgctaagggtgaccgaggcgaggatggtgagccaggacagcctggatcccctggtcccaccggggagaatggacccccagggccacttggaaagcgaggtcctgctggctcgcctggttccgaggggcgacaaggagggaagggagccaagggagatcctggcgctataggtgccccggggaagacaggcccggtgggtcctgcaggcccagcagggaaacctggccctgatggtctgagggggctcccaggctcagtgggtcagcaaggccgacctggagctacaggccaggctgggcccccaggtcctgtgggacccccagggctgcctggtctccggggcgatgctggagccaagggagagaagggccacccaggtctcattggactgattgggcccccgggtgagcagggagagaagggagatcggggacttcctgggcctcagggctcccctgggcagaagggtgagatgggtatcccaggagcatccggccccattggtcctggaggtccccccggcctccccggacctgctggccccaaaggagccaaaggagccacaggcccaggcggacccaagggagagaagggtgtgcagggccctccaggacacccgggtcccccaggcgaggtgatccagccactgcccattcagatgcccaagaagactcggcgctcggtggatggaagccgtctgatgcaggaagatgaggccataccgaccgggggagcccccggcagtcctggggggctggaggagatctttggctcactcgactccctgcgggaggagatcgagcagatgaggcggccaacagggacccaggacagccctgctcgcacctgccaggacctgaagctgtgccacccagagcttcccgatggagagtactgggtcgaccccaaccagggctgtgctcgggatgccttccgagttttctgcaacttcacagcagggggtgagacctgtgtgacgcctagggatgacgtcacgcagttctcttacgtggactcagagggctccccagtgggtgtggtccagctcaccttcctgcggctgctcagcgtctcagcccaccaggacgtctcctacccctgctctggagcagcccgtgacggtcccctgagactccgtggggccaatgaggatgagctgagcccggagactagcccctatgtcaaagaattcagagatggctgccagacacagcaaggccggacggtgctggaggtgcgaacgcctgtgctggagcagctgccagtgctggatgcctccttctcagacctgggagccccaccgaggcggggaggggtgctgctggggcctgtctgcttcatgggataggaccgtctctgtctgatcctgtccattcggaaccaggcccacctggaatcccacaacatcagctctgtgccacctcccaagagggctcctcactatctagggagccctgggccagggcgtggagagccctcagtcggggcaggccaggggaggggtgaagtggttgcctggacaccccacgggaggagtggcatctggggctcttggccctcccacctggagcctgttacccgttagagagctgagacccttatttaaaactcacctcccaatcaccccaaacaaatggaagagaagagaaaggacatggcgtattttgtatttaaaagtaattgtattaattatttaaagtgtggaaagcaaaataacaaaaaagagaaacgccaacaaaaatcagcagatgttgaagacaggggtctcgggggtgggctccggcacccacatcctggagtcaggactttcctcagtgactgtgtgtaggggggtttcagggctgaaccccacctccctcccaccttcctcccacctcacctgtcgcacccactgtgaaagttggaatatgtggtctccctggcctcagggctctgactctgccagggtggggctctctaacccacaggtgttggctgcctggcccatgtgcccactgtctcttccacttggtctgggtttggcaggcactgcctgctacttgagggccaggatgctcccccagggaagaaacggaatagtgtggggtgtgtgcagggctgcatcccgcagatggctggaatattaaaattcttctatattggctggtaaattgccatggccctgagccactgagtatgttcattgccacccctgtccctcccctgggcacccctcactttccctgatcctgcaattaaagggttaatgtgtggcatatggaagggactcccaggaccctgtgcccagcttccatgctgactgatggttaaataatgtgattgtctcctcccagg

SEQ ID NO: 4537 - DNA, 6209 bp, Homo sapiens
  source 1..6209: mol_type = unassigned DNA
tgggggctctgggcgccagggtggccggggacacacagaagcggcagccaccgaggagggagcagtgccgggagccccgacggcgccttgctgcatggagctgggccgctgacagctgtcgctgcccgcagcctctgacctccctgggaccccggcgtctgaggctcatagtctgctccctgtcttctgtcagcctcagggcatccagcgtctcaggccgacctgggtccctgggacccggcgtttcggcttctcagccatggagcggtgcagccgctgccatcgcctcctcctcctcctacctctggtgctggggctgagcgcggccccaggctgggcaggtgcaccccctgtggatgtgctccgggccctgaggttcccctccctccctgatggtgtccggagagcgaaaggcatctgtccagctgatgtggcctaccgagtggcacgacctgcccagctcagtgcacccactcgccagcttttcccaggaggatttcccaaagatttctctctgctgactgttgtccggacccgccctggtctccaagctcccctcctgactctctacagtgcccagggtgtccgacagctgggcctggagctgggccgacctgtccgcttcctgtatgaagaccagactgggcggcctcaacctccctctcagccagtcttccgaggcctcagcctagcagatggcaagtggcaccgtgtggctgtggctgtgaagggccagtctgtcaccctcattgttgactgcaagaagcgagtcacccggcctctcccccgaagtgctcgtccagtattggacacccatggagtgatcatctttggtgcccgtattctggatgaagaagtctttgagggtgatgtccaggagctggccattgtcccaggggtccaggcagcctatgaatcatgtgaacagaaggagctggaatgcgaggggggccagagggaaagaccccaaaaccaacagcctcacagagcccagagatctccacagcagcaaccatcaagacttcacaggccacaaaatcaggaaccccagagccaggaccccaccccaggtgaagaggaagaaatcctggagtcgagcctcttgccaccccttgaggaggctgcccatggaccccgagggctgaagggagagaaaggagagcctgcagtgttggaacctggtatgctcgtggaggggccccctggcccagaaggccctgcgggattgattggtccccctggcatccaggggaacccaggcccagttggagaccctggagagaggggcccccctggccgagcagggctccctggatcagatggggctcctggtcctcctggcacatctctcatgctcccattccggtttggcagtggtgggggtgacaagggccctgtggtggcggcccaggaggctcaggcccaggcgatcctgcagcaggcgaggctggcgctccgtggaccccctggccccatgggatacacagggcgccctggacccttgggccaacctgggagccctggcctgaaaggagagtctggagacttaggacctcagggccccagaggacctcagggcctcacaggccctcctggcaaggctgggcgaaggggccgggcaggtgctgatggagcccgagggatgcctggagatcctggagtgaagggtgaccgaggttttgatggactcccagggctccctggagagaagggccataggggtgatactggtgcccagggccttcctggtccccctggtgaggatggagagaggggagatgacggggagattgggcctcgagggctgcctggagagtcgggacctcgaggtctccttggccccaaaggcccacctggtattcctggaccccctggcgtccgaggcatggatggtccccagggccccaaagggagcttgggaccccagggagagccaggacctcctggacaacagggcacccctgggacccagggtcttcccgggccccagggtgccatcggccctcatggagagaagggtcctcaagggaagccagggctccccggcatgcctggctcagacggacccccgggtcacccagggaaggaaggtccccctggaaccaaaggaaaccagggtccctctggacctcagggacctctaggatacccaggacctcgaggggtcaagggtgtggacggaattcggggtctgaagggtcataagggtgagaagggtgaggatggctttcctgggttcaaaggtgacataggcgtgaaaggtgacaggggcgaagttggagtccctggttccaggggagaggatggtcctgaggggccaaagggacgcactggaccgactggagaccctgggcccccagggctcatgggcgagaagggcaagctgggtgttcctggtctgcctggctatcctggacgtcagggacccaaggggtccctaggatttcctggctttcctggtgccagtggagagaagggagcccggggcctgtcggggaagtcagggcctcggggagaacggggccccacgggtccacggggtcagcggggaccccgaggtgccactgggaagtctggagctaagggaacatctggtggtgatggcccccatgggccccctggagagaggggcctccctggacctcagggtcccaacgggtttcctggaccgaaaggacccccgggcccccctgggaaggatgggctgccgggacacccaggccaaagaggagaagtgggtttccaagggaagaccggcccccctggtcctccaggagtggtgggacctcagggagcagcaggagaaaccggccctatgggggagagaggtcacccaggccccccggggccccctggagagcagggactacctgggacagctggaaaagaaggaacaaagggtgaccctggtccccctggggccccagggaaggatggtcctgctggtctgaggggattcccaggagagagaggcctcccaggcactgctggtggacctggtttgaaggggaatgaaggtccgtctggcccccctggccctgcaggctcccctggggaacgaggtgcagcaggatcagggggacccattggtccgccagggcgcccaggcccgcagggtccccctggagcagcaggagagaaaggtgtcccaggtgagaagggccccattggcccgactggccgagatggagtgcagggtcctgtggggcttcctggtcctgctgggcctccaggtgtggctggagaggatggagacaagggtgaggtgggggaccccggacagaagggcaccaaagggaacaagggtgaacatggccctcctggaccccctggacccattggtcctgtggggcagcctggagcagcgggagcagatggggagcccggagctcggggaccccagggacactttggagccaaaggtgatgaaggaacaagaggattcaatgggcccccaggacccattggcctacagggtttgccaggcccctctggggagaagggagaaacaggagatgtgggtcctatgggaccacctggccccccaggacctcgaggtccagctggacccaatggcgctgatggcccacaaggtcccccaggaggtgttgggaacctgggtccccctggagagaagggggaaccaggagagtcaggatctccagggatccagggcgagccaggtgtcaagggtccacgcggggaacgtggagagaaaggagagtcggggcagccaggagagccagggccaccagggcctaaaggccccacaggcgatgatggccccaaagggaaccctggtcctgttggttttcctggtgaccctggcccccctggagaaggtggccctcggggccaggatggtgctaagggtgaccgaggcgaggatggtgagccaggacagcctggatcccctggtcccaccggggagaatggacccccagggccacttggaaagcgaggtcctgctggctcgcctggttccgaggggcgacaaggagggaagggagccaagggagatcctggcgctataggtgccccggggaagacaggcccggtgggtcctgcaggcccagcagggaaacctggccctgatggtctgagggggctcccaggctcagtgggtcagcaaggccgacctggagctacaggccaggctgggcccccaggtcctgtgggacccccagggctgcctggtctccggggcgatgctggagccaagggagagaagggccacccaggtctcattggactgattgggcccccgggtgagcagggagagaagggagatcggggacttcctgggcctcagggctcccctgggcagaagggtgagatgggtatcccaggagcatccggccccattggtcctggaggtccccccggcctccccggacctgctggccccaaaggagccaaaggagccacaggcccaggcggacccaagggagagaagggtgtgcagggccctccaggacacccgggtcccccaggcgaggtgatccagccactgcccattcagatgcccaagaagactcggcgctcggtggatggaagccgtctgatgcaggaagatgaggccataccgaccgggggagcccccggcagtcctggggggctggaggagatctttggctcactcgactccctgcgggaggagatcgagcagatgaggcggccaacagggacccaggacagccctgctcgcacctgccaggacctgaagctgtgccacccagagcttcccgatggagagtactgggtcgaccccaaccagggctgtgctcgggatgccttccgagttttctgcaacttcacagcagggggtgagacctgtgtgacgcctagggatgacgtcacgcagttctcttacgtggactcagagggctccccagtgggtgtggtccagctcaccttcctgcggctgctcagcgtctcagcccaccaggacgtctcctacccctgctctggagcagcccgtgacggtcccctgagactccgtggggccaatgaggatgagctgagcccggagactagcccctatgtcaaagaattcagagatggctgccagacacagcaaggccggacggtgctggaggtgcgaacgcctgtgctggagcagctgccagtgctggatgcctccttctcagacctgggagccccaccgaggcggggaggggtgctgctggggcctgtctgcttcatgggataggaccgtctctgtctgatcctgtccattcggaaccaggcccacctggaatcccacaacatcagctctgtgccacctcccaagagggctcctcactatctagggagccctgggccagggcgtggagagccctcagtcggggcaggccaggggaggggtgaagtggttgcctggacaccccacgggaggagtggcatctggggctcttggccctcccacctggagcctgttacccgttagagagctgagacccttatttaaaactcacctcccaatcaccccaaacaaatggaagagaagagaaaggacatggcgtattttgtatttaaaagtaattgtattaattatttaaagtgtggaaagcaaaataacaaaaaagagaaacgccaacaaaaatcagcagatgttgaagacaggggtctcgggggtgggctccggcacccacatcctggagtcaggactttcctcagtgactgtgtgtaggggggtttcagggctgaaccccacctccctcccaccttcctcccacctcacctgtcgcacccactgtgaaagttggaatatgtggtctccctggcctcagggctctgactctgccagggtggggctctctaacccacaggtgttggctgcctggcccatgtgcccactgtctcttccacttggtctgggtttggcaggcactgcctgctacttgagggccaggatgctcccccagggaagaaacggaatagtgtggggtgtgtgcagggctgcatcccgcagatggctggaatattaaaattcttctatattggctggtaaattgccatggccctgagccactgagtatgttcattgccacccctgtccctcccctgggcacccctcactttccctgatcctgcaattaaagggttaatgtgtggcatatggaagggactcccaggaccctgtgcccagcttccatgctgactgatggttaaataatgtgattgtctcctcccaggtgtctgtgtca

SEQ ID NO: 4538 - DNA, 1984 bp, Homo sapiens; identical to SEQ ID NO: 4510
  source 1..1984: mol_type = unassigned DNA

SEQ ID NO: 4539 - DNA, 2099 bp, Homo sapiens; identical to SEQ ID NO: 4533
  source 1..2099: mol_type = unassigned DNA

SEQ ID NO: 4540 - DNA, 1194 bp, Homo sapiens; identical to SEQ ID NO: 4518
  source 1..1194: mol_type = unassigned DNA

SEQ ID NO: 4541 - DNA, 6425 bp, Homo sapiens
  source 1..6425: mol_type = unassigned DNA
cacacagaagcggcagccaccgaggagggagcagtgccgggagccccgacggcgccttgctgcatggagctgggccgctgacagctgtcgctgcccgcagcctctgacctccctgggaccccggcgtctgaggctcatagtctgctccctgtcttctgtcagcctcagggcatccagcgtctcaggccgacctgggtccctgggacccggcgtttcggcttctcagccatggagcggtgcagccgctgccatcgcctcctcctcctcctacctctggtgctggggctgagcgcggccccaggctgggcaggtgcaccccctgtggatgtgctccgggccctgaggttcccctccctccctgatggtgtccggagagcgaaaggcatctgtccagctgatgtggcctaccgagtggcacgacctgcccagctcagtgcacccactcgccagcttttcccaggaggatttcccaaagatttctctctgctgactgttgtccggacccgccctggtctccaagctcccctcctgactctctacagtgcccagggtgtccgacagctgggcctggagctgggccgacctgtccgcttcctgtatgaagaccagactgggcggcctcaacctccctctcagccagtcttccgaggcctcagcctagcagatggcaagtggcaccgtgtggctgtggctgtgaagggccagtctgtcaccctcattgttgactgcaagaagcgagtcacccggcctctcccccgaagtgctcgtccagtattggacacccatggagtgatcatctttggtgcccgtattctggatgaagaagtctttgagggtgatgtccaggagctggccattgtcccaggggtccaggcagcctatgaatcatgtgaacagaaggagctggaatgcgaggggggccagagggaaagaccccaaaaccaacagcctcacagagcccagagatctccacagcagcaaccatcaagacttcacaggccacaaaatcaggaaccccagagccagcccactgagtctctctactatgactacgagcccccctattatgatgtgatgactacggggacaacccctgattatcaggaccccaccccaggtgaagaggaagaaatcctggagtcgagcctcttgccaccccttgaggaggagcagacagatctccaggtcccccccacagccgacaggttccaggcagaggaatatggggagggtggcacagacccccctgaagggccctacgattacacctatggctatggggatgattatcgtgaggagacagagcttggccctgccctctctgcggagacagcccactcaggagccgctgcccatggaccccgagggctgaagggagagaaaggagagcctgcagtgttggaacctggtatgctcgtggaggggccccctggcccagaaggccctgcgggattgattggtccccctggcatccaggggaacccaggcccagttggagaccctggagagaggggcccccctggccgagcagggctccctggatcagatggggctcctggtcctcctggcacatctctcatgctcccattccggtttggcagtggtgggggtgacaagggccctgtggtggcggcccaggaggctcaggcccaggcgatcctgcagcaggcgaggctggcgctccgtggaccccctggccccatgggatacacagggcgccctggacccttgggccaacctgggagccctggcctgaaaggagagtctggagacttaggacctcagggccccagaggacctcagggcctcacaggccctcctggcaaggctgggcgaaggggccgggcaggtgctgatggagcccgagggatgcctggagatcctggagtgaagggtgaccgaggttttgatggactcccagggctccctggagagaagggccataggggtgatactggtgcccagggccttcctggtccccctggtgaggatggagagaggggagatgacggggagattgggcctcgagggctgcctggagagtcgggacctcgaggtctccttggccccaaaggcccacctggtattcctggaccccctggcgtccgaggcatggatggtccccagggccccaaagggagcttgggaccccagggagagccaggacctcctggacaacagggcacccctgggacccagggtcttcccgggccccagggtgccatcggccctcatggagagaagggtcctcaagggaagccagggctccccggcatgcctggctcagacggacccccgggtcacccagggaaggaaggtccccctggaaccaaaggaaaccagggtccctctggacctcagggacctctaggatacccaggacctcgaggggtcaagggtgtggacggaattcggggtctgaagggtcataagggtgagaagggtgaggatggctttcctgggttcaaaggtgacataggcgtgaaaggtgacaggggcgaagttggagtccctggttccaggggagaggatggtcctgaggggccaaagggacgcactggaccgactggagaccctgggcccccagggctcatgggcgagaagggcaagctgggtgttcctggtctgcctggctatcctggacgtcagggacccaaggggtccctaggatttcctggctttcctggtgccagtggagagaagggagcccggggcctgtcggggaagtcagggcctcggggagaacggggccccacgggtccacggggtcagcggggaccccgaggtgccactgggaagtctggagctaagggaacatctggtggtgatggcccccatgggccccctggagagaggggcctccctggacctcagggtcccaacgggtttcctggaccgaaaggacccccgggcccccctgggaaggatgggctgccgggacacccaggccaaagaggagaagtgggtttccaagggaagaccggcccccctggtcctccaggagtggtgggacctcagggagcagcaggagaaaccggccctatgggggagagaggtcacccaggccccccggggccccctggagagcagggactacctgggacagctggaaaagaaggaacaaagggtgaccctggtccccctggggccccagggaaggatggtcctgctggtctgaggggattcccaggagagagaggcctcccaggcactgctggtggacctggtttgaaggggaatgaaggtccgtctggcccccctggccctgcaggctcccctggggaacgaggtgcagcaggatcagggggacccattggtccgccagggcgcccaggcccgcagggtccccctggagcagcaggagagaaaggtgtcccaggtgagaagggccccattggcccgactggccgagatggagtgcagggtcctgtggggcttcctggtcctgctgggcctccaggtgtggctggagaggatggagacaagggtgaggtgggggaccccggacagaagggcaccaaagggaacaagggtgaacatggccctcctggaccccctggacccattggtcctgtggggcagcctggagcagcgggagcagatggggagcccggagctcggggaccccagggacactttggagccaaaggtgatgaaggaacaagaggattcaatgggcccccaggacccattggcctacagggtttgccaggcccctctggggagaagggagaaacaggagatgtgggtcctatgggaccacctggccccccaggacctcgaggtccagctggacccaatggcgctgatggcccacaaggtcccccaggaggtgttgggaacctgggtccccctggagagaagggggaaccaggagagtcaggatctccagggatccagggcgagccaggtgtcaagggtccacgcggggaacgtggagagaaaggagagtcggggcagccaggagagccagggccaccagggcctaaaggccccacaggcgatgatggccccaaagggaaccctggtcctgttggttttcctggtgaccctggcccccctggagaaggtggccctcggggccaggatggtgctaagggtgaccgaggcgaggatggtgagccaggacagcctggatcccctggtcccaccggggagaatggacccccagggccacttggaaagcgaggtcctgctggctcgcctggttccgaggggcgacaaggagggaagggagccaagggagatcctggcgctataggtgccccggggaagacaggcccggtgggtcctgcaggcccagcagggaaacctggccctgatggtctgagggggctcccaggctcagtgggtcagcaaggccgacctggagctacaggccaggctgggcccccaggtcctgtgggacccccagggctgcctggtctccggggcgatgctggagccaagggagagaagggccacccaggtctcattggactgattgggcccccgggtgagcagggagagaagggagatcggggacttcctgggcctcagggctcccctgggcagaagggtgagatgggtatcccaggagcatccggccccattggtcctggaggtccccccggcctccccggacctgctggccccaaaggagccaaaggagccacaggcccaggcggacccaagggagagaagggtgtgcagggccctccaggacacccgggtcccccaggcgaggtgatccagccactgcccattcagatgcccaagaagactcggcgctcggtggatggaagccgtctgatgcaggaagatgaggccataccgaccgggggagcccccggcagtcctggggggctggaggagatctttggctcactcgactccctgcgggaggagatcgagcagatgaggcggccaacagggacccaggacagccctgctcgcacctgccaggacctgaagctgtgccacccagagcttcccgatggagagtactgggtcgaccccaaccagggctgtgctcgggatgccttccgagttttctgcaacttcacagcagggggtgagacctgtgtgacgcctagggatgacgtcacgcagttctcttacgtggactcagagggctccccagtgggtgtggtccagctcaccttcctgcggctgctcagcgtctcagcccaccaggacgtctcctacccctgctctggagcagcccgtgacggtcccctgagactccgtggggccaatgaggatgagctgagcccggagactagcccctatgtcaaagaattcagagatggctgccagacacagcaaggccggacggtgctggaggtgcgaacgcctgtgctggagcagctgccagtgctggatgcctccttctcagacctgggagccccaccgaggcggggaggggtgctgctggggcctgtctgcttcatgggataggaccgtctctgtctgatcctgtccattcggaaccaggcccacctggaatcccacaacatcagctctgtgccacctcccaagagggctcctcactatctagggagccctgggccagggcgtggagagccctcagtcggggcaggccaggggaggggtgaagtggttgcctggacaccccacgggaggagtggcatctggggctcttggccctcccacctggagcctgttacccgttagagagctgagacccttatttaaaactcacctcccaatcaccccaaacaaatggaagagaagagaaaggacatggcgtattttgtatttaaaagtaattgtattaattatttaaagtgtggaaagcaaaataacaaaaaagagaaacgccaacaaaaatcagcagatgttgaagacaggggtctcgggggtgggctccggcacccacatcctggagtcaggactttcctcagtgactgtgtgtaggggggtttcagggctgaaccccacctccctcccaccttcctcccacctcacctgtcgcacccactgtgaaagttggaatatgtggtctccctggcctcagggctctgactctgccagggtggggctctctaacccacaggtgttggctgcctggcccatgtgcccactgtctcttccacttggtctgggtttggcaggcactgcctgctacttgagggccaggatgctcccccagggaagaaacggaatagtgtggggtgtgtgcagggctgcatcccgcagatggctggaatattaaaattcttctatattggctggtaaattgccatggccctgagccactgagtatgttcattgccacccctgtccctcccctgggcacccctcactttccctgatcctgcaattaaagggttaatgtgtggcatatggaagggactcccaggaccctgtgcccagcttccatgctgactgatggttaaataatgtgattgtctcctcccagg

SEQ ID NO: 4542 - DNA, 6104 bp, Homo sapiens
  source 1..6104: mol_type = unassigned DNA
cacacagaagcggcagccaccgaggagggagcagtgccgggagccccgacggcgccttgctgcatggagctgggccgctgacagctgtcgctgcccgcagcctctgacctccctgggaccccggcgtctgaggctcatagtctgctccctgtcttctgtcagcctcagggcatccagcgtctcaggccgacctgggtccctgggacccggcgtttcggcttctcagccatggagcggtgcagccgctgccatcgcctcctcctcctcctacctctggtgctggggctgagcgcggccccaggctgggcaggtgcaccccctgtggatgtgctccgggccctgaggttcccctccctccctgatggtgtccggagagcgaaaggcatctgtccagctgatgtggcctaccgagtggcacgacctgcccagctcagtgcacccactcgccagcttttcccaggaggatttcccaaagatttctctctgctgactgttgtccggacccgccctggtctccaagctcccctcctgactctctacagtgcccagggtgtccgacagctgggcctggagctgggccgacctgtccgcttcctgtatgaagaccagactgggcggcctcaacctccctctcagccagtcttccgaggcctcagcctagcagatggcaagtggcaccgtgtggctgtggctgtgaagggccagtctgtcaccctcattgttgactgcaagaagcgagtcacccggcctctcccccgaagtgctcgtccagtattggacacccatggagtgatcatctttggtgcccgtattctggatgaagaagtctttgagggtgatgtccaggagctggccattgtcccaggggtccaggcagcctatgaatcatgtgaacagaaggagctggaatgcgaggggggccagagggaaagaccccaaaaccaacagcctcacagagcccagagatctccacagcagcaaccatcaagacttcacaggccacaaaatcaggaaccccagagccaggctgcccatggaccccgagggctgaagggagagaaaggagagcctgcagtgttggaacctggtatgctcgtggaggggccccctggcccagaaggccctgcgggattgattggtccccctggcatccaggggaacccaggcccagttggagaccctggagagaggggcccccctggccgagcagggctccctggatcagatggggctcctggtcctcctggcacatctctcatgctcccattccggtttggcagtggtgggggtgacaagggccctgtggtggcggcccaggaggctcaggcccaggcgatcctgcagcaggcgaggctggcgctccgtggaccccctggccccatgggatacacagggcgccctggacccttgggccaacctgggagccctggcctgaaaggagagtctggagacttaggacctcagggccccagaggacctcagggcctcacaggccctcctggcaaggctgggcgaaggggccgggcaggtgctgatggagcccgagggatgcctggagatcctggagtgaagggtgaccgaggttttgatggactcccagggctccctggagagaagggccataggggtgatactggtgcccagggccttcctggtccccctggtgaggatggagagaggggagatgacggggagattgggcctcgagggctgcctggagagtcgggacctcgaggtctccttggccccaaaggcccacctggtattcctggaccccctggcgtccgaggcatggatggtccccagggccccaaagggagcttgggaccccagggagagccaggacctcctggacaacagggcacccctgggacccagggtcttcccgggccccagggtgccatcggccctcatggagagaagggtcctcaagggaagccagggctccccggcatgcctggctcagacggacccccgggtcacccagggaaggaaggtccccctggaaccaaaggaaaccagggtccctctggacctcagggacctctaggatacccaggacctcgaggggtcaagggtgtggacggaattcggggtctgaagggtcataagggtgagaagggtgaggatggctttcctgggttcaaaggtgacataggcgtgaaaggtgacaggggcgaagttggagtccctggttccaggggagaggatggtcctgaggggccaaagggacgcactggaccgactggagaccctgggcccccagggctcatgggcgagaagggcaagctgggtgttcctggtctgcctggctatcctggacgtcagggacccaaggggtccctaggatttcctggctttcctggtgccagtggagagaagggagcccggggcctgtcggggaagtcagggcctcggggagaacggggccccacgggtccacggggtcagcggggaccccgaggtgccactgggaagtctggagctaagggaacatctggtggtgatggcccccatgggccccctggagagaggggcctccctggacctcagggtcccaacgggtttcctggaccgaaaggacccccgggcccccctgggaaggatgggctgccgggacacccaggccaaagaggagaagtgggtttccaagggaagaccggcccccctggtcctccaggagtggtgggacctcagggagcagcaggagaaaccggccctatgggggagagaggtcacccaggccccccggggccccctggagagcagggactacctgggacagctggaaaagaaggaacaaagggtgaccctggtccccctggggccccagggaaggatggtcctgctggtctgaggggattcccaggagagagaggcctcccaggcactgctggtggacctggtttgaaggggaatgaaggtccgtctggcccccctggccctgcaggctcccctggggaacgaggtgcagcaggatcagggggacccattggtccgccagggcgcccaggcccgcagggtccccctggagcagcaggagagaaaggtgtcccaggtgagaagggccccattggcccgactggccgagatggagtgcagggtcctgtggggcttcctggtcctgctgggcctccaggtgtggctggagaggatggagacaagggtgaggtgggggaccccggacagaagggcaccaaagggaacaagggtgaacatggccctcctggaccccctggacccattggtcctgtggggcagcctggagcagcgggagcagatggggagcccggagctcggggaccccagggacactttggagccaaaggtgatgaaggaacaagaggattcaatgggcccccaggacccattggcctacagggtttgccaggcccctctggggagaagggagaaacaggagatgtgggtcctatgggaccacctggccccccaggacctcgaggtccagctggacccaatggcgctgatggcccacaaggtcccccaggaggtgttgggaacctgggtccccctggagagaagggggaaccaggagagtcaggatctccagggatccagggcgagccaggtgtcaagggtccacgcggggaacgtggagagaaaggagagtcggggcagccaggagagccagggccaccagggcctaaaggccccacaggcgatgatggccccaaagggaaccctggtcctgttggttttcctggtgaccctggcccccctggagaaggtggccctcggggccaggatggtgctaagggtgaccgaggcgaggatggtgagccaggacagcctggatcccctggtcccaccggggagaatggacccccagggccacttggaaagcgaggtcctgctggctcgcctggttccgaggggcgacaaggagggaagggagccaagggagatcctggcgctataggtgccccggggaagacaggcccggtgggtcctgcaggcccagcagggaaacctggccctgatggtctgagggggctcccaggctcagtgggtcagcaaggccgacctggagctacaggccaggctgggcccccaggtcctgtgggacccccagggctgcctggtctccggggcgatgctggagccaagggagagaagggccacccaggtctcattggactgattgggcccccgggtgagcagggagagaagggagatcggggacttcctgggcctcagggctcccctgggcagaagggtgagatgggtatcccaggagcatccggccccattggtcctggaggtccccccggcctccccggacctgctggccccaaaggagccaaaggagccacaggcccaggcggacccaagggagagaagggtgtgcagggccctccaggacacccgggtcccccaggcgaggtgatccagccactgcccattcagatgcccaagaagactcggcgctcggtggatggaagccgtctgatgcaggaagatgaggccataccgaccgggggagcccccggcagtcctggggggctggaggagatctttggctcactcgactccctgcgggaggagatcgagcagatgaggcggccaacagggacccaggacagccctgctcgcacctgccaggacctgaagctgtgccacccagagcttcccgatggagagtactgggtcgaccccaaccagggctgtgctcgggatgccttccgagttttctgcaacttcacagcagggggtgagacctgtgtgacgcctagggatgacgtcacgcagttctcttacgtggactcagagggctccccagtgggtgtggtccagctcaccttcctgcggctgctcagcgtctcagcccaccaggacgtctcctacccctgctctggagcagcccgtgacggtcccctgagactccgtggggccaatgaggatgagctgagcccggagactagcccctatgtcaaagaattcagagatggctgccagacacagcaaggccggacggtgctggaggtgcgaacgcctgtgctggagcagctgccagtgctggatgcctccttctcagacctgggagccccaccgaggcggggaggggtgctgctggggcctgtctgcttcatgggataggaccgtctctgtctgatcctgtccattcggaaccaggcccacctggaatcccacaacatcagctctgtgccacctcccaagagggctcctcactatctagggagccctgggccagggcgtggagagccctcagtcggggcaggccaggggaggggtgaagtggttgcctggacaccccacgggaggagtggcatctggggctcttggccctcccacctggagcctgttacccgttagagagctgagacccttatttaaaactcacctcccaatcaccccaaacaaatggaagagaagagaaaggacatggcgtattttgtatttaaaagtaattgtattaattatttaaagtgtggaaagcaaaataacaaaaaagagaaacgccaacaaaaatcagcagatgttgaagacaggggtctcgggggtgggctccggcacccacatcctggagtcaggactttcctcagtgactgtgtgtaggggggtttcagggctgaaccccacctccctcccaccttcctcccacctcacctgtcgcacccactgtgaaagttggaatatgtggtctccctggcctcagggctctgactctgccagggtggggctctctaacccacaggtgttggctgcctggcccatgtgcccactgtctcttccacttggtctgggtttggcaggcactgcctgctacttgagggccaggatgctcccccagggaagaaacggaatagtgtggggtgtgtgcagggctgcatcccgcagatggctggaatattaaaattcttctatattggctggtaaattgccatggccctgagccactgagtatgttcattgccacccctgtccctcccctgggcacccctcactttccctgatcctgcaattaaagggttaatgtgtggcatatggaagggactcccaggaccctgtgcccagcttccatgctgactgatggttaaataatgtgattgtctcctcccagg

SEQ ID NO: 4543 - DNA, 6209 bp, Homo sapiens; identical to SEQ ID NO: 4537
  source 1..6209: mol_type = unassigned DNA

SEQ ID NO: 4544 - DNA, 1984 bp, Homo sapiens; identical to SEQ ID NO: 4510
  source 1..1984: mol_type = unassigned DNA

SEQ ID NO: 4545 - DNA, 2099 bp, Homo sapiens; identical to SEQ ID NO: 4533
  source 1..2099: mol_type = unassigned DNA

SEQ ID NO: 4546 - DNA, 1194 bp, Homo sapiens; identical to SEQ ID NO: 4518
  source 1..1194: mol_type = unassigned DNA

SEQ ID NO: 4547 - DNA, 6425 bp, Homo sapiens; identical to SEQ ID NO: 4541
  source 1..6425: mol_type = unassigned DNA

SEQ ID NO: 4548 - DNA, 6104 bp, Homo sapiens; identical to SEQ ID NO: 4542
  source 1..6104: mol_type = unassigned DNA

SEQ ID NO: 4549 - DNA, 3135 bp, Homo sapiens
  source 1..3135: mol_type = unassigned DNA
gtttcatttgtgcaatacagcgatgaggtcaagtctgagttcaagctgaacacgtacaatgacaaggccctagcccttggggccctccagaatattaggtacagaggaggaaacacaagaacaggcaaggccctcacgtttatcaaggagaaagtcttgacttgggagagcggcatgaggaagaatgtccctaaggtgttggttgtggtcacggacggtcggtcccaggatgaggtcaagaaggcggctttggtcatccagcagtcagggttcagtgtctttgtagttggtgtggctgatgtcgactacaatgagcttgccaacattgccagcaaaccaagtgaacggcacgtgttcattgtggacgactttgaatcttttgagaagatcgaagacaatcttattacatttgtttgtgaaactgccacttcaagttgtcctctcatttatttggatggctacacctcaccaggttttaaaatgcttgaagcatacaacctgacagaaaagaattttgcttctgtacaaggagtatctttggagtcagggtctttccccagctactcagcatacaggattcagaagaatgcgtttgtgaatcagcctacagcagacctacacccaaatggactccctccttcatacacgattatattattattcagacttctcccagaaactcccagtgacccttttgcaatttggcaaatcacagacagagactacaaaccacaagttggagtgattgcagatccttctagcaagacgttatcattctttaacaaggatacaagaggcgaggtgcaaactgttacatttgacacagaagaagtaaagacattattttatggaagttttcacaaggttcatattgtagtgacctcaaaaagtgttaagatttacattgactgctatgaaattatagaaaaagacatcaaggaagctggaaatataacaactgatggttatgaaattcttggaaaactccttaaaggggaaaggaaatcagccgcattccaaatccagagttttgacattgtctgcagtccagtgtggaccagtagagacagatgctgtgatattccctctaggagagatgagggaaaatgccctgcttttccaaattcttgcacatgtacacaggacagcgttggacctccaggacctccaggccctgcaggaggacctggtgctaaaggtcccagaggtgaaagaggtatcagtggggcaattgggccccctggtcctcgtggagacataggtcctccaggcccccagggtcctccaggccctcagggacccaatggactctctattccgggagagcaaggtcgccaagggatgaaaggtgatgctggagagccaggacttccaggccgaacaggaaccccaggattacctggcccaccaggaccaatgggacctccaggagacagaggcttcactggaaaagacggtgcaatgggacccaggggcccaccagggccgccgggaagcccaggctccccaggagtcacaggaccaagtgggaagccaggaaaacctggagatcatggcagaccaggtccatctgggttgaaaggagaaaaaggtgataggggagacattgcttcccagaacatgatgcgagcagttgcaagacaagtctgtgaacaattgataagtggtcagatgaacagattcaatcagatgctgaatcagattccaaatgattaccagtccagtcgcaaccagccaggcccgccgggtccaccgggacctcctggtagcgcaggagccagaggagaacctgggcctggggggcggccaggcttcccgggcacaccagggatgcagggaccccctggggaacgaggtttgccaggagagaaaggtgaaaggggtactggatcttcaggacctcgggggctgcctggccccccaggtccacaaggagaatccagaacaggtccaccagggtccacaggttcaagaggtccccctggcccccctggccgtcctggaaactcaggtatccgaggacccccaggtcctcctggatactgtgattcttctcagtgtgccagcatcccatacaacgggcaaggctatccagagccttacgtgcccgagggcggggcctacctgcctgagcgcgagcccttcatcgtgccggtggagcccgagcggacagcggaatacgaggactacggcgcagacgagcctgcagaggagcctcctgagccccaccggcgctggcggcgcgccctgccccacggacccgggcagtgaaccagagatcacgcgccgcgccgcgaggcttgggggaggtgttgaaattctcatttacaggtcagatagagcagtgtacgtcttttctgaggtgtttcttccagcgttgctcatccaggagtaccctttctgattgtagagaaccttgtttctgcaggaagcctagctccaagcacgcagtctgtagacatttttgcctttgcccttgaaatgcttgcaaaatactttgttaacaaaagctgcaaagagagaacatgccgtgtgcctttagttagcacagcgggcagcctcagtgaaactcttaggttaagcagttaagtcctggaacccagagctgctgtgtatttcgagcgggcagtttatcttttgctatacttattttcaattcaattacaccacgattcaaataattcccctcctaaaaccaaaaaggagggaaacgtcaactccattgcaattacttatcttcctcttctatctctgttatacgccggggcatagaatgctcgtatacatctctttaacaaccacaaaccttaagccatgtagatgaagttagtgcatcaacgggatacagttccatattgccttaaacctccttgttttagacacactaacatttataccaaattgcagattattctgcagagagggaattgcatgtttgtgttgtatatttagtatgaacttttttcagaatataatatttcttagttatcaaaagtagttggaaaacatttgcaagactatgaacatagaattgctgcttttatattttaactgcagattgtgaatttcactgccttatattatttatttctgaaacaaaagaggcatttttcaataaaactactgaaaatttga

SEQ ID NO: 4550 - DNA, 11723 bp, Homo sapiens
  source 1..11723: mol_type = unassigned DNA
acttggctaaggcgaaccgccccagacgcgtccgcgcgccggcagctgcaggctcaggccatctccagtcttcctgccgcgcccgcctctcctcctgggattctcctcctcctcctggacttccccgcagctgcccacgcctcggcggccgccaggtgctcctggagtgcagcgcctatcgccggggcgtgtgggggccacaccgagcaccagcttctccgacgccgggaagccgctgtcgccgccgctacctctccctgttgccgccgcctcagatctcttcatgccgctgtaagctcggaggccaaggatgcggagtaggcttcccccagcgcttgccgccctgggcgcggccctgctcctgtcttccattgaggcagaagttgacccaccttcagacttgaattttaaaattatagatgaaaatactgttcatatgtcatgggcaaaaccagttgatccaattgtgggttacagaataacggtggaccctacaacggatgggcctactaaagaatttaccctttcagctagtaccactgaaactttattgtcagaacttgtacctgaaacagagtatgtggtgacaataacttcatatgatgaagtagaagaaagtgtaccagttataggacaactaacaattcaaacaggtagttcgacaaagccagtggagaagaaacctggaaaaaccgagatacaaaaatgctctgtcagtgcctggactgatttggttttcctcgtggatggctcttggagtgtgggaagaaataatttcaagtacattttagacttcattgctgctcttgtgtctgcttttgacattggggaagagaagacaagagttggagttgttcaatacagctctgataccaggactgaatttaacttaaatcagtactaccaaagggatgaacttcttgctgcaataaaaaaaattccatataaaggtggcaacacaatgacaggggatgccattgattatttagttaaaaatactttcacggaatctgctggggcaagagttggctttcctaaagtggcaattattattacggatggaaaatcccaggatgaagtggaaattccagcaagagagcttcgtaatgttggagttgaagttttctccttgggcattaaagctgcagatgcaaaagaactcaaacaaattgcctccacaccttcactgaaccatgttttcaatgtggccaactttgatgcaattgtggatattcagaatgagatcatctcccaggtgtgctcaggtgttgatgaacaacttggtgaattggttagtggagaagaagttgttgagcctccttcaaatttgattgccatggaagtctcttcaaaatatgttaagctaaattggaatccatctcctagtccagtgactggctacaaagtcatcctcacaccaatgactgcaggaagccgacagcacgctctgagtgtggggcctcagacaaccacgctcagtgttcgcgacctctcagcagacacagaataccagatcagtgtttccgccatgaagggaatgacatccagtgaacccatttcaataatggagaagactcagccaatgaaagttcaagtggaatgctcacgtggtgtggatataaaagccgatattgtgtttttggttgatggctcctatagcattgggattgcaaactttgttaaagttagagcctttttggaagttcttgtaaaaagttttgaaatttcaccaaatagggtccagattagtcttgtgcaatacagccgggatcctcatactgagttcactttgaaaaaattcaccaaagttgaagatataattgaagcaataaacaccttcccttacagaggaggatctacaaatactggcaaagcaatgacttatgtcagagagaaaatatttgtgcctagcaagggatcaagaagcaatgtgccaaaggtcatgattcttatcacggatgggaaatcatcagatgctttcagagatcctgcgataaaactgaggaattcagatgttgaaatctttgcagttggtgtgaaggatgccgttcgctcagaattggaagctattgcctctcctcctgcagagacccatgtgttcacagtggaagattttgatgcttttcagaggatatcttttgaactcacacagtctatctgccttagaattgagcaagaattggcagctataaagaagaaagcttacgtccctccaaaggatcttagtttttcagaagtgacttcttatggtttcaaaaccaactggtctccagctggagaaaatgttttttcatatcacatcacctacaaggaagcggctggggatgatgaggtcactgtggtggagccagcatcgagcaccagtgttgttctcagcagcctgaagccagagaccttgtatttggtcaatgtgactgcggagtatgaggatggcttcagcattcccttagctggagaggagaccaccgaagaagtaaaaggagcacctcgaaacctaaaggtgacagatgagactacagatagtttcaaaattacttggactcaagctccagggagagttttaagatatcgaattatatatagaccagttgctggtggagagagcagagaagttaccaccccacccaatcagaggaggagaacactggagaacttgattccagacacgaaatatgaagtatctgtaattcctgaatatttctcaggacctggtactccattaactggaaatgcagccactgaagaagttagagggaatccaagagacttaagagtttctgaccctacgacgtctactatgaaattatcttggagtggggcaccaggaaaagtgaaacagtatctcgtcacatataccccagtggcagggggtgaaactcaagaggtcactgtgaggggagatacaaccaatacggtgctgcagggattgaaggaagggacacaatacgccttatctgtgacagccttgtatgcgtctggggctggagacgccctctttggtgaaggaacaacacttgaagaacgtggttctcctcaagatttagttactaaagacatcactgacacatcaattggggcttattggacatctgctccaggaatggttcgcggttacagggtctcatggaaatcactttatgatgatgttgacactggagagaaaaatctgcctgaagatgcaattcatacgatgatagaaaatctgcagccagagaccaaatacagaatttcagtatttgccacttacagcagtggagaaggagaacctttgactggagatgccacaactgaattatctcaagattccaaaaccctgaaagtagatgaagaaacagaaaacacaatgagagttacatggaaaccagcaccagggaaagtcgtcaactaccgtgttgtctatcgccctcatgggagagggaagcaaatggttgctaaggtgccccccacagtcacttcgacagtgttaaagcgacttcagccacagaccacatatgacatcacagttcttcctatttacaagatgggagaaggaaagcttaggcaaggatcaggaacaacagcttctcggtttaagtctcctagaaacctcaaaacatctgacccaaccatgtcaagcttccgagtgacttgggagcctgcccctggggaagtgaagggttataaagtcacattccaccctacgggggatgacagaagactgggggagttagtggttggaccctatgacaacacagttgttttggaggaacttagggctggtaccacctataaagtaaatgtttttggaatgtttgatggaggagaaagctcaccacttgttggacaagaaatgacaaccctttccgacacaactgttatgccaattttatcttctgggatggagtgtctcaccagagctgaggcagacattgtgttgctggtggatggatcatggagcatcggccgggcaaattttagaaccgtgaggagtttcatttctcgtattgtggaagtctttgacattggccccaaaagagtacaaattgctcttgctcagtatagtggggatcccagaacagagtggcagttaaatgcacacagagacaagaagagcttgttgcaagctgtggcaaacttgccgtacaaaggaggcaatactctcacaggcatggctttgaatttcattcgccaacagaacttcaggacccaagctggcatgagacctcgagctcgaaaaattggtgtgctcattactgatggaaaatcacaagacgatgttgaagcaccttcaaagaaactcaaggatgagggagtggagctgtttgctattggtattaaaaatgctgatgaagtcgaattaaagatgattgcaactgatcctgatgatacccatgcatacaatgtggcagattttgagtcactctccaggatagtggatgatctcaccattaatttgtgtaacagtgtcaaaggtccaggtgatttggaagcaccttctaacttagttatttctgagcgaacccatcgttcttttagagtgagctggacaccaccttctgacagtgtggatcgatataaggtggaatactatccagtttctggagggaaacgtcaagaattttatgtgagtcgaatggaaactagcacagtgctgaaagatctgaaacctgaaactgaatatgttgtcaatgtgtattctgtggtagaagatgaatatagtgagcctctgaaggggacagaaaaaaccttgccagtgcctgtagtcagcctgaatatttatgatgttggccctaccaccatgcatgtgcagtggcagcctgtgggaggagctactggctacatcttgtcatacaaacctgttaaggacacagagccaacaagacccaaagaggtgcgtttggggccaacagtgaatgacatgcagctgactgaccttgttcccaacacggagtatgcagtcacagtccaggctgtcctgcacgacctcactagtgaacctgtcactgttcgggaagtcaccttgcctttacccagacctcaggatctgaaactcagagatgtgactcacagcactatgaatgtcttttgggaacctgtgcctggaaaagtgcgtaaatatattgttcgatacaaaacaccagaagaggatgtcaaagaggtagaggtggacagatcagagaccagcacttccctcaaagacctcttctcacagaccttgtacacagtcagcgtttctgcagtacatgacgagggggagtctcctccagtgactgctcaagaaactacccgacccgtgccagccccaacaaacttaaagattactgaagtaacatcagagggtttcagagggacttgggatcatggagcttcagatgtgtctctctacagaataacttgggcaccttttggaagctcagataagatggagaccatcttaaatggagatgaaaacactttggtgttcgaaaacctgaaccccaacaccatctatgaagtttccattactgccatctatcctgatgagtcagaaagtgatgacctgattggcagtgagcgcacactgcctatcttaacaacacaagctcccaaaagtggcccacgaaaccttcaagtgtacaatgcaacatctaacagcctgactgttaagtgggatcctgctagtggtcgtgtgcagaaatataggatcacttatcagccttccacaggggaaggcaatgagcaaacgaccacaataggaggacggcagaacagtgtggtcctgcagaaactgaagccagacactccttacactatcaccgtatcctctctgtatcctgatggtgaaggaggtcggatgacgggaagaggcaagaccaaacctctaaacactgtaaggaacctgagagtgtatgacccttctaccagcaccttgaatgtccgctgggaccatgcagagggaaatcctcgtcagtacaagctcttctatgcaccagcagcaggtggtccagaggaactggtaccaatccccgggaataccaattatgccattcttaggaatctgcagccagatacctcatacactgtgactgtagttcccgtttatactgaaggtgatgggggacgcacatcagatactggaaggacattgatgagaggactggcaagaaatgtccaagtatacaatcctacacctaacagcctcgatgttcgctgggaccctgctccaggacctgtgctgcaatatcgcgttgtgtattctcctgtggatggcacaagaccctcagaatctatagtagtgccaggaaacacgcgcatggtgcatctggagcggctgattccggacacactctattccgtgaaccttgtggctctgtactcggatggagagggaaatcccagccctgcccagggccgaacgctaccacgcagtggaccaaggaacctgagagtctttggtgaaacaaccaatagcctctcggtagcctgggatcatgctgatgggccagttcagcagtacaggatcatctattctcccactgttggtgatccaattgatgaatataccacagtcccaggcagaagaaacaatgtaatactgcagcccctgcaacctgacactccatataaaattactgttattgctgtttatgaagatggagatggtggccatctaacaggaaatggaagaactgtgggactccttcctcctcagaacatacacatctctgacgaatggtatacaagattcagggtgtcctgggatccttcaccttctccagttcttggatataaaatagtatataagccagtgggttccaatgagcccatggaagcctttgttggagaaatgacatcatataccttacacaatctcaatcccagcaccacctacgatgtgaatgtttatgctcaatatgattctggactcagtgtccccttgacagatcaaggcactacattatatttaaatgtaacagatctgaaaacttaccagattgggtgggatacattctgtgtcaaatggtcacctcaccgggcagccacctcctacaggctaaaactaagccctgcagatggaacaaggggacaagaaattacagtgcgtggatcagaaaccagtcactgcttcactggcctttcaccagacactgattatggtgtcactgtttttgtgcagacaccaaatctcgagggaccaggagtctctgttaaagaacataccactgtgaaaccaacagaagcccctacagagccacccacacctcctccccctcccaccattccaccagcccgggatgtatgcaaaggggccaaggcagatattgtgttcttgactgatgcctcctggagcattggggacgataattttaacaaagttgtaaaattcatcttcaatactgtgggaggctttgatgaaatcagtcctgctgggattcaggtttcatttgtgcaatacagcgatgaggtcaagtctgagttcaagctgaacacgtacaatgacaaggccctagcccttggggccctccagaatattaggtacagaggaggaaacacaagaacaggcaaggccctcacgtttatcaaggagaaagtcttgacttgggagagcggcatgaggaagaatgtccctaaggtgttggttgtggtcacggacggtcggtcccaggatgaggtcaagaaggcggctttggtcatccagcagtcagggttcagtgtctttgtagttggtgtggctgatgtcgactacaatgagcttgccaacattgccagcaaaccaagtgaacggcacgtgttcattgtggacgactttgaatcttttgagaagatcgaagacaatcttattacatttgtttgtgaaactgccacttcaagttgtcctctcatttatttggatggctacacctcaccaggttttaaaatgcttgaagcatacaacctgacagaaaagaattttgcttctgtacaaggagtatctttggagtcagggtctttccccagctactcagcatacaggattcagaagaatgcgtttgtgaatcagcctacagcagacctacacccaaatggactccctccttcatacacgattatattattattcagacttctcccagaaactcccagtgacccttttgcaatttggcaaatcacagacagagactacaaaccacaagttggagtgattgcagatccttctagcaagacgttatcattctttaacaaggatacaagaggcgaggtgcaaactgttacatttgacacagaagaagtaaagacattattttatggaagttttcacaaggttcatattgtagtgacctcaaaaagtgttaagatttacattgactgctatgaaattatagaaaaagacatcaaggaagctggaaatataacaactgatggttatgaaattcttggaaaactccttaaaggggaaaggaaatcagccgcattccaaatccagagttttgacattgtctgcagtccagtgtggaccagtagagacagatgctgtgatattccctctaggagagatgagggaaaatgccctgcttttccaaattcttgcacatgtacacaggacagcgttggacctccaggacctccaggccctgcaggaggacctggtgctaaaggtcccagaggtgaaagaggtatcagtggggcaattgggccccctggtcctcgtggagacataggtcctccaggcccccagggtcctccaggccctcagggacccaatggactctctattccgggagagcaaggtcgccaagggatgaaaggtgatgctggagagccaggacttccaggccgaacaggaaccccaggattacctggcccaccaggaccaatgggacctccaggagacagaggcttcactggaaaagacggtgcaatgggacccaggggcccaccagggccgccgggaagcccaggctccccaggagtcacaggaccaagtgggaagccaggaaaacctggagatcatggcagaccaggtccatctgggttgaaaggagaaaaaggtgataggggagacattgcttcccagaacatgatgcgagcagttgcaagacaagtctgtgaacaattgataagtggtcagatgaacagattcaatcagatgctgaatcagattccaaatgattaccagtccagtcgcaaccagccaggcccgccgggtccaccgggacctcctggtagcgcaggagccagaggagaacctgggcctggggggcggccaggcttcccgggcacaccagggatgcagggaccccctggggaacgaggtttgccaggagagaaaggtgaaaggggtactggatcttcaggacctcgggggctgcctggccccccaggtccacaaggagaatccagaacaggtccaccagggtccacaggttcaagaggtccccctggcccccctggccgtcctggaaactcaggtatccgaggacccccaggtcctcctggatactgtgattcttctcagtgtgccagcatcccatacaacgggcaaggctatccaggttccggctaacacattttctaagtcgccagtgctgcttacagtttgaatacatgaaaatcctgtttctgagatgtttgcgcacgtgcttattaggaaatgagtctgtatggaaatctcaccacagataatggttaacgaaccgggtcgacatcacaaaggagggtggagactctttttactaacttgaatgagacaaaagcagtggtgtcagtttataatcctgatgcatttcagtaataatgtagaaaaacattattttaaaaaagttccaacacacagccatgaggagcctcagttttgaaagaggtgcataataaaactactaaccagaggagtctatgccattttaagaaaaacaattaacctggttaaagagaaatgtcttatgtaaataataaactaattgtggcttgtaaatgatttgtatgtgatcctgtcgactaaaatcacttaacaattctacaataagcttctgcatcaaagcctgccgcttgctctatgccggaataacaccaaatggaatctcctcatctcttgcttgttagcgatgtgtctgattcagggcatctgtctttttgttacttttttgtccgtgtcctctcatttgggttttgtaactgcaattttcaaaccaaagtttaaaatcaccttttcttcctgttttgctgtagtcactggtgttcctcacccaccagctgtaactcagtttgtgtgaggtacagccacagaagatgtcatgtactgtatattacctggtgatagttgcttttcaccccccgagttcagtttctaggagccaatgaaacttcccctcacctcctcatctttccaagttgttctttgaattgaggagtttgaaggcataaacagttacttggggatttgcgaaaatcctacttagttactgcgtttacagttctttggcccagtctctgacccttcccaagtatttgtgcaatgattgtgtttactgctggatttttgaaggtttttttttttaagaaagtgccatttcattatttgattatcaccaaattatctggaaataattgggacattgtaacttatctatttatagttatgagattaagactggagtgccatcaccgcgggtgatgatttagcttttgctgtgtgtgtgtgtgtgtgccttccaaatcatgccataattgtaatgttgaatcggacagagccttacgtgcccgagggcggggcctacctgcctgagcgcgagcccttcatcgtgccggtggagcccgagcggacagcggaatacgaggactacggcgcagacgagcctgcagaggagcctcctgagccccaccggcgctggcggcgcgccctgccccacggacccgggcagtgaaccagagatcacgcgccgcgccgcgaggcttgggggaggtgttgaaattctcatttacaggtcagatagagcagtgtacgtcttttctgaggtgtttcttccagcgttgctcatccaggagtaccctttctgattgtagagaaccttgtttctgcaggaagcctagctccaagcacgcagtctgtagacatttttgcctttgcccttgaaatgcttgcaaaatactttgttaacaaaagctgcaaagagagaacatgccgtgtgcctttagttagcacagcgggcagcctcagtgaaactcttaggttaagcagttaagtcctggaacccagagctgctgtgtatttcgagcgggcagtttatcttttgctatacttattttcaattcaattacaccacgattcaaataattcccctcctaaaaccaaaaaggagggaaacgtcaactccattgcaattacttatcttcctcttctatctctgttatacgccggggcatagaatgctcgtatacatctctttaacaaccacaaaccttaagccatgtagatgaagttagtgcatcaacgggatacagttccatattgccttaaacctccttgttttagacacactaacatttataccaaattgcagattattctgcagagagggaattgcatgtttgtgttgtatatttagtatgaacttttttcagaatataatatttcttagttatcaaaagtagttggaaaacatttgcaagactatgaacatagaattgctgcttttatattttaactgcagattgtgaatttcactgccttatattatttatttctgaaacaaaagaggcatttttcaataaaactactgaaaatttga

SEQ ID NO: 4551 - DNA, 5886 bp, Homo sapiens
  source 1..5886: mol_type = unassigned DNA
caccgagcaccagcttctccgacgccgggaagccgctgtcgccgccgctacctctccctgttgccgccgcctcagatctcttcatgccgctgtaagctcggaggccaaggatgcggagtaggcttcccccagcgcttgccgccctgggcgcggccctgctcctgtcttccattgaggcagaagggatggagtgtctcaccagagctgaggcagacattgtgttgctggtggatggatcatggagcatcggccgggcaaattttagaaccgtgaggagtttcatttctcgtattgtggaagtctttgacattggccccaaaagagtacaaattgctcttgctcagtatagtggggatcccagaacagagtggcagttaaatgcacacagagacaagaagagcttgttgcaagctgtggcaaacttgccgtacaaaggaggcaatactctcacaggcatggctttgaatttcattcgccaacagaacttcaggacccaagctggcatgagacctcgagctcgaaaaattggtgtgctcattactgatggaaaatcacaagacgatgttgaagcaccttcaaagaaactcaaggatgagggagtggagctgtttgctattggtattaaaaatgctgatgaagtcgaattaaagatgattgcaactgatcctgatgatacccatgcatacaatgtggcagattttgagtcactctccaggatagtggatgatctcaccattaatttgtgtaacagtgtcaaaggtccaggtgatttggaagcaccttctaacttagttatttctgagcgaacccatcgttcttttagagtgagctggacaccaccttctgacagtgtggatcgatataaggtggaatactatccagtttctggagggaaacgtcaagaattttatgtgagtcgaatggaaactagcacagtgctgaaagatctgaaacctgaaactgaatatgttgtcaatgtgtattctgtggtagaagatgaatatagtgagcctctgaaggggacagaaaaaaccttgccagtgcctgtagtcagcctgaatatttatgatgttggccctaccaccatgcatgtgcagtggcagcctgtgggaggagctactggctacatcttgtcatacaaacctgttaaggacacagagccaacaagacccaaagaggtgcgtttggggccaacagtgaatgacatgcagctgactgaccttgttcccaacacggagtatgcagtcacagtccaggctgtcctgcacgacctcactagtgaacctgtcactgttcgggaagtcaccttgcctttacccagacctcaggatctgaaactcagagatgtgactcacagcactatgaatgtcttttgggaacctgtgcctggaaaagtgcgtaaatatattgttcgatacaaaacaccagaagaggatgtcaaagaggtagaggtggacagatcagagaccagcacttccctcaaagacctcttctcacagaccttgtacacagtcagcgtttctgcagtacatgacgagggggagtctcctccagtgactgctcaagaaactacccgacccgtgccagccccaacaaacttaaagattactgaagtaacatcagagggtttcagagggacttgggatcatggagcttcagatgtgtctctctacagaataacttgggcaccttttggaagctcagataagatggagaccatcttaaatggagatgaaaacactttggtgttcgaaaacctgaaccccaacaccatctatgaagtttccattactgccatctatcctgatgagtcagaaagtgatgacctgattggcagtgagcgcacactgcctatcttaacaacacaagctcccaaaagtggcccacgaaaccttcaagtgtacaatgcaacatctaacagcctgactgttaagtgggatcctgctagtggtcgtgtgcagaaatataggatcacttatcagccttccacaggggaaggcaatgagcaaacgaccacaataggaggacggcagaacagtgtggtcctgcagaaactgaagccagacactccttacactatcaccgtatcctctctgtatcctgatggtgaaggaggtcggatgacgggaagaggcaagaccaaacctctaaacactgtaaggaacctgagagtgtatgacccttctaccagcaccttgaatgtccgctgggaccatgcagagggaaatcctcgtcagtacaagctcttctatgcaccagcagcaggtggtccagaggaactggtaccaatccccgggaataccaattatgccattcttaggaatctgcagccagatacctcatacactgtgactgtagttcccgtttatactgaaggtgatgggggacgcacatcagatactggaaggacattgatgagaggactggcaagaaatgtccaagtatacaatcctacacctaacagcctcgatgttcgctgggaccctgctccaggacctgtgctgcaatatcgcgttgtgtattctcctgtggatggcacaagaccctcagaatctatagtagtgccaggaaacacgcgcatggtgcatctggagcggctgattccggacacactctattccgtgaaccttgtggctctgtactcggatggagagggaaatcccagccctgcccagggccgaacgctaccacgcagtggaccaaggaacctgagagtctttggtgaaacaaccaatagcctctcggtagcctgggatcatgctgatgggccagttcagcagtacaggatcatctattctcccactgttggtgatccaattgatgaatataccacagtcccaggcagaagaaacaatgtaatactgcagcccctgcaacctgacactccatataaaattactgttattgctgtttatgaagatggagatggtggccatctaacaggaaatggaagaactgtgggactccttcctcctcagaacatacacatctctgacgaatggtatacaagattcagggtgtcctgggatccttcaccttctccagttcttggatataaaatagtatataagccagtgggttccaatgagcccatggaagcctttgttggagaaatgacatcatataccttacacaatctcaatcccagcaccacctacgatgtgaatgtttatgctcaatatgattctggactcagtgtccccttgacagatcaaggcactacattatatttaaatgtaacagatctgaaaacttaccagattgggtgggatacattctgtgtcaaatggtcacctcaccgggcagccacctcctacaggctaaaactaagccctgcagatggaacaaggggacaagaaattacagtgcgtggatcagaaaccagtcactgcttcactggcctttcaccagacactgattatggtgtcactgtttttgtgcagacaccaaatctcgagggaccaggagtctctgttaaagaacataccactgtgaaaccaacagaagcccctacagagccacccacacctcctccccctcccaccattccaccagcccgggatgtatgcaaaggggccaaggcagatattgtgttcttgactgatgcctcctggagcattggggacgataattttaacaaagttgtaaaattcatcttcaatactgtgggaggctttgatgaaatcagtcctgctgggattcaggtttcatttgtgcaatacagcgatgaggtcaagtctgagttcaagctgaacacgtacaatgacaaggccctagcccttggggccctccagaatattaggtacagaggaggaaacacaagaacaggcaaggccctcacgtttatcaaggagaaagtcttgacttgggagagcggcatgaggaagaatgtccctaaggtgttggttgtggtcacggacggtcggtcccaggatgaggtcaagaaggcggctttggtcatccagcagtcagggttcagtgtctttgtagttggtgtggctgatgtcgactacaatgagcttgccaacattgccagcaaaccaagtgaacggcacgtgttcattgtggacgactttgaatcttttgagaagatcgaagacaatcttattacatttgtttgtgaaactgccacttcaagttgtcctctcatttatttggatggctacacctcaccaggttttaaaatgcttgaagcatacaacctgacagaaaagaattttgcttctgtacaaggagtatctttggagtcagggtctttccccagctactcagcatacaggattcagaagaatgcgtttgtgaatcagcctacagcagacctacacccaaatggactccctccttcatacacgattatattattattcagacttctcccagaaactcccagtgacccttttgcaatttggcaaatcacagacagagactacaaaccacaagttggagtgattgcagatccttctagcaagacgttatcattctttaacaaggatacaagaggcgaggtgcaaactgttacatttgacacagaagaagtaaagacattattttatggaagttttcacaaggttcatattgtagtgacctcaaaaagtgttaagatttacattgactgctatgaaattatagaaaaagacatcaaggaagctggaaatataacaactgatggttatgaaattcttggaaaactccttaaaggggaaaggaaatcagccgcattccaaatccagagttttgacattgtctgcagtccagtgtggaccagtagagacagatgctgtgatattccctctaggagagatgagggaaaatgccctgcttttccaaattcttgcacatgtacacaggacagcgttggacctccaggacctccaggccctgcaggaggacctggtgctaaaggtcccagaggtgaaagaggtatcagtggggcaattgggccccctggtcctcgtggagacataggtcctccaggcccccagggtcctccaggccctcagggacccaatggactctctattccgggagagcaaggtcgccaagggatgaaaggtgatgctggagagccaggacttccaggccgaacaggaaccccaggattacctggcccaccaggaccaatgggacctccaggagacagaggcttcactggaaaagacggtgcaatgggacccaggggcccaccagggccgccgggaagcccaggctccccaggagtcacaggaccaagtgggaagccaggaaaacctggagatcatggcagaccaggtccatctgggttgaaaggagaaaaaggtgataggggagacattgcttcccagaacatgatgcgagcagttgcaagacaagtctgtgaacaattgataagtggtcagatgaacagattcaatcagatgctgaatcagattccaaatgattaccagtccagtcgcaaccagccaggcccgccgggtccaccgggacctcctggtagcgcaggagccagaggagaacctgggcctggggggcggccaggcttcccgggcacaccagggatgcagggaccccctggggaacgaggtttgccaggagagaaaggtgaaaggggtactggatcttcaggacctcgggggctgcctggccccccaggtccacaaggagaatccagaacaggtccaccagggtccacaggttcaagaggtccccctggcccccctggccgtcctggaaactcaggtatccgaggacccccaggtcctcctggatactgtgattcttctcagtgtgccagcatcccatacaacgggcaaggctatccaggttccggctaacacattttctaagtcgccagtgctgcttacagtttgaatacatgaaaatcctgtttctgagatgtttgcgcacgtg

SEQ ID NO: 4552 - DNA, 8964 bp, Homo sapiens
  source 1..8964: mol_type = unassigned DNA
atgcggagtaggcttcccccagcgcttgccgccctgggcgcggccctgctcctgtcttccattgaggcagaagttgacccaccttcagacttgaattttaaaattatagatgaaaatactgttcatatgtcatgggcaaaaccagttgatccaattgtgggttacagaataacggtggaccctacaacggatgggcctactaaagaatttaccctttcagctagtaccactgaaactttattgtcagaacttgtacctgaaacagagtatgtggtgacaataacttcatatgatgaagtagaagaaagtgtaccagttataggacaactaacaattcaaacaggtagttcgacaaagccagtggagaagaaacctggaaaaaccgagatacaaaaatgctctgtcagtgcctggactgatttggttttcctcgtggatggctcttggagtgtgggaagaaataatttcaagtacattttagacttcattgctgctcttgtgtctgcttttgacattggggaagagaagacaagagttggagttgttcaatacagctctgataccaggactgaatttaacttaaatcagtactaccaaagggatgaacttcttgctgcaataaaaaaaattccatataaaggtggcaacacaatgacaggggatgccattgattatttagttaaaaatactttcacggaatctgctggggcaagagttggctttcctaaagtggcaattattattacggatggaaaatcccaggatgaagtggaaattccagcaagagagcttcgtaatgttggagttgaagttttctccttgggcattaaagctgcagatgcaaaagaactcaaacaaattgcctccacaccttcactgaaccatgttttcaatgtggccaactttgatgcaattgtggatattcagaatgagatcatctcccaggtgtgctcaggtgttgatgaacaacttggtgaattggttagtggagaagaagttgttgagcctccttcaaatttgattgccatggaagtctcttcaaaatatgttaagctaaattggaatccatctcctagtccagtgactggctacaaagtcatcctcacaccaatgactgcaggaagccgacagcacgctctgagtgtggggcctcagacaaccacgctcagtgttcgcgacctctcagcagacacagaataccagatcagtgtttccgccatgaagggaatgacatccagtgaacccatttcaataatggagaagactcagccaatgaaagttcaagtggaatgctcacgtggtgtggatataaaagccgatattgtgtttttggttgatggctcctatagcattgggattgcaaactttgttaaagttagagcctttttggaagttcttgtaaaaagttttgaaatttcaccaaatagggtccagattagtcttgtgcaatacagccgggatcctcatactgagttcactttgaaaaaattcaccaaagttgaagatataattgaagcaataaacaccttcccttacagaggaggatctacaaatactggcaaagcaatgacttatgtcagagagaaaatatttgtgcctagcaagggatcaagaagcaatgtgccaaaggtcatgattcttatcacggatgggaaatcatcagatgctttcagagatcctgcgataaaactgaggaattcagatgttgaaatctttgcagttggtgtgaaggatgccgttcgctcagaattggaagctattgcctctcctcctgcagagacccatgtgttcacagtggaagattttgatgcttttcagaggatatcttttgaactcacacagtctatctgccttagaattgagcaagaattggcagctataaagaagaaagcttacgtccctccaaaggatcttagtttttcagaagtgacttcttatggtttcaaaaccaactggtctccagctggagaaaatgttttttcatatcacatcacctacaaggaagcggctggggatgatgaggtcactgtggtggagccagcatcgagcaccagtgttgttctcagcagcctgaagccagagaccttgtatttggtcaatgtgactgcggagtatgaggatggcttcagcattcccttagctggagaggagaccaccgaagaagtaaaaggagcacctcgaaacctaaaggtgacagatgagactacagatagtttcaaaattacttggactcaagctccagggagagttttaagatatcgaattatatatagaccagttgctggtggagagagcagagaagttaccaccccacccaatcagaggaggagaacactggagaacttgattccagacacgaaatatgaagtatctgtaattcctgaatatttctcaggacctggtactccattaactggaaatgcagccactgaagaagttagagggaatccaagagacttaagagtttctgaccctacgacgtctactatgaaattatcttggagtggggcaccaggaaaagtgaaacagtatctcgtcacatataccccagtggcagggggtgaaactcaagaggtcactgtgaggggagatacaaccaatacggtgctgcagggattgaaggaagggacacaatacgccttatctgtgacagccttgtatgcgtctggggctggagacgccctctttggtgaaggaacaacacttgaagaacgtggttctcctcaagatttagttactaaagacatcactgacacatcaattggggcttattggacatctgctccaggaatggttcgcggttacagggtctcatggaaatcactttatgatgatgttgacactggagagaaaaatctgcctgaagatgcaattcatacgatgatagaaaatctgcagccagagaccaaatacagaatttcagtatttgccacttacagcagtggagaaggagaacctttgactggagatgccacaactgaattatctcaagattccaaaaccctgaaagtagatgaagaaacagaaaacacaatgagagttacatggaaaccagcaccagggaaagtcgtcaactaccgtgttgtctatcgccctcatgggagagggaagcaaatggttgctaaggtgccccccacagtcacttcgacagtgttaaagcgacttcagccacagaccacatatgacatcacagttcttcctatttacaagatgggagaaggaaagcttaggcaaggatcaggaacaacagcttctcggtttaagtctcctagaaacctcaaaacatctgacccaaccatgtcaagcttccgagtgacttgggagcctgcccctggggaagtgaagggttataaagtcacattccaccctacgggggatgacagaagactgggggagttagtggttggaccctatgacaacacagttgttttggaggaacttagggctggtaccacctataaagtaaatgtttttggaatgtttgatggaggagaaagctcaccacttgttggacaagaaatgacaaccctttccgacacaactgttatgccaattttatcttctgggatggagtgtctcaccagagctgaggcagacattgtgttgctggtggatggatcatggagcatcggccgggcaaattttagaaccgtgaggagtttcatttctcgtattgtggaagtctttgacattggccccaaaagagtacaaattgctcttgctcagtatagtggggatcccagaacagagtggcagttaaatgcacacagagacaagaagagcttgttgcaagctgtggcaaacttgccgtacaaaggaggcaatactctcacaggcatggctttgaatttcattcgccaacagaacttcaggacccaagctggcatgagacctcgagctcgaaaaattggtgtgctcattactgatggaaaatcacaagacgatgttgaagcaccttcaaagaaactcaaggatgagggagtggagctgtttgctattggtattaaaaatgctgatgaagtcgaattaaagatgattgcaactgatcctgatgatacccatgcatacaatgtggcagattttgagtcactctccaggatagtggatgatctcaccattaatttgtgtaacagtgtcaaaggtccaggtgatttggaagcaccttctaacttagttatttctgagcgaacccatcgttcttttagagtgagctggacaccaccttctgacagtgtggatcgatataaggtggaatactatccagtttctggagggaaacgtcaagaattttatgtgagtcgaatggaaactagcacagtgctgaaagatctgaaacctgaaactgaatatgttgtcaatgtgtattctgtggtagaagatgaatatagtgagcctctgaaggggacagaaaaaaccttgccagtgcctgtagtcagcctgaatatttatgatgttggccctaccaccatgcatgtgcagtggcagcctgtgggaggagctactggctacatcttgtcatacaaacctgttaaggacacagagccaacaagacccaaagaggtgcgtttggggccaacagtgaatgacatgcagctgactgaccttgttcccaacacggagtatgcagtcacagtccaggctgtcctgcacgacctcactagtgaacctgtcactgttcgggaagtcaccttgcctttacccagacctcaggatctgaaactcagagatgtgactcacagcactatgaatgtcttttgggaacctgtgcctggaaaagtgcgtaaatatattgttcgatacaaaacaccagaagaggatgtcaaagaggtagaggtggacagatcagagaccagcacttccctcaaagacctcttctcacagaccttgtacacagtcagcgtttctgcagtacatgacgagggggagtctcctccagtgactgctcaagaaactacccgacccgtgccagccccaacaaacttaaagattactgaagtaacatcagagggtttcagagggacttgggatcatggagcttcagatgtgtctctctacagaataacttgggcaccttttggaagctcagataagatggagaccatcttaaatggagatgaaaacactttggtgttcgaaaacctgaaccccaacaccatctatgaagtttccattactgccatctatcctgatgagtcagaaagtgatgacctgattggcagtgagcgcacactgcctatcttaacaacacaagctcccaaaagtggcccacgaaaccttcaagtgtacaatgcaacatctaacagcctgactgttaagtgggatcctgctagtggtcgtgtgcagaaatataggatcacttatcagccttccacaggggaaggcaatgagcaaacgaccacaataggaggacggcagaacagtgtggtcctgcagaaactgaagccagacactccttacactatcaccgtatcctctctgtatcctgatggtgaaggaggtcggatgacgggaagaggcaagaccaaacctctaaacactgtaaggaacctgagagtgtatgacccttctaccagcaccttgaatgtccgctgggaccatgcagagggaaatcctcgtcagtacaagctcttctatgcaccagcagcaggtggtccagaggaactggtaccaatccccgggaataccaattatgccattcttaggaatctgcagccagatacctcatacactgtgactgtagttcccgtttatactgaaggtgatgggggacgcacatcagatactggaaggacattgatgagaggactggcaagaaatgtccaagtatacaatcctacacctaacagcctcgatgttcgctgggaccctgctccaggacctgtgctgcaatatcgcgttgtgtattctcctgtggatggcacaagaccctcagaatctatagtagtgccaggaaacacgcgcatggtgcatctggagcggctgattccggacacactctattccgtgaaccttgtggctctgtactcggatggagagggaaatcccagccctgcccagggccgaacgctaccacgcagtggaccaaggaacctgagagtctttggtgaaacaaccaatagcctctcggtagcctgggatcatgctgatgggccagttcagcagtacaggatcatctattctcccactgttggtgatccaattgatgaatataccacagtcccaggcagaagaaacaatgtaatactgcagcccctgcaacctgacactccatataaaattactgttattgctgtttatgaagatggagatggtggccatctaacaggaaatggaagaactgtgggactccttcctcctcagaacatacacatctctgacgaatggtatacaagattcagggtgtcctgggatccttcaccttctccagttcttggatataaaatagtatataagccagtgggttccaatgagcccatggaagcctttgttggagaaatgacatcatataccttacacaatctcaatcccagcaccacctacgatgtgaatgtttatgctcaatatgattctggactcagtgtccccttgacagatcaaggcactacattatatttaaatgtaacagatctgaaaacttaccagattgggtgggatacattctgtgtcaaatggtcacctcaccgggcagccacctcctacaggctaaaactaagccctgcagatggaacaaggggacaagaaattacagtgcgtggatcagaaaccagtcactgcttcactggcctttcaccagacactgattatggtgtcactgtttttgtgcagacaccaaatctcgagggaccaggagtctctgttaaagaacataccactgtgaaaccaacagaagcccctacagagccacccacacctcctccccctcccaccattccaccagcccgggatgtatgcaaaggggccaaggcagatattgtgttcttgactgatgcctcctggagcattggggacgataattttaacaaagttgtaaaattcatcttcaatactgtgggaggctttgatgaaatcagtcctgctgggattcaggtttcatttgtgcaatacagcgatgaggtcaagtctgagttcaagctgaacacgtacaatgacaaggccctagcccttggggccctccagaatattaggtacagaggaggaaacacaagaacaggcaaggccctcacgtttatcaaggagaaagtcttgacttgggagagcggcatgaggaagaatgtccctaaggtgttggttgtggtcacggacggtcggtcccaggatgaggtcaagaaggcggctttggtcatccagcagtcagggttcagtgtctttgtagttggtgtggctgatgtcgactacaatgagcttgccaacattgccagcaaaccaagtgaacggcacgtgttcattgtggacgactttgaatcttttgagaagatcgaagacaatcttattacatttgtttgtgaaactgccacttcaagttgtcctctcatttatttggatggctacacctcaccaggttttaaaatgcttgaagcatacaacctgacagaaaagaattttgcttctgtacaaggagtatctttggagtcagggtctttccccagctactcagcatacaggattcagaagaatgcgtttgtgaatcagcctacagcagacctacacccaaatggactccctccttcatacacgattatattattattcagacttctcccagaaactcccagtgacccttttgcaatttggcaaatcacagacagagactacaaaccacaagttggagtgattgcagatccttctagcaagacgttatcattctttaacaaggatacaagaggcgaggtgcaaactgttacatttgacacagaagaagtaaagacattattttatggaagttttcacaagagagatgagggaaaatgccctgcttttccaaattcttgcacatgtacacaggacagcgttggacctccaggacctccaggccctgcaggaggacctggtgctaaaggtcccagaggtgaaagaggtatcagtggggcaattgggccccctggtcctcgtggagacataggtcctccaggcccccagggtcctccaggccctcagggacccaatggactctctattccgggagagcaaggtcgccaagggatgaaaggtgatgctggagagccaggacttccaggccgaacaggaaccccaggattacctggcccaccaggaccaatgggacctccaggagacagaggcttcactggaaaagacggtgcaatgggacccaggggcccaccagggccgccgggaagcccaggctccccaggagtcacaggaccaagtgggaagccaggaaaacctggagatcatggcagaccaggtccatctgggttgaaaggagaaaaaggtgataggggagacattgcttcccagaacatgatgcgagcagttgcaagacaagtctgtgaacaattgataagtggtcagatgaacagattcaatcagatgctgaatcagattccaaatgattaccagtccagtcgcaaccagccaggcccgccgggtccaccgggacctcctggtagcgcaggagccagaggagaacctgggcctggggggcggccaggcttcccgggcacaccagggatgcagggaccccctggggaacgaggtttgccaggagagaaaggtgaaaggggtactggatcttcaggacctcgggggctgcctggccccccaggtccacaaggagaatccagaacaggtccaccagggtccacaggttcaagaggtccccctggcccccctggccgtcctggaaactcaggtatccgaggacccccaggtcctcctggatactgtgattcttctcagtgtgccagcatcccatacaacgggcaaggctatccaggttccggctaa

SEQ ID NO: 4553 - DNA, 9637 bp, Homo sapiens
  source 1..9637: mol_type = unassigned DNA; mol_type = unassigned DNA
aagccgctgtcgccgccgctacctctccctgttgccgccgcctcagatctcttcatgccgctgtaagctcggaggccaaggatgcggagtaggcttcccccagcgcttgccgccctgggcgcggccctgctcctgtcttccattgaggcagaagttgacccaccttcagacttgaattttaaaattatagatgaaaatactgttcatatgtcatgggcaaaaccagttgatccaattgtgggttacagaataacggtggaccctacaacggatgggcctactaaagaatttaccctttcagctagtaccactgaaactttattgtcagaacttgtacctgaaacagagtatgtggtgacaataacttcatatgatgaagtagaagaaagtgtaccagttataggacaactaacaattcaaacaggtagttcgacaaagccagtggagaagaaacctggaaaaaccgagatacaaaaatgctctgtcagtgcctggactgatttggttttcctcgtggatggctcttggagtgtgggaagaaataatttcaagtacattttagacttcattgctgctcttgtgtctgcttttgacattggggaagagaagacaagagttggagttgttcaatacagctctgataccaggactgaatttaacttaaatcagtactaccaaagggatgaacttcttgctgcaataaaaaaaattccatataaaggtggcaacacaatgacaggggatgccattgattatttagttaaaaatactttcacggaatctgctggggcaagagttggctttcctaaagtggcaattattattacggatggaaaatcccaggatgaagtggaaattccagcaagagagcttcgtaatgttggagttgaagttttctccttgggcattaaagctgcagatgcaaaagaactcaaacaaattgcctccacaccttcactgaaccatgttttcaatgtggccaactttgatgcaattgtggatattcagaatgagatcatctcccaggtgtgctcaggtgttgatgaacaacttggtgaattggttagtggagaagaagttgttgagcctccttcaaatttgattgccatggaagtctcttcaaaatatgttaagctaaattggaatccatctcctagtccagtgactggctacaaagtcatcctcacaccaatgactgcaggaagccgacagcacgctctgagtgtggggcctcagacaaccacgctcagtgttcgcgacctctcagcagacacagaataccagatcagtgtttccgccatgaagggaatgacatccagtgaacccatttcaataatggagaagactcagccaatgaaagttcaagtggaatgctcacgtggtgtggatataaaagccgatattgtgtttttggttgatggctcctatagcattgggattgcaaactttgttaaagttagagcctttttggaagttcttgtaaaaagttttgaaatttcaccaaatagggtccagattagtcttgtgcaatacagccgggatcctcatactgagttcactttgaaaaaattcaccaaagttgaagatataattgaagcaataaacaccttcccttacagaggaggatctacaaatactggcaaagcaatgacttatgtcagagagaaaatatttgtgcctagcaagggatcaagaagcaatgtgccaaaggtcatgattcttatcacggatgggaaatcatcagatgctttcagagatcctgcgataaaactgaggaattcagatgttgaaatctttgcagttggtgtgaaggatgccgttcgctcagaattggaagctattgcctctcctcctgcagagacccatgtgttcacagtggaagattttgatgcttttcagaggatatcttttgaactcacacagtctatctgccttagaattgagcaagaattggcagctataaagaagaaagcttacgtccctccaaaggatcttagtttttcagaagtgacttcttatggtttcaaaaccaactggtctccagctggagaaaatgttttttcatatcacatcacctacaaggaagcggctggggatgatgaggtcactgtggtggagccagcatcgagcaccagtgttgttctcagcagcctgaagccagagaccttgtatttggtcaatgtgactgcggagtatgaggatggcttcagcattcccttagctggagaggagaccaccgaagaagtaaaaggagcacctcgaaacctaaaggtgacagatgagactacagatagtttcaaaattacttggactcaagctccagggagagttttaagatatcgaattatatatagaccagttgctggtggagagagcagagaagttaccaccccacccaatcagaggaggagaacactggagaacttgattccagacacgaaatatgaagtatctgtaattcctgaatatttctcaggacctggtactccattaactggaaatgcagccactgaagaagttagagggaatccaagagacttaagagtttctgaccctacgacgtctactatgaaattatcttggagtggggcaccaggaaaagtgaaacagtatctcgtcacatataccccagtggcagggggtgaaactcaagaggtcactgtgaggggagatacaaccaatacggtgctgcagggattgaaggaagggacacaatacgccttatctgtgacagccttgtatgcgtctggggctggagacgccctctttggtgaaggaacaacacttgaagaacgtggttctcctcaagatttagttactaaagacatcactgacacatcaattggggcttattggacatctgctccaggaatggttcgcggttacagggtctcatggaaatcactttatgatgatgttgacactggagagaaaaatctgcctgaagatgcaattcatacgatgatagaaaatctgcagccagagaccaaatacagaatttcagtatttgccacttacagcagtggagaaggagaacctttgactggagatgccacaactgaattatctcaagattccaaaaccctgaaagtagatgaagaaacagaaaacacaatgagagttacatggaaaccagcaccagggaaagtcgtcaactaccgtgttgtctatcgccctcatgggagagggaagcaaatggttgctaaggtgccccccacagtcacttcgacagtgttaaagcgacttcagccacagaccacatatgacatcacagttcttcctatttacaagatgggagaaggaaagcttaggcaaggatcaggaacaacagcttctcggtttaagtctcctagaaacctcaaaacatctgacccaaccatgtcaagcttccgagtgacttgggagcctgcccctggggaagtgaagggttataaagtcacattccaccctacgggggatgacagaagactgggggagttagtggttggaccctatgacaacacagttgttttggaggaacttagggctggtaccacctataaagtaaatgtttttggaatgtttgatggaggagaaagctcaccacttgttggacaagaaatgacaaccctttccgacacaactgttatgccaattttatcttctgggatggagtgtctcaccagagctgaggcagacattgtgttgctggtggatggatcatggagcatcggccgggcaaattttagaaccgtgaggagtttcatttctcgtattgtggaagtctttgacattggccccaaaagagtacaaattgctcttgctcagtatagtggggatcccagaacagagtggcagttaaatgcacacagagacaagaagagcttgttgcaagctgtggcaaacttgccgtacaaaggaggcaatactctcacaggcatggctttgaatttcattcgccaacagaacttcaggacccaagctggcatgagacctcgagctcgaaaaattggtgtgctcattactgatggaaaatcacaagacgatgttgaagcaccttcaaagaaactcaaggatgagggagtggagctgtttgctattggtattaaaaatgctgatgaagtcgaattaaagatgattgcaactgatcctgatgatacccatgcatacaatgtggcagattttgagtcactctccaggatagtggatgatctcaccattaatttgtgtaacagtgtcaaaggtccaggtgatttggaagcaccttctaacttagttatttctgagcgaacccatcgttcttttagagtgagctggacaccaccttctgacagtgtggatcgatataaggtggaatactatccagtttctggagggaaacgtcaagaattttatgtgagtcgaatggaaactagcacagtgctgaaagatctgaaacctgaaactgaatatgttgtcaatgtgtattctgtggtagaagatgaatatagtgagcctctgaaggggacagaaaaaaccttgccagtgcctgtagtcagcctgaatatttatgatgttggccctaccaccatgcatgtgcagtggcagcctgtgggaggagctactggctacatcttgtcatacaaacctgttaaggacacagagccaacaagacccaaagaggtgcgtttggggccaacagtgaatgacatgcagctgactgaccttgttcccaacacggagtatgcagtcacagtccaggctgtcctgcacgacctcactagtgaacctgtcactgttcgggaagtcaccttgcctttacccagacctcaggatctgaaactcagagatgtgactcacagcactatgaatgtcttttgggaacctgtgcctggaaaagtgcgtaaatatattgttcgatacaaaacaccagaagaggatgtcaaagaggtagaggtggacagatcagagaccagcacttccctcaaagacctcttctcacagaccttgtacacagtcagcgtttctgcagtacatgacgagggggagtctcctccagtgactgctcaagaaactacccgacccgtgccagccccaacaaacttaaagattactgaagtaacatcagagggtttcagagggacttgggatcatggagcttcagatgtgtctctctacagaataacttgggcaccttttggaagctcagataagatggagaccatcttaaatggagatgaaaacactttggtgttcgaaaacctgaaccccaacaccatctatgaagtttccattactgccatctatcctgatgagtcagaaagtgatgacctgattggcagtgagcgcacactgcctatcttaacaacacaagctcccaaaagtggcccacgaaaccttcaagtgtacaatgcaacatctaacagcctgactgttaagtgggatcctgctagtggtcgtgtgcagaaatataggatcacttatcagccttccacaggggaaggcaatgagcaaacgaccacaataggaggacggcagaacagtgtggtcctgcagaaactgaagccagacactccttacactatcaccgtatcctctctgtatcctgatggtgaaggaggtcggatgacgggaagaggcaagaccaaacctctaaacactgtaaggaacctgagagtgtatgacccttctaccagcaccttgaatgtccgctgggaccatgcagagggaaatcctcgtcagtacaagctcttctatgcaccagcagcaggtggtccagaggaactggtaccaatccccgggaataccaattatgccattcttaggaatctgcagccagatacctcatacactgtgactgtagttcccgtttatactgaaggtgatgggggacgcacatcagatactggaaggacattgatgagaggactggcaagaaatgtccaagtatacaatcctacacctaacagcctcgatgttcgctgggaccctgctccaggacctgtgctgcaatatcgcgttgtgtattctcctgtggatggcacaagaccctcagaatctatagtagtgccaggaaacacgcgcatggtgcatctggagcggctgattccggacacactctattccgtgaaccttgtggctctgtactcggatggagagggaaatcccagccctgcccagggccgaacgctaccacgcagtggaccaaggaacctgagagtctttggtgaaacaaccaatagcctctcggtagcctgggatcatgctgatgggccagttcagcagtacaggatcatctattctcccactgttggtgatccaattgatgaatataccacagtcccaggcagaagaaacaatgtaatactgcagcccctgcaacctgacactccatataaaattactgttattgctgtttatgaagatggagatggtggccatctaacaggaaatggaagaactgtgggactccttcctcctcagaacatacacatctctgacgaatggtatacaagattcagggtgtcctgggatccttcaccttctccagttcttggatataaaatagtatataagccagtgggttccaatgagcccatggaagcctttgttggagaaatgacatcatataccttacacaatctcaatcccagcaccacctacgatgtgaatgtttatgctcaatatgattctggactcagtgtccccttgacagatcaaggcactacattatatttaaatgtaacagatctgaaaacttaccagattgggtgggatacattctgtgtcaaatggtcacctcaccgggcagccacctcctacaggctaaaactaagccctgcagatggaacaaggggacaagaaattacagtgcgtggatcagaaaccagtcactgcttcactggcctttcaccagacactgattatggtgtcactgtttttgtgcagacaccaaatctcgagggaccaggagtctctgttaaagaacataccactgtgaaaccaacagaagcccctacagagccacccacacctcctccccctcccaccattccaccagcccgggatgtatgcaaaggggccaaggcagatattgtgttcttgactgatgcctcctggagcattggggacgataattttaacaaagttgtaaaattcatcttcaatactgtgggaggctttgatgaaatcagtcctgctgggattcaggtttcatttgtgcaatacagcgatgaggtcaagtctgagttcaagctgaacacgtacaatgacaaggccctagcccttggggccctccagaatattaggtacagaggaggaaacacaagaacaggcaaggccctcacgtttatcaaggagaaagtcttgacttgggagagcggcatgaggaagaatgtccctaaggtgttggttgtggtcacggacggtcggtcccaggatgaggtcaagaaggcggctttggtcatccagcagtcagggttcagtgtctttgtagttggtgtggctgatgtcgactacaatgagcttgccaacattgccagcaaaccaagtgaacggcacgtgttcattgtggacgactttgaatcttttgagaagatcgaagacaatcttattacatttgtttgtgaaactgccacttcaagttgtcctctcatttatttggatggctacacctcaccaggttttaaaatgcttgaagcatacaacctgacagaaaagaattttgcttctgtacaaggagtatctttggagtcagggtctttccccagctactcagcatacaggattcagaagaatgcgtttgtgaatcagcctacagcagacctacacccaaatggactccctccttcatacacgattatattattattcagacttctcccagaaactcccagtgacccttttgcaatttggcaaatcacagacagagactacaaaccacaagttggagtgattgcagatccttctagcaagacgttatcattctttaacaaggatacaagaggcgaggtgcaaactgttacatttgacacagaagaagtaaagacattattttatggaagttttcacaaggttcatattgtagtgacctcaaaaagtgttaagatttacattgactgctatgaaattatagaaaaagacatcaaggaagctggaaatataacaactgatggttatgaaattcttggaaaactccttaaaggggaaaggaaatcagccgcattccaaatccagagttttgacattgtctgcagtccagtgtggaccagtagagacagatgctgtgatattccctctaggagagatgagggaaaatgccctgcttttccaaattcttgcacatgtacacaggacagcgttggacctccaggacctccaggccctgcaggaggacctggtgctaaaggtcccagaggtgaaagaggtatcagtggggcaattgggccccctggtcctcgtggagacataggtcctccaggcccccagggtcctccaggccctcagggacccaatggactctctattccgggagagcaaggtcgccaagggatgaaaggtgatgctggagagccaggacttccaggccgaacaggaaccccaggattacctggcccaccaggaccaatgggacctccaggagacagaggcttcactggaaaagacggtgcaatgggacccaggggcccaccaggcccaggctccccaggagtcacaggaccaagtgggaagccaggaaaacctggagatcatggcagaccaggtccatctgggttgaaaggagaaaaaggtgataggggagacattgcttcccagaacatgatgcgagcagttgcaagacaagtctgtgaacaattgataagtggtcagatgaacagattcaatcagatgctgaatcagattccaaatgattaccagtccagtcgcaaccagccaggcccgccgggtccaccgggacctcctggtagcgcaggagccagaggagaacctgggcctggggggcggccaggcttcccgggcacaccagggatgcagggaccccctggggaacgaggtttgccaggagagaaaggtgaaaggggtactggatcttcaggacctcgggggctgcctggccccccaggtccacaaggagaatccagaacaggtccaccagggtccacaggttcaagaggtccccctggcccccctggccgtcctggaaactcaggtatccgaggacccccaggtcctcctggatactgtgattcttctcagtgtgccagcatcccatacaacgggcaaggctatccaggtacgttgttgccattgtaggaaccccaactcacctgaagtaaagaactttacggaaatgaagttccttaggattgaaggaaggctgatttgaagatgtcttgaagataacaactctttcagttctgattatataataatagtgtttgctatcatagcacacaacattatttcactgttaggattgaattattttcttttttccccatgtttctgcatttaccaaatcacatcataaacctccccttacttctcttgggacttcaaagcatgctagtaattgactttttttttttcttttccccaagattgggaacagggatttgttaaatacaactgtaaaatgccaagaatatgtatttaaaaattgttttgggaatctaattta

SEQ ID NO: 4554 - DNA, 571 bp, Homo sapiens
  source 1..571: mol_type = unassigned DNA
aaagcagaagcctggatatgtgtttcacctcatttccatttcataccctggtcttaaccttcaagttggtgctattcaattcagggaaccccaggattacctggcccaccaggaccaatgggacctccaggagacagaggcttcactggaaaagacggtgcaatgggacccaggggcccaccagggccgccgggaagcccaggctccccaggagtcacaggaccaagtgggaagccaggaaaacctggagatcatggcagaccaggtccatctgggttgaaaggagaaaaaggtgataggggagacattgcttcccagaacatgatgcgagcagttgcaagacaagtctgtgaacaattgataagtggtcagatgaacagattcaatcagatgctgaatcagattccaaatgattaccagtccagtcgcaaccagccaggcccgccgggtccaccgggacctcctggtagcgcaggagccagaggagaacctgggcctggggggcggccaggcttcccgggcacaccagggatgcagggaccccctggggaacgaggtttgccaggagaga

SEQ ID NO: 4555 - DNA, 794 bp, Homo sapiens
  source 1..794: mol_type = unassigned DNA
gtcatccagcagtcagggttcagtgtctttgtagttggtgtggctgatgtcgactacaatgagcttgccaacattgccagcaaaccaagtgaacggcacgtgttcattgtggacgactttgaatcttttgagaagatcgaagacaatcttattacatttgtttgtgaaactgccacttcaagttgtcctctcatttatttggatggctacacctcaccaggttttaaaatgcttgaagcatacaacctgacagaaaagaattttgcttctgtacaaggagtatctttggagtcagggtctttccccagctactcagcatacaggattcagaagaatgcgtttgtgaatcagcctacagcagacctacacccaaatggactccctccttcatacacgattatattattattcagacttctcccagaaactcccagtgacccttttgcaatttggcaaatcacagacagagactacaaaccacaagttggagtgattgcagatccttctagcaagacgttatcattctttaacaaggatacaagaggcgaggtgcaaactgttacatttgacacagaagaagtaaagacattattttatggaagttttcacaaggtaaaaacataagattatttgagtcttatttctagaaaaaaatataaaacaaatttattatttattaaaatgtcatgttaaattggcagaattataactatgtcttttaaaaataaaatcttgttttagagaatttggttaattcaaataatatttaaaataaaacaatatactaatcaaga

SEQ ID NO: 4556 - DNA, 1914 bp, Homo sapiens
  source 1..1914: mol_type = unassigned DNA
gaagagcttgttgcaagctgtggcaaacttgccgtacaaaggaggcaatactctcacaggcatggctttgaatttcattcgccaacagaacttcaggacccaagctggcatgagacctcgagctcgaaaaattggtgtgctcattactgatggaaaatcacaagacgatgttgaagcaccttcaaagaaactcaaggatgagggagtggagctgtttgctattggtattaaaaatgctgatgaagtcgaattaaagatgattgcaactgatcctgatgatacccatgcatacaatgtggcagattttgagtcactctccaggatagtggatgatctcaccattaatttgtgtaacagtgtcaaaggtccaggtgatttggaagcaccttctaacttagttatttctgagcgaacccatcgttcttttagagtgagctggacaccaccttctgacagtgtggatcgatataaggtggaatactatccagtttctggagggaaacgtcaagaattttatgtgagtcgaatggaaactagcacagtgctgaaagatctgaaacctgaaactgaatatgttgtcaatgtgtattctgtggtagaagatgaatatagtgagcctctgaaggggacagaaaaaaccttgccagtgcctgtagtcagcctgaatatttatgatgttggccctaccaccatgcatgtgcagtggcagcctgtgggaggagctactggctacatcttgtcatacaaacctgttaaggacacagagccaacaagacccaaagaggtgcgtttggggccaacagtgaatgacatgcagctgactgaccttgttcccaacacggagtatgcagtcacagtccaggctgtcctgcacgacctcactagtgaacctgtcactgttcgggaagtcaccttgcctttacccagacctcaggatctgaaactcagagatgtgactcacagcactatgaatgtcttttgggaacctgtgcctggaaaagtgcgtaaatatattgttcgatacaaaacaccagaagaggatgtcaaagaggtagaggtggacagatcagagaccagcacttccctcaaagacctcttctcacagaccttgtacacagtcagcgtttctgcagtacatgacgagggggagtctcctccagtgactgctcaagaaactacccgacccgtgccagccccaacaaacttaaagattactgaagtaacatcagagggtttcagagggacttgggatcatggagcttcagatgtgtctctctacagaataacttgggcaccttttggaagctcagataagatggagaccatcttaaatggagatgaaaacactttggtgttcgaaaacctgaaccccaacaccatctatgaagtttccattactgccatctatcctgatgagtcagaaagtgatgacctgattggcagtgagcgcacacctcccaaaagtggcccacgaaaccttcaagtgtacaatgcaacatctaacagcctgactgttaagtgggatcctgctagtggtcgtgtgcagaaatataggatcacttatcagccttccacaggggaaggcaatgagcaaacgaccacaataggaggacggcagaacagtgtggtcctgcagaaactgaagccagacactccttacactatcaccgtatcctctctgtatcctgatggtgaaggaggtcggatgacgggaagaggcaagaccaaacctctaaacactgtaaggaacctgagagtgtatgacccttctaccagcaccttgaatgtccgctgggaccatgcagagggaaatcctcgtcagtacaagctcttctatgcaccagcagcaggtggtccagaggaactggtaccaatccccgggaataccaattatgccattcttaggaatctgca

SEQ ID NO: 4557 - DNA, 499 bp, Homo sapiens
  source 1..499: mol_type = unassigned DNA
gaaaggaactagactgatggtctgcttttctgttttggaagtgccagtgcctgtagtcagcctgaatatttatgatgttggccctaccaccatgcatgtgcagtggcagcctgtgggaggagctactggctacatcttgtcatacaaacctgttaaggacacagagccaacaagacccaaagaggtgcgtttggggccaacagtgaatgacatgcagctgactgaccttgttcccaacacggagtatgcagtcacagtccaggctgtcctgcacgacctcactagtgaacctgtcactgttcgggaagtcaccttgcctttacccagacctcaggatctgaaactcagagatgtgactcacagcactatgaatgtcttttgggaacctgtgcctggaaaagtgcgtaaatatattgttcgatacaaaacaccagaagaggatgtcaaagaggtaggttgaagatgatagtagatatgaaaatatttgttttcctagtag

SEQ ID NO: 4558 - DNA, 1554 bp, Homo sapiens
  source 1..1554: mol_type = unassigned DNA
gtggccaactttgatgcaattgtggatattcagaatgagatcatctcccaggtgtgctcaggtgttgatgaacaacttggtgaattggttagtggagaagaagttgttgagcctccttcaaatttgattgccatggaagtctcttcaaaatatgttaagctaaattggaatccatctcctagtccagtgactggctacaaagtcatcctcacaccaatgactgcaggaagccgacagcacgctctgagtgtggggcctcagacaaccacgctcagtgttcgcgacctctcagcagacacagaataccagatcagtgtttccgccatgaagggaatgacatccagtgaacccatttcaataatggagaagactcagccaatgaaagttcaagtggaatgctcacgtggtgtggatataaaagccgatattgtgtttttggttgatggctcctatagcattgggattgcaaactttgttaaagttagagcctttttggaagttcttgtaaaaagttttgaaatttcaccaaatagggtccagattagtcttgtgcaatacagccgggatcctcatactgagttcactttgaaaaaattcaccaaagttgaagatataattgaagcaataaacaccttcccttacagaggaggatctacaaatactggcaaagcaatgacttatgtcagagagaaaatatttgtgcctagcaagggatcaagaagcaatgtgccaaaggtcatgattcttatcacggatgggaaatcatcagatgctttcagagatcctgcgataaaactgaggaattcagatgttgaaatctttgcagttggtgtgaaggatgccgttcgctcagaattggaagctattgcctctcctcctgcagagacccatgtgttcacagtggaagattttgatgcttttcagaggatatcttttgaactcacacagtctatctgccttagaattgagcaagaattggcagctataaagaagaaagcttacgtccctccaaaggatcttagtttttcagaagtgacttcttatggtttcaaaaccaactggtctccagctggagaaaatgttttttcatatcacatcacctacaaggaagcggctggggatgatgaggtcactgtggtggagccagcatcgagcaccagtgttgttctcagcagcctgaagccagagaccttgtatttggtcaatgtgactgcggagtatgaggatggcttcagcattcccttagctggagaggagaccaccgaagaagtaaaaggagcacctcgaaacctaaaggtgacagatgagactacagatagtttcaaaattacttggactcaagctccagggagagttttaagatatcgaattatatatagaccagttgctggtggagagagcagagaagttaccaccccacccaatcagaggaggagaacactggagaacttgattccagacacgaaatatgaagtatctgtaattcctgaatatttctcaggacctggtactccattaactggaaatgcagccactgaagaaggtagaggaaat

SEQ ID NO: 4559 - DNA, 11579 bp, Homo sapiens
  source 1..11579: mol_type = unassigned DNA
gcggccgccaggtgctcctggagtgcagcgcctatcgccggggcgtgtgggggccacaccgagcaccagcttctccgacgccgggaagccgctgtcgccgccgctacctctccctgttgccgccgcctcagatctcttcatgccgctgtaagctcggaggccaaggatgcggagtaggcttcccccagcgcttgccgccctgggcgcggccctgctcctgtcttccattgaggcagaagttgacccaccttcagacttgaattttaaaattatagatgaaaatactgttcatatgtcatgggcaaaaccagttgatccaattgtgggttacagaataacggtggaccctacaacggatgggcctactaaagaatttaccctttcagctagtaccactgaaactttattgtcagaacttgtacctgaaacagagtatgtggtgacaataacttcatatgatgaagtagaagaaagtgtaccagttataggacaactaacaattcaaacaggtagttcgacaaagccagtggagaagaaacctggaaaaaccgagatacaaaaatgctctgtcagtgcctggactgatttggttttcctcgtggatggctcttggagtgtgggaagaaataatttcaagtacattttagacttcattgctgctcttgtgtctgcttttgacattggggaagagaagacaagagttggagttgttcaatacagctctgataccaggactgaatttaacttaaatcagtactaccaaagggatgaacttcttgctgcaataaaaaaaattccatataaaggtggcaacacaatgacaggggatgccattgattatttagttaaaaatactttcacggaatctgctggggcaagagttggctttcctaaagtggcaattattattacggatggaaaatcccaggatgaagtggaaattccagcaagagagcttcgtaatgttggagttgaagttttctccttgggcattaaagctgcagatgcaaaagaactcaaacaaattgcctccacaccttcactgaaccatgttttcaatgtggccaactttgatgcaattgtggatattcagaatgagatcatctcccaggtgtgctcaggtgttgatgaacaacttggtgaattggttagtggagaagaagttgttgagcctccttcaaatttgattgccatggaagtctcttcaaaatatgttaagctaaattggaatccatctcctagtccagtgactggctacaaagtcatcctcacaccaatgactgcaggaagccgacagcacgctctgagtgtggggcctcagacaaccacgctcagtgttcgcgacctctcagcagacacagaataccagatcagtgtttccgccatgaagggaatgacatccagtgaacccatttcaataatggagaagactcagccaatgaaagttcaagtggaatgctcacgtggtgtggatataaaagccgatattgtgtttttggttgatggctcctatagcattgggattgcaaactttgttaaagttagagcctttttggaagttcttgtaaaaagttttgaaatttcaccaaatagggtccagattagtcttgtgcaatacagccgggatcctcatactgagttcactttgaaaaaattcaccaaagttgaagatataattgaagcaataaacaccttcccttacagaggaggatctacaaatactggcaaagcaatgacttatgtcagagagaaaatatttgtgcctagcaagggatcaagaagcaatgtgccaaaggtcatgattcttatcacggatgggaaatcatcagatgctttcagagatcctgcgataaaactgaggaattcagatgttgaaatctttgcagttggtgtgaaggatgccgttcgctcagaattggaagctattgcctctcctcctgcagagacccatgtgttcacagtggaagattttgatgcttttcagaggatatcttttgaactcacacagtctatctgccttagaattgagcaagaattggcagctataaagaagaaagcttacgtccctccaaaggatcttagtttttcagaagtgacttcttatggtttcaaaaccaactggtctccagctggagaaaatgttttttcatatcacatcacctacaaggaagcggctggggatgatgaggtcactgtggtggagccagcatcgagcaccagtgttgttctcagcagcctgaagccagagaccttgtatttggtcaatgtgactgcggagtatgaggatggcttcagcattcccttagctggagaggagaccaccgaagaagtaaaaggagcacctcgaaacctaaaggtgacagatgagactacagatagtttcaaaattacttggactcaagctccagggagagttttaagatatcgaattatatatagaccagttgctggtggagagagcagagaagttaccaccccacccaatcagaggaggagaacactggagaacttgattccagacacgaaatatgaagtatctgtaattcctgaatatttctcaggacctggtactccattaactggaaatgcagccactgaagaagttagagggaatccaagagacttaagagtttctgaccctacgacgtctactatgaaattatcttggagtggggcaccaggaaaagtgaaacagtatctcgtcacatataccccagtggcagggggtgaaactcaagaggtcactgtgaggggagatacaaccaatacggtgctgcagggattgaaggaagggacacaatacgccttatctgtgacagccttgtatgcgtctggggctggagacgccctctttggtgaaggaacaacacttgaagaacgtggttctcctcaagatttagttactaaagacatcactgacacatcaattggggcttattggacatctgctccaggaatggttcgcggttacagggtctcatggaaatcactttatgatgatgttgacactggagagaaaaatctgcctgaagatgcaattcatacgatgatagaaaatctgcagccagagaccaaatacagaatttcagtatttgccacttacagcagtggagaaggagaacctttgactggagatgccacaactgaattatctcaagattccaaaaccctgaaagtagatgaagaaacagaaaacacaatgagagttacatggaaaccagcaccagggaaagtcgtcaactaccgtgttgtctatcgccctcatgggagagggaagcaaatggttgctaaggtgccccccacagtcacttcgacagtgttaaagcgacttcagccacagaccacatatgacatcacagttcttcctatttacaagatgggagaaggaaagcttaggcaaggatcaggaacaacagcttctcggtttaagtctcctagaaacctcaaaacatctgacccaaccatgtcaagcttccgagtgacttgggagcctgcccctggggaagtgaagggttataaagtcacattccaccctacgggggatgacagaagactgggggagttagtggttggaccctatgacaacacagttgttttggaggaacttagggctggtaccacctataaagtaaatgtttttggaatgtttgatggaggagaaagctcaccacttgttggacaagaaatgacaaccctttccgacacaactgttatgccaattttatcttctgggatggagtgtctcaccagagctgaggcagacattgtgttgctggtggatggatcatggagcatcggccgggcaaattttagaaccgtgaggagtttcatttctcgtattgtggaagtctttgacattggccccaaaagagtacaaattgctcttgctcagtatagtggggatcccagaacagagtggcagttaaatgcacacagagacaagaagagcttgttgcaagctgtggcaaacttgccgtacaaaggaggcaatactctcacaggcatggctttgaatttcattcgccaacagaacttcaggacccaagctggcatgagacctcgagctcgaaaaattggtgtgctcattactgatggaaaatcacaagacgatgttgaagcaccttcaaagaaactcaaggatgagggagtggagctgtttgctattggtattaaaaatgctgatgaagtcgaattaaagatgattgcaactgatcctgatgatacccatgcatacaatgtggcagattttgagtcactctccaggatagtggatgatctcaccattaatttgtgtaacagtgtcaaaggtccaggtgatttggaagcaccttctaacttagttatttctgagcgaacccatcgttcttttagagtgagctggacaccaccttctgacagtgtggatcgatataaggtggaatactatccagtttctggagggaaacgtcaagaattttatgtgagtcgaatggaaactagcacagtgctgaaagatctgaaacctgaaactgaatatgttgtcaatgtgtattctgtggtagaagatgaatatagtgagcctctgaaggggacagaaaaaaccttgccagtgcctgtagtcagcctgaatatttatgatgttggccctaccaccatgcatgtgcagtggcagcctgtgggaggagctactggctacatcttgtcatacaaacctgttaaggacacagagccaacaagacccaaagaggtgcgtttggggccaacagtgaatgacatgcagctgactgaccttgttcccaacacggagtatgcagtcacagtccaggctgtcctgcacgacctcactagtgaacctgtcactgttcgggaagtcaccttgcctttacccagacctcaggatctgaaactcagagatgtgactcacagcactatgaatgtcttttgggaacctgtgcctggaaaagtgcgtaaatatattgttcgatacaaaacaccagaagaggatgtcaaagaggtagaggtggacagatcagagaccagcacttccctcaaagacctcttctcacagaccttgtacacagtcagcgtttctgcagtacatgacgagggggagtctcctccagtgactgctcaagaaactacccgacccgtgccagccccaacaaacttaaagattactgaagtaacatcagagggtttcagagggacttgggatcatggagcttcagatgtgtctctctacagaataacttgggcaccttttggaagctcagataagatggagaccatcttaaatggagatgaaaacactttggtgttcgaaaacctgaaccccaacaccatctatgaagtttccattactgccatctatcctgatgagtcagaaagtgatgacctgattggcagtgagcgcacactgcctatcttaacaacacaagctcccaaaagtggcccacgaaaccttcaagtgtacaatgcaacatctaacagcctgactgttaagtgggatcctgctagtggtcgtgtgcagaaatataggatcacttatcagccttccacaggggaaggcaatgagcaaacgaccacaataggaggacggcagaacagtgtggtcctgcagaaactgaagccagacactccttacactatcaccgtatcctctctgtatcctgatggtgaaggaggtcggatgacgggaagaggcaagaccaaacctctaaacactgtaaggaacctgagagtgtatgacccttctaccagcaccttgaatgtccgctgggaccatgcagagggaaatcctcgtcagtacaagctcttctatgcaccagcagcaggtggtccagaggaactggtaccaatccccgggaataccaattatgccattcttaggaatctgcagccagatacctcatacactgtgactgtagttcccgtttatactgaaggtgatgggggacgcacatcagatactggaaggacattgatgagaggactggcaagaaatgtccaagtatacaatcctacacctaacagcctcgatgttcgctgggaccctgctccaggacctgtgctgcaatatcgcgttgtgtattctcctgtggatggcacaagaccctcagaatctatagtagtgccaggaaacacgcgcatggtgcatctggagcggctgattccggacacactctattccgtgaaccttgtggctctgtactcggatggagagggaaatcccagccctgcccagggccgaacgctaccacgcagtggaccaaggaacctgagagtctttggtgaaacaaccaatagcctctcggtagcctgggatcatgctgatgggccagttcagcagtacaggatcatctattctcccactgttggtgatccaattgatgaatataccacagtcccaggcagaagaaacaatgtaatactgcagcccctgcaacctgacactccatataaaattactgttattgctgtttatgaagatggagatggtggccatctaacaggaaatggaagaactgtgggactccttcctcctcagaacatacacatctctgacgaatggtatacaagattcagggtgtcctgggatccttcaccttctccagttcttggatataaaatagtatataagccagtgggttccaatgagcccatggaagcctttgttggagaaatgacatcatataccttacacaatctcaatcccagcaccacctacgatgtgaatgtttatgctcaatatgattctggactcagtgtccccttgacagatcaaggcactacattatatttaaatgtaacagatctgaaaacttaccagattgggtgggatacattctgtgtcaaatggtcacctcaccgggcagccacctcctacaggctaaaactaagccctgcagatggaacaaggggacaagaaattacagtgcgtggatcagaaaccagtcactgcttcactggcctttcaccagacactgattatggtgtcactgtttttgtgcagacaccaaatctcgagggaccaggagtctctgttaaagaacataccactgtgaaaccaacagaagcccctacagagccacccacacctcctccccctcccaccattccaccagcccgggatgtatgcaaaggggccaaggcagatattgtgttcttgactgatgcctcctggagcattggggacgataattttaacaaagttgtaaaattcatcttcaatactgtgggaggctttgatgaaatcagtcctgctgggattcaggtttcatttgtgcaatacagcgatgaggtcaagtctgagttcaagctgaacacgtacaatgacaaggccctagcccttggggccctccagaatattaggtacagaggaggaaacacaagaacaggcaaggccctcacgtttatcaaggagaaagtcttgacttgggagagcggcatgaggaagaatgtccctaaggtgttggttgtggtcacggacggtcggtcccaggatgaggtcaagaaggcggctttggtcatccagcattcacggttcagtgtctttgtagttggtgtggctgatgtcgactacaatgagcttgccaacattgccagcaaaccaagtgaacggcacgtgttcattgtggacgactttgaatcttttgagaagatcgaagacaatcttattacatttgtttgtgaaactgccacttcaagttgtcctctcatttatttggatggctacacctcaccaggttttaaaatgcttgaagcatacaacctgacagaaaagaattttgcttctgtacaaggagtatctttggagtcagggtctttccccagctactcagcatacaggattcagaagaatgcgtttgtgaatcagcctacagcagacctacacccaaatggactccctccttcatacacgattatattattattcagacttctcccagaaactcccagtgacccttttgcaatttggcaaatcacagacagagactacaaaccacaagttggagtgattgcagatccttctagcaagacgttatcattctttaacaaggatacaagaggcgaggtgcaaactgttacatttgacacagaagaagtaaagacattattttatggaagttttcacaaggttcatattgtagtgacctcaaaaagtgttaagatttacattgactgctatgaaattatagaaaaagacatcaaggaagctggaaatataacaactgatggttatgaaattcttggaaaactccttaaaggggaaaggaaatcagccgcattccaaatccagagttttgacattgtctgcagtccagtgtggaccagtagagacagatgctgtgatattccctctaggagagatgagggaaaatgccctgcttttccaaattcttgcacatgtacacaggacagcgttggacctccaggacctccaggccctgcaggaggacctggtgctaaaggtcccagaggtgaaagaggtatcagtggggcaattgggccccctggtcctcgtggagacataggtcctccaggcccccagggtcctccaggccctcagggacccaatggactctctattccgggagagcaaggtcgccaagggatgaaaggtgatgctggagagccaggacttccaggccgaacaggaaccccaggattacctggcccaccaggaccaatgggacctccaggagacagaggcttcactggaaaagacggtgcaatgggacccaggggcccaccagggccgccgggaagcccaggctccccaggagtcacaggaccaagtgggaagccaggaaaacctggagatcatggcagaccaggtccatctgggttgaaaggagaaaaaggtgataggggagacattgcttcccagaacatgatgcgagcagttgcaagacaagtctgtgaacaattgataagtggtcagatgaacagattcaatcagatgctgaatcagattccaaatgattaccagtccagtcgcaaccagccaggcccgccgggtccaccgggacctcctggtagcgcaggagccagaggagaacctgggcctggggggcggccaggcttcccgggcacaccagggatgcagggaccccctggggaacgaggtttgccaggagagaaaggtgaaaggggtactggatcttcaggacctcgggggctgcctggccccccaggtccacaaggagaatccagaacaggtccaccagggtccacaggttcaagaggtccccctggcccccctggccgtcctggaaactcaggtatccgaggacccccaggtcctcctggatactgtgattcttctcagtgtgccagcatcccatacaacgggcaaggctatccaggttccggctaacacattttctaagtcgccagtgctgcttacagtttgaatacatgaaaatcctgtttctgagatgtttgcgcacgtgcttattaggaaatgagtctgtatggaaatctcaccacagataatggttaacgaaccgggtcgacatcacaaaggagggtggagactctttttactaacttgaatgagacaaaagcagtggtgtcagtttataatcctgatgcatttcagtaataatgtagaaaaacattattttaaaaaagttccaacacacagccatgaggagcctcagttttgaaagaggtgcataataaaactactaaccagaggagtctatgccattttaagaaaaacaattaacctggttaaagagaaatgtcttatgtaaataataaactaattgtggcttgtaaatgatttgtatgtgatcctgtcgactaaaatcacttaacaattctacaataagcttctgcatcaaagcctgccgcttgctctatgccggaataacaccaaatggaatctcctcatctcttgcttgttagcgatgtgtctgattcagggcatctgtctttttgttacttttttgtccgtgtcctctcatttgggttttgtaactgcaattttcaaaccaaagtttaaaatcaccttttcttcctgttttgctgtagtcactggtgttcctcacccaccagctgtaactcagtttgtgtgaggtacagccacagaagatgtcatgtactgtatattacctggtgatagttgcttttcaccccccgagttcagtttctaggagccaatgaaacttcccctcacctcctcatctttccaagttgttctttgaattgaggagtttgaaggcataaacagttacttggggatttgcgaaaatcctacttagttactgcgtttacagttctttggcccagtctctgacccttcccaagtatttgtgcaatgattgtgtttactgctggatttttgaaggtttttttttttaagaaagtgccatttcattatttgattatcaccaaattatctggaaataattgggacattgtaacttatctatttatagttatgagattaagactggagtgccatcaccgcgggtgatgatttagcttttgctgtgtgtgtgtgtgtgtgccttccaaatcatgccataattgtaatgttgaatcggacagagccttacgtgcccgagggcggggcctacctgcctgagcgcgagcccttcatcgtgccggtggagcccgagcggacagcggaatacgaggactacggcgcagacgagcctgcagaggagcctcctgagccccaccggcgctggcggcgcgccctgccccacggacccgggcagtgaaccagagatcacgcgccgcgccgcgaggcttgggggaggtgttgaaattctcatttacaggtcagatagagcagtgtacgtcttttctgaggtgtttcttccagcgttgctcatccaggagtaccctttctgattgtagagaaccttgtttctgcaggaagcctagctccaagcacgcagtctgtagacatttttgcctttgcccttgaaatgcttgcaaaatactttgttaacaaaagctgcaaagagagaacatgccgtgtgcctttagttagcacagcgggcagcctcagtgaaactcttaggttaagcagttaagtcctggaacccagagctgctgtgtatttcgagcgggcagtttatcttttgctatacttattttcaattcaattacaccacgattcaaataattcccctcctaaaaccaaaaaggagggaaacgtcaactccattgcaattacttatcttcctcttctatctctgttatacgccggggcatagaatgctcgtatacatctctttaacaaccacaaaccttaagccatgtagatgaagttagtgcatcaacgggatacagttccatattgccttaaacctccttgttttagacacactaacatttataccaaattgcagattattctgcagagagggaattgcatgtttgtgttgtatatttagtatgaacttttttcagaatataatatttcttagttatcaaaagtagttggaaaacatttgcaagactatgaacatagaattgctgcttttatattttaactgcagattgtgaatttcactgccttatattatttatttctgaaacaaaagaggcatttttcaataaaactactgaaaatttga

SEQ ID NO: 4560 - DNA, 2934 bp, Homo sapiens
  source 1..2934: mol_type = unassigned DNA
tgtgtcaagttacagaggcgccggaatcggcccctgcgctcctcgccagccgccacgacccacctctgcccatggggccctccgtgtgcgccccttcgcccggggactgaaactgactggcccgggagacacgaggcgcccagaaggactgacagcgcggcaccaactgctctgcagacacttgaagggaaagactgggcggagagaaggagagccggtcagattcccctaactttcctggacttggaacgttcttcgaaataacttttttctcacctaggtgtaccccaattaccgctggttgtgctttttcggcacttcctctcctactgctaatttttccgtcctctttgccgggagcagcggaaagggacgttttccagcgatacaagccctttccccctgccccgcagtttggatagagccttttggcagcggctgtcgcctttatttattctatttatttatttattggttctcaagacgcgagaggatggtagcggagcgcacccacaaagcggcagccaccggtgcccgcggccctggggagttgggcgcgcccgggacggtggctctggtggcggcgcgggcggagcgcggcgcacggctgccgagtccagggtcgtgcgggctgctgacgctggccctctgctcgctggcactcagcctgctcgcccactttcggacggccgagctgcaggcccgggtgctgcgcctggaagcggagcgcggggagcagcaaatggagacggctattttgggacgagtcaatcaactgctggacgagaaatggaagctccactcaaggaggcgccgggaggccccaaagacatctccaggatgtaactgcccaccaggacctcctggtcccactggaagacccggactcccaggggacaaaggtgccattgggatgcctggacgtgtgggagtaaagggccaaccaggcgagaaggggtcccccggagacgctgggctgtccatcattggtccccgcggcccccctggtcaaccaggaactagaggtttccctggatttccgggtcccattgggctggacggcaaaccgggccacccaggaccaaagggcgacatgggtctgacgggtcccccaggacagccgggaccccagggacaaaaaggagaaaagggtcagtgtggagagtacccacaccgggagtgcctaagcagcatgccagcagctctgcgctccagccaaataattgccctgaagctgctgcctctcctcaattcagtgcgactggctccacccccggtcataaaaaggcggacgttccagggcgaacagagccaggccagcatccaaggtccaccagggcccccaggcccccctggaccaagtggacctctggggcacccaggactgccagggcctatggggccacctggcttacctgggcctcctggaccaaagggagacccagggatccagggctaccacggccggaagggagaacggggcatgccagggatgccaggcaagcatggagccaagggggcgcccggaattgccgtggctgggatgaagggtgagccagggatcccaggaaccaagggtgagaagggggctgaaggctcccctgggcttcctggcctcctggggcagaagggagagaaaggcgatgctggcaactccattggaggaggcagaggggaacctggccctccagggctccctgggcccccagggccaaagggagaagcaggtgtcgatggccaggttggccccccagggcagccaggagacaagggggagcgtggagcagctggagaacagggaccagatggccccaagggctccaagggagaaccagggaaaggagagatggtggattacaatggaaacatcaatgaggctctccaggagatccggacgctggccttgatggggcctcctggtcttcctgggcaaattggcccacctggagctccagggattccaggccagaagggggagattggactgccaggccctccaggacacgatggggaaaagggacctcgcggtaaaccaggagacatgggccctcctggtccccaaggccccccaggaaaggatggacctccaggagtgaagggagaaaacgggcacccagggagcccaggagagaagggggaaaaaggggagacaggacaagcaggctcaccgggtctagatggcccaactggggagaggagaacatggtggccagagcagacccagagtggcaggattgcctaatccagctgggctcctgaggtttacaggagagaaaggagaagccggggagaagggcaatccaggagcagaggttcctgggctgccagggccagaggggcctcccggacctccggggctccaaggtgttcctggaccaaagggggaagcaggactagatggagcaaaaggagagaaaggcttccagggagaaaaaggagaccgtggtcccctgggactacccggtactccaggaccaattggagttccaggcccagcgggaccaaagggcgagaggggcagcaaaggagaccctgggatgacaggaccaacgggagcagctgggcttcctggtttacatggaccacccggggacaagggaaaccggggggagagggggaagaaaggctctagagggcctaaaggggataagggagaccaaggagcgcctggattagatgccccctgcccattgggcgaagatggcttaccagtccaaggctgctggaacaagtgatgcctctaaccttggattggcctgtgtgtgtgtttgtacatagaatatttatttttatacagttttcactttttgaaaatgccagaagtatgatgcatcttacagattattaaaaaagaaagaaaaacctgcatattttgtacagaaaatatcaacctcttcccttttgtttacaagatgttttgtataagcctatgtc

SEQ ID NO: 4561 - DNA, 3093 bp, Homo sapiens
  source 1..3093: mol_type = unassigned DNA
gtgtcaagttacagaggcgccggaatcggcccctgcgctcctcgccagccgccacgacccacctctgcccatggggccctccgtgtgcgccccttcgcccggggactgaaactgactggcccgggagacacgaggcgcccagaaggactgacagcgcggcaccaactgctctgcagacacttgaagggaaagactgggcggagagaaggagagccggtcagattcccctaactttcctggacttggaacgttcttcgaaataacttttttctcacctaggtgtaccccaattaccgctggttgtgctttttcggcacttcctctcctactgctaatttttccgtcctctttgccgggagcagcggaaagggacgttttccagcgatacaagccctttccccctgccccgcagtttggatagagccttttggcagcggctgtcgcctttatttattctatttatttatttattggttctcaagacgcgagaggatggtagcggagcgcacccacaaagcggcagccaccggtgcccgcggccctggggagttgggcgcgcccgggacggtggctctggtggcggcgcgggcggagcgcggcgcacggctgccgagtccagggtcgtgcgggctgctgacgctggccctctgctcgctggcactcagcctgctcgcccactttcggacggccgagctgcaggcccgggtgctgcgcctggaagcggagcgcggggagcagcaaatggagacggctattttgggacgagtcaatcaactgctggacgagaaatggaagctccactcaaggaggcgccgggaggccccaaagacatctccaggatgtaactgcccaccaggacctcctggtcccactggaagacccggactcccaggggacaaaggtgccattgggatgcctggacgtgtggggtcccccggagacgctgggctgtccatcattggtccccgcggcccccctggtcaaccaggaactagaggtttccctggatttccgggtcccattgggctggacggcaaaccgggccacccaggaccaaagggcgacatgggtctgacgggtcccccaggacagccgggaccccagggacaaaaaggagaaaagggtcagtgtggagagtacccacaccgggagtgcctaagcagcatgccagcagctctgcgctccagccaaataattgccctgaagctgctgcctctcctcaattcagtgcgactggctccacccccggtcataaaaaggcggacgttccagggcgaacagagccaggccagcatccaaggtccaccagggcccccaggcccccctggaccaagtggacctctggggcacccaggactgccagggcctatggggccacctggcttacctgggcctcctggaccaaagggagacccagggatccagggctaccacggccggaagggagaacggggcatgccagggatgccaggcaagcatggagccaagggggcgcccggaattgccgtggctgggatgaagggtgagccagggatcccaggaaccaagggtgagaagggggctgaaggctcccctgggcttcctggcctcctggggcagaagggagagaaaggcgatgctggcaactccattggaggaggcagaggggaacctggccctccagggctccctgggcccccagggccaaagggagaagcaggtgtcgatggccaggttggccccccagggcagccaggagacaagggggagcgtggagcagctggagaacagggaccagatggccccaagggctccaagggagaaccagggaaaggagagatggtggattacaatggaaacatcaatgaggctctccaggagatccggacgctggccttgatggggcctcctggtcttcctgggcaaattggcccacctggagctccagggattccaggccagaagggggagattggactgccaggccctccaggacacgatggggaaaagggacctcgcggtaaaccaggagacatgggccctcctggtccccaaggccccccaggaaaggatggacctccaggagtgaagggagaaaacgggcacccagggagcccaggagagaagggggaaaaaggggagacaggacaagcaggctcaccgggagagaaaggagaagccggggagaagggcaatccaggagcagaggttcctgggctgccagggccagaggggcctcccggacctccggggctccaaggtgttcctggaccaaagggggaagcaggactagatggagcaaaaggagagaaaggcttccagggagaaaaaggagaccgtggtcccctgggactacccggagcttcaggtttggacggcaggcctgggccaccgggtactccaggaccaattggagttccaggcccagcgggaccaaagggcgagaggggcagcaaaggagaccctgggatgacaggaccaacgggagcagctgggcttcctggtttacatggaccacccggggacaagggaaaccggggggagagggggaagaaaggctctagagggcctaaaggggataagggagaccaaggagcgcctggattagatgccccctgcccattgggcgaagatggcttaccagtccaaggctgctggaacaagtgatgcctctaaccttggattggcctgtgtgtgtgtttgtacatagaatatttatttttatacagttttcactttttgaaaatgccagaagtatgatgcatcttacagattattaaaaaagaaagaaaaacctgcatattttgtacagaaaatatcaacctcttcccttttgtttacaagatgttttgtataagcctatgtctctaatacattttttgtttggtcgtaatgtctgcatgatatttgtgcacatttattaagtatcgaagcttaataaattattgtgtcctggtgccaaagggggccagccagaactgaggtgctggctagctcatgtgtgaattcacataaatgtagaggtccatgatatttgctaagctaggtgtgtctaagagtattttaaacccttatggattttcattattaaaggaaatgaaacatggcaattca

SEQ ID NO: 4562 - DNA, 3027 bp, Homo sapiens
  source 1..3027: mol_type = unassigned DNA
gtgtcaagttacagaggcgccggaatcggcccctgcgctcctcgccagccgccacgacccacctctgcccatggggccctccgtgtgcgccccttcgcccggggactgaaactgactggcccgggagacacgaggcgcccagaaggactgacagcgcggcaccaactgctctgcagacacttgaagggaaagactgggcggagagaaggagagccggtcagattcccctaactttcctggacttggaacgttcttcgaaataacttttttctcacctaggtgtaccccaattaccgctggttgtgctttttcggcacttcctctcctactgctaatttttccgtcctctttgccgggagcagcggaaagggacgttttccagcgatacaagccctttccccctgccccgcagtttggatagagccttttggcagcggctgtcgcctttatttattctatttatttatttattggttctcaagacgcgagaggatggtagcggagcgcacccacaaagcggcagccaccggtgcccgcggccctggggagttgggcgcgcccgggacggtggctctggtggcggcgcgggcggagcgcggcgcacggctgccgagtccagggtcgtgcgggctgctgacgctggccctctgctcgctggcactcagcctgctcgcccactttcggacggccgagctgcaggcccgggtgctgcgcctggaagcggagcgcggggagcagcaaatggagacggctattttgggacgagtcaatcaactgctggacgagaaatggaagctccactcaaggaggcgccgggaggccccaaagacatctccaggatgtaactgcccaccaggacctcctggtcccactggaagacccggactcccaggggacaaaggtgccattgggatgcctggacgtgtggggtcccccggagacgctgggctgtccatcattggtccccgcggcccccctggtcaaccaggaactagaggtttccctggatttccgggtcccattgggctggacggcaaaccgggccacccaggaccaaagggcgacatgggtctgacgggtcccccaggacagccgggaccccagggacaaaaaggagaaaagggtcagtgtggagagtacccacaccgggagtgcctaagcagcatgccagcagctctgcgctccagccaaataattgccctgaagggcgaacagagccaggccagcatccaaggtccaccagggcccccaggcccccctggaccaagtggacctctggggcacccaggactgccagggcctatggggccacctggcttacctgggcctcctggaccaaagggagacccagggatccagggctaccacggccggaagggagaacggggcatgccagggatgccaggcaagcatggagccaagggggcgcccggaattgccgtggctgggatgaagggtgagccagggatcccaggaaccaagggtgagaagggggctgaaggctcccctgggcttcctggcctcctggggcagaagggagagaaaggcgatgctggcaactccattggaggaggcagaggggaacctggccctccagggctccctgggcccccagggccaaagggagaagcaggtgtcgatggccaggttggccccccagggcagccaggagacaagggggagcgtggagcagctggagaacagggaccagatggccccaagggctccaagggagaaccagggaaaggagagatggtggattacaatggaaacatcaatgaggctctccaggagatccggacgctggccttgatggggcctcctggtcttcctgggcaaattggcccacctggagctccagggattccaggccagaagggggagattggactgccaggccctccaggacacgatggggaaaagggacctcgcggtaaaccaggagacatgggccctcctggtccccaaggccccccaggaaaggatggacctccaggagtgaagggagaaaacgggcacccagggagcccaggagagaagggggaaaaaggggagacaggacaagcaggctcaccgggagagaaaggagaagccggggagaagggcaatccaggagcagaggttcctgggctgccagggccagaggggcctcccggacctccggggctccaaggtgttcctggaccaaagggggaagcaggactagatggagcaaaaggagagaaaggcttccagggagaaaaaggagaccgtggtcccctgggactacccggagcttcaggtttggacggcaggcctgggccaccgggtactccaggaccaattggagttccaggcccagcgggaccaaagggcgagaggggcagcaaaggagaccctgggatgacaggaccaacgggagcagctgggcttcctggtttacatggaccacccggggacaagggaaaccggggggagagggggaagaaaggctctagagggcctaaaggggataagggagaccaaggagcgcctggattagatgccccctgcccattgggcgaagatggcttaccagtccaaggctgctggaacaagtgatgcctctaaccttggattggcctgtgtgtgtgtttgtacatagaatatttatttttatacagttttcactttttgaaaatgccagaagtatgatgcatcttacagattattaaaaaagaaagaaaaacctgcatattttgtacagaaaatatcaacctcttcccttttgtttacaagatgttttgtataagcctatgtctctaatacattttttgtttggtcgtaatgtctgcatgatatttgtgcacatttattaagtatcgaagcttaataaattattgtgtcctggtgccaaagggggccagccagaactgaggtgctggctagctcatgtgtgaattcacataaatgtagaggtccatgatatttgctaagctaggtgtgtctaagagtattttaaacccttatggattttcattattaaaggaaatgaaacatggcaattca

SEQ ID NO: 4563 - DNA, 2991 bp, Homo sapiens
  source 1..2991: mol_type = unassigned DNA
gtgtcaagttacagaggcgccggaatcggcccctgcgctcctcgccagccgccacgacccacctctgcccatggggccctccgtgtgcgccccttcgcccggggactgaaactgactggcccgggagacacgaggcgcccagaaggactgacagcgcggcaccaactgctctgcagacacttgaagggaaagactgggcggagagaaggagagccggtcagattcccctaactttcctggacttggaacgttcttcgaaataacttttttctcacctaggtgtaccccaattaccgctggttgtgctttttcggcacttcctctcctactgctaatttttccgtcctctttgccgggagcagcggaaagggacgttttccagcgatacaagccctttccccctgccccgcagtttggatagagccttttggcagcggctgtcgcctttatttattctatttatttatttattggttctcaagacgcgagaggatggtagcggagcgcacccacaaagcggcagccaccggtgcccgcggccctggggagttgggcgcgcccgggacggtggctctggtggcggcgcgggcggagcgcggcgcacggctgccgagtccagggtcgtgcgggctgctgacgctggccctctgctcgctggcactcagcctgctcgcccactttcggacggccgagctgcaggcccgggtgctgcgcctggaagcggagcgcggggagcagcaaatggagacggctattttgggacgagtcaatcaactgctggacgagaaatggaagctccactcaaggaggcgccgggaggccccaaagacatctccaggatgtaactgcccaccaggacctcctggtcccactggaagacccggactcccaggggacaaaggtgccattgggatgcctggacgtgtggggtcccccggagacgctgggctgtccatcattggtccccgcggcccccctggtcaaccaggaactagaggtttccctggatttccgggtcccattgggctggacggcaaaccgggccacccaggaccaaagggcgacatgggtctgacgggtcccccaggacagccgggaccccagggacaaaaaggagaaaagggtcagtgtggagagtacccacaccgggagtgcctaagcagcatgccagcagctctgcgctccagccaaataattgccctgaagggcgaacagagccaggccagcatccaaggtccaccagggcccccaggcccccctggaccaagtggacctctggggcacccaggactgccagggcctatggggccacctggcttacctgggcctcctggaccaaagggagacccagggatccagggctaccacggccggaagggagaacggggcatgccagggatgccaggcaagcatggagccaagggggcgcccggaattgccgtggctgggatgaagggtgagccagggatcccaggaaccaagggtgagaagggggctgaaggctcccctgggcttcctggcctcctggggcagaagggagagaaaggcgatgctggcaactccattggaggaggcagaggggaacctggccctccagggctccctgggcccccagggccaaagggagaagcaggtgtcgatggccaggttggccccccagggcagccaggagacaagggggagcgtggagcagctggagaacagggaccagatggccccaagggctccaagggagaaccagggaaaggagagatggtggattacaatggaaacatcaatgaggctctccaggagatccggacgctggccttgatggggcctcctggtcttcctgggcaaattggcccacctggagctccagggattccaggccagaagggggagattggactgccaggccctccaggacacgatggggaaaagggacctcgcggtaaaccaggagacatgggccctcctggtccccaaggccccccaggaaaggatggacctccaggagtgaagggagaaaacgggcacccagggagcccaggagagaagggggaaaaaggggagacaggacaagcaggctcaccgggagagaaaggagaagccggggagaagggcaatccaggagcagaggttcctgggctgccagggccagaggggcctcccggacctccggggctccaaggtgttcctggaccaaagggggaagcaggactagatggagcaaaaggagagaaaggcttccagggagaaaaaggagaccgtggtcccctgggactacccggtactccaggaccaattggagttccaggcccagcgggaccaaagggcgagaggggcagcaaaggagaccctgggatgacaggaccaacgggagcagctgggcttcctggtttacatggaccacccggggacaagggaaaccggggggagagggggaagaaaggctctagagggcctaaaggggataagggagaccaaggagcgcctggattagatgccccctgcccattgggcgaagatggcttaccagtccaaggctgctggaacaagtgatgcctctaaccttggattggcctgtgtgtgtgtttgtacatagaatatttatttttatacagttttcactttttgaaaatgccagaagtatgatgcatcttacagattattaaaaaagaaagaaaaacctgcatattttgtacagaaaatatcaacctcttcccttttgtttacaagatgttttgtataagcctatgtctctaatacattttttgtttggtcgtaatgtctgcatgatatttgtgcacatttattaagtatcgaagcttaataaattattgtgtcctggtgccaaagggggccagccagaactgaggtgctggctagctcatgtgtgaattcacataaatgtagaggtccatgatatttgctaagctaggtgtgtctaagagtattttaaacccttatggattttcattattaaaggaaatgaaacatggcaattca

SEQ ID NO: 4564 - DNA, 2276 bp, Homo sapiens
  source 1..2276: mol_type = unassigned DNA
ggaaagactgggcggagagaaggagagccggtcagattcccctaactttcctggacttggaacgttcttcgaaataacttttttctcacctaggtgtaccccaattaccgctggttgtgctttttcggcacttcctctcctactgctaatttttccgtcctctttgccgggagcagcggaaagggacgttttccagcgatacaagccctttccccctgccccgcagtttggatagagccttttggcagcggctgtcgcctttatttattctatttatttatttattggttctcaagacgcgagaggatggtagcggagcgcacccacaaagcggcagccaccggtgcccgcggccctggggagttgggcgcgcccgggacggtggctctggtggcggcgcgggcggagcgcggcgcacggctgccgagtccagggtcgtgcgggctgctgacgctggccctctgctcgctggcactcagcctgctcgcccactttcggacggccgagctgcaggcccgggtgctgcgcctggaagcggagcgcggggagcagcaaatggagacggctattttgggacgagtcaatcaactgctggacgagaaatggaagctccactcaaggaggcgccgggaggccccaaagacatctccaggatgtaactgcccaccaggacctcctggtcaaccaggaactagaggtttccctggatttccgggtcccattgggctggacggcaaaccgggccacccaggaccaaagggcgacatgggtctgacgggtcccccaggacagccgggaccccagggacaaaaaggagaaaagggtcagtgtggagagtacccacaccggctgctgcctctcctcaattcagtgcgactggctccacccccggtcataaaaaggcggacgttccagggcgaacagagccaggccagcatccaaggtccaccagggcccccaggcccccctggaccaagtggacctctggggcacccaggactgccagggcctatggggccacctggcttacctgggcctcctggaccaaagggagacccagggatccagggctaccacggccggaagggagaacggggcatgccagggatgccaggcaagcatggagccaagggggcgcccggaattgccgtggctgggatgaagggtgagccagggatcccaggaaccaagggtgagaagggggctgaaggctcccctgggcttcctggcctcctggggcagaagggagagaaaggcgatgctggcaactccattggaggaggcagaggggaacctggccctccagggctccctgggcccccagggccaaagggagaagcaggtgtcgatggccaggttggccccccagggcagccaggagacaagggggagcgtggagcagctggagaacagggaccagatggccccaagggctccaagggagaaccagggaaaggagagatggtggattacaatggaaacatcaatgaggctctccaggagatccggacgctggccttgatggggcctcctggtcttcctgggcaaattggcccacctggagctccagggattccaggccagaagggggagattggactgccaggccctccaggacacgatggggaaaagggacctcgcggtaaaccaggagacatgggccctcctggtccccaaggccccccaggaaaggatggacctccaggagtgaagggagaaaacgggcacccagggagcccaggagagaagggggaaaaaggggagacaggacaagcaggctcaccggttcctgggctgccagggccagaggggcctcccggacctccggggctccaaggtgttcctggaccaaagggggaagcaggactagatggagcaaaaggagagaaaggcttccagggagaaaaaggagaccgtggtcccctgggactacccggagcttcaggtttggacggcaggcctgggccaccgggtactccaggaccaattggagttccaggcccagcgggaccaaagggcgagaggggcagcaaaggagaccctgggatgacaggaccaacgggagcagctgggcttcctggtttacatggaccacccggggacaagggaaaccggggggagagggggaagaaaggctctagagggcctaaaggggataagggagaccaaggagcgcctggattagatgccccctgcccattgggcgaagatggcttaccagtccaaggctgctggaacaagtgatgcctctaaccttggattggcctgtgtgtgtg

SEQ ID NO: 4565 - DNA, 2007 bp, Homo sapiens
  source 1..2007: mol_type = unassigned DNA
atggtagcggagcgcacccacaaagcggcagccaccggtgcccgcggccctggggagttgggcgcgcccgggacggtggctctggtggcggcgcgggcggagcgcggcgcacggctgccgagtccagggtcgtgcgggctgctgacgctggccctctgctcgctggcactcagcctgctcgcccactttcggacggccgagctgcaggcccgggtgctgcgcctggaagcggagcgcggggagcagcaaatggagacggctattttgggacgagtcaatcaactgctggacgagaaatggaagctccactcaaggaggcgccgggaggccccaaagacatctccaggatgtaactgcccaccaggacctcctggtcccactggaagacccggactcccaggggacaaaggtgccattgggatgcctggacgtgtggggtcccccggagacgctgggctgtccatcattggtccccgcggcccccctggtcaaccaggaactagaggtttccctggatttccgggtcccattgggctggacggcaaaccgggccacccaggaccaaagggcgacatgggtctgacgggtcccccaggacagccgggaccccagggacaaaaaggagaaaagggtcagtgtggagagtacccacaccgggagtgcctaagcagcatgccagcagctctgcgctccagccaaataattgccctgaagggcgaacagagccaggccagcatccaaggtccaccagggcccccaggcccccctggaccaagtggacctctggggcacccaggactgccagggcctatggggccacctggcttacctgggcctcctggaccaaagggagacccagggatccagggctaccacggccggaagggagaacggggcatgccagggatgccaggcaagcatggagccaagggggcgcccggaattgccgtggctgggatgaagggtgagccagggatcccaggaaccaagggtgagaagggggctgaaggctcccctgggcttcctggcctcctggggcagaagggagagaaaggcgatgctggcaactccattggaggaggcagaggggaacctggccctccagggctccctgggcccccagggccaaagggagaagcaggtgtcgatggccaggttggccccccagggcagccaggagacaagggggagcgtggagcagctggagaacagggaccagatggccccaagggctccaagggagaaccagggaaaggagagatggtggattacaatggaaacatcaatgaggctctccaggagatccggacgctggccttgatggggcctcctggtcttcctgggcaaattggcccacctggagctccagggattccaggccagaagggggagattggactgccaggccctccaggacacgatggggaaaagggacctcgcggtaaaccaggagacatgggccctcctggtccccaaggccccccaggaaaggatggacctccaggagtgaagggagaaaacgggcacccagggagcccaggagagaagggggaaaaaggggagacaggacaagcaggctcaccggttcctgggctgccagggccagaggggcctcccggacctccggggctccaaggtgttcctggaccaaagggggaagcaggactagatggagcaaaaggagagaaaggcttccagggagaaaaaggagaccgtggtcccctgggactacccggtactccaggaccaattggagttccaggcccagcgggaccaaagggcgagaggggcagcaaaggagaccctgggatgacaggaccaacgggagcagctgggcttcctggtttacatggaccacccggggacaagggaaaccggggggagagggggaagaaaggctctagagggcctaaaggggataagggagaccaaggagcgcctggattagatgccccctgcccattgggcgaagatggcttaccagtccaaggctgctggaacaagtga

SEQ ID NO: 4566 - DNA, 2061 bp, Homo sapiens
  source 1..2061: mol_type = unassigned DNA
atggtagcggagcgcacccacaaagcggcagccaccggtgcccgcggccctggggagttgggcgcgcccgggacggtggctctggtggcggcgcgggcggagcgcggcgcacggctgccgagtccagggtcgtgcgggctgctgacgctggccctctgctcgctggcactcagcctgctcgcccactttcggacggccgagctgcaggcccgggtgctgcgcctggaagcggagcgcggggagcagcaaatggagacggctattttgggacgagtcaatcaactgctggacgagaaatggaagctccactcaaggaggcgccgggaggccccaaagacatctccaggatgtaactgcccaccaggacctcctggtcccactggaagacccggactcccaggggacaaaggtgccattgggatgcctggacgtgtggggtcccccggagacgctgggctgtccatcattggtccccgcggcccccctggtcaaccaggaactagaggtttccctggatttccgggtcccattgggctggacggcaaaccgggccacccaggaccaaagggcgacatgggtctgacgggtcccccaggacagccgggaccccagggacaaaaaggagaaaagggtcagtgtggagagtacccacaccggctgctgcctctcctcaattcagtgcgactggctccacccccggtcataaaaaggcggacgttccagggcgaacagagccaggccagcatccaaggtccaccagggcccccaggcccccctggaccaagtggacctctggggcacccaggactgccagggcctatggggccacctggcttacctgggcctcctggaccaaagggagacccagggatccagggctaccacggccggaagggagaacggggcatgccagggatgccaggcaagcatggagccaagggggcgcccggaattgccgtggctgggatgaagggtgagccagggatcccaggaaccaagggtgagaagggggctgaaggctcccctgggcttcctggcctcctggggcagaagggagagaaaggcgatgctggcaactccattggaggaggcagaggggaacctggccctccagggctccctgggcccccagggccaaagggagaagcaggtgtcgatggccaggttggccccccagggcagccaggagacaagggggagcgtggagcagctggagaacagggaccagatggccccaagggctccaagggagaaccagggaaaggagagatggtggattacaatggaaacatcaatgaggctctccaggagatccggacgctggccttgatggggcctcctggtcttcctgggcaaattggcccacctggagctccagggattccaggccagaagggggagattggactgccaggccctccaggacacgatggggaaaagggacctcgcggtaaaccaggagacatgggccctcctggtccccaaggccccccaggaaaggatggacctccaggagtgaagggagaaaacgggcacccagggagcccaggagagaagggggaaaaaggggagacaggacaagcaggctcaccgggagagaaaggagaagccggggagaagggcaatccaggagcagaggttcctgggctgccagggccagaggggcctcccggacctccggggctccaaggtgttcctggaccaaagggggaagcaggactagatggagcaaaaggagagaaaggcttccagggagaaaaaggagaccgtggtcccctgggactacccggtactccaggaccaattggagttccaggcccagcgggaccaaagggcgagaggggcagcaaaggagaccctgggatgacaggaccaacgggagcagctgggcttcctggtttacatggaccacccggggacaagggaaaccggggggagagggggaagaaaggctctagagggcctaaaggggataagggagaccaaggagcgcctggattagatgccccctgcccattgggcgaagatggcttaccagtccaaggctgctggaacaagtga

SEQ ID NO: 4567 - DNA, 1833 bp, Homo sapiens
  source 1..1833: mol_type = unassigned DNA
atggtagcggagcgcacccacaaagcggcagccaccggtgcccgcggccctggggagttgggcgcgcccgggacggtggctctggtggcggcgcgggcggagcgcggcgcacggctgccgagtccagggtcgtgcgggctgctgacgctggccctctgctcgctggcactcagcctgctcgcccactttcggacggccgagctgcaggcccgggtgctgcgcctggaagcggagcgcggggagcagcaaatggagacggctattttgggacgagtcaatcaactgctggacgagaaatggaagctccactcaaggaggcgccgggaggccccaaagacatctccaggatgtaactgcccaccaggacctcctggtcccactggaagacccggactcccaggtcaaccaggaactagaggtttccctggatttccgggtcccattgggctggacggcaaaccgggccacccaggaccaaagggcgacatgggtctgacgggtcccccaggacagccgggaccccagggacaaaaaggagaaaagggtcagtgtggagagtacccacaccgggagtgcctaagcagcatgccagcagctctgcgctccagccaaataattgccctgaagggcgaacagagccaggccagcatccaaggtccaccagggcccccaggcccccctggaccaagtggacctctggggcacccaggactgccagggcctatggggccacctggcttacctgggcctcctggaccaaagggagacccagggatccagggctaccacggccggaagggagaacggggcatgccagggatgccaggcaagcatggagccaagggggcgcccggaattgccgtggctgggatgaagggtgagccagggatcccaggaaccaagggtgagaagggggctgaaggctcccctgggcttcctggcctcctggggcagaagggagagaaaggcgatgctggcaactccattggaggaggcagaggggaacctggccctccagggctccctgggcccccagggccaaagggagaagcaggtgtcgatggccaggttggccccccagggcagccaggagacaagggggagcgtggagcagctggagaacagggaccagatggccccaagggctccaagggagaaccagggaaaggagagatggtggattacaatggaaacatcaatgaggctctccaggagatccggacgctggccttgatggggcctcctggtcttcctgggcaaattggcccacctggagctccagggattccaggccagaagggggagattggactgccaggccctccaggacacgatggggaaaagggacctcgcggtaaaccaggagacatgggccctcctggtccccaaggccccccaggaaaggatggacctccaggagtgaagggagaaaacgggcacccagggagcccaggagagaagggggaaaaaggggagacaggacaagcaggctcaccggttcctgggctgccagggccagaggggcctcccggacctccggggctccaaggtgttcctggaccaaagggggaagcaggactagatggagcaaaaggagagaaaggcttccagggagaaaaaggagaccgtggtcccctgggactacccggtactccaggaccaattggagttccaggcccagcgggaccaaagggcgagaggggcagcaaaggagaccctgggatgacaggaccaacgggagcagctgggcttcctggtttacatggaccacccggggacaagggaaaccggggcgaagatggcttaccagtccaaggctgctggaacaagtga

SEQ ID NO: 4568 - DNA, 360 bp, Homo sapiens
  source 1..360: mol_type = unassigned DNA
cttggccgcctaaccagcctcctctgcatcactgacctgtgctccgttcttccagaggtgtgtgtcctgccttctggcctcctgtgattctccacgccccctccctccaccttgcccggccaggtccaaggactccaggcttgtctagcttggcaaagctttgttcttggtgttcagctggacctgcaaacctcctagacaccagcatcacaacacagtcctggggcaattcccccgatccccaccccaacctcagagtgtcctggccagctggggccatggcttctggggaggatttcctgacttagggagtaaagggccaaccaggcgagaagatgagaagacaggcacggggacatt

SEQ ID NO: 4569 - DNA, 1057 bp, Homo sapiens
  source 1..1057: mol_type = unassigned DNA
agatccggacgctggccttgatggggcctcctggtcttcctgggcaaattggcccacctggagctccagggattccaggccagaagggggagattggactgccaggccctccaggacacgatggggaaaagggacctcgcggtaaaccaggagacatgggccctcctggtccccaaggccccccaggaaaggatggacctccaggagtgaagggagaaaacgggcacccagggagcccaggagagaagggggaaaaaggggagacaggacaagcaggctcaccggttcctgggctgccagggccagaggggcctcccggacctccggggctccaaggtgttcctggaccaaagggggaagcaggactagatggagcaaaaggagagaaaggcttccagggagaaaaaggagaccgtggtcccctgggactacccggagcttcaggtttggacggcaggcctgggccaccgggtactccaggaccaattggagttccaggcccagcgggaccaaagggcgagaggggcagcaaaggagaccctgggatgacaggaccaacgggagcagctgggcttcctggtttacatggaccacccggggacaagggaaaccggggggagagggggaagaaaggctctagagggcctaaaggggataagggagaccaaggagcgcctggattagatgccccctgcccattgggcgaagatggcttaccagtccaaggctgctggaacaagtgatgcctctaaccttggattggcctgtgtgtgtgtttgtacatagaatatttatttttatacagttttcactttttgaaaatgccagaagtatgatgcatcttacagattattaaaaaagaaagaaaaacctgcatattttgtacagaaaatatcaacctcttcccttttgtttacaagatgttttgtataagcctatgtctctaatacattttttgtttggtcgtaatgtctgcatgatatttgtgcacatttattaagtatcgaagcttaataaattattgtgtcctggtgccaaagggggccagccagaactg

SEQ ID NO: 4570 - DNA, 749 bp, Homo sapiens
  source 1..749: mol_type = unassigned DNA
aggaaaggatggacctccaggagtgaagggagaaaacgggcacccagggagcccaggagagaagggggaaaaaggggagacaggacaagcaggctcaccggttcctgggctgccagggccagaggggcctcccggacctccggggctccaaggtgttcctggaccaaagggggaagcaggactagatggagcaaaaggagagaaaggcttccagggagaaaaaggagaccgtggtcccctgggactacccggtactccaggaccaattggagttccaggcccagcgggaccaaagggcgagaggggcagcaaaggagaccctgggatgacaggaccaacgggagcagctgggcttcctggtttacatggaccacccggggacaagggaaaccggggggagagggggaagaaaggctctagagggcctaaaggggataagggagaccaaggagcgcctggattagatgccccctgcccattgggcgaagatggcttaccagtccaaggctgctggaacaagtgatgcctctaaccttggattggcctgtgtgtgtgtttgtacatagaatatttatttttatacagttttcactttttgaaaatgccagaagtatgatgcatcttacagattattaaaaaagaaagaaaaacctgcatattttgtacagaaaatatcaacctcttcccttttgtttacaagatgttttgtataagcctatgtctctaatacattttttgtttggtcgtaa

SEQ ID NO: 4571 - DNA, 290 bp, Homo sapiens
  source 1..290: mol_type = unassigned DNA
ggtactccaggaccaattggagttccaggcccagcgggaccaaagggcgagaggggcagcaaaggagaccctgggatgacaggaccaacgggagcagctgggcttcctggtttacatggaccacccggggacaagggaaaccggggacaccgaggttttaaaggagagaaaggggagccggggttaccagggctggacggactggatgccccatgcccattgggcgaagatggcttaccagtccaaggctgctggaacaagggccagagtccttggttagtcgccaagaa

SEQ ID NO: 4572 - DNA, 2586 bp, Homo sapiens
  source 1..2586: mol_type = unassigned DNA
tttattcccgcctgcccagtccctctctaggcatggacagtctaggcctccacgctgatcctcttactgcaaaagaagctgaagggaacacttcactccaaggctcaaggggttacagctctccccaaatttccccaataggtttggagttcaagagctattttatcataccagtaataagagaatttggggtctcacatccccgccctggggtcacacaggaattctctttgaacaaaagagaaaaagatacaagaaattatgctgtgtgaccctgaaaggtggtcgtagagccccttgaagggcagtagggactttttaggaggagcataggcaacaaaaggagagtgcagagcaagcaggcgggtagcatgcttcctgtccctgctggtcctgccaaaccctgcgcttgcagactgcacagccacctttctcaaccaggacttccaccatccacgcaccaatgggaatgccgctctggcccgcaggggctcccttgagcactggccaggtcttccctcagccacaatcccctcccacaatctgggcacctttagttctgccagcagctgccttggcctctctgttcctcaccatacattacttttcattctctgcctgccctgccctccatatccccctgccaccatccacacaccaatgggaatgccgctctggcccacagaggctcctctccctcccggcatccatgtgacgtgtgtcataccgcaccgtggcaggctggggaaggggcacagggtcaccctgaaactgtggaatgcacctcctccccctgcaatcccctccccaacccagaggggaaaatgaaggtcaccctgatttgactctccatgtaaaatggcattttcttccataacatcccatatcaatgtgtcaattttctattaattttactggggaagtgtcttccccttgtttctcactctgcctcctcctctgtgttattatgggcttgaggggcaggggtagctattgctcatgacttttactacaagataaccagacttcctaagccctccatattgggaccaatttctgctgaatgccaggtgatgagaggtttcagcccctggcgtgggtggatgacgtcagaccagggcagcagaggactctcattccacaagctccctcaggactgagcacttgctccgggtctcctgaagccccatgtccatctccttgtctgccctgccagtctagcagacttgggctgagaaccagacctttgcccttggcccagcctcgccttccccactgggtctctagatttctagattccccatagggtatgccagcaaggagaggatatgagggcccaagaaaactcaggaaagtttctatcaccaagggcagaacacgaacatcttgaggctaaaggagctgcatggttgctaccaacaaaggagaccgacggtgtgcagttgattcccatgtttttactgcacttcacccccaaattcccagcaaggtctaaggcttcgccaggaacccttgtcttcttgccaaaggcatgtcagggccatcctgcaatactcatgaggttgcctgtcccttcatgcccctcaccccaccccaggattaatcatcaaagaaggactgtctacatgtcctcctccctgtgcttaggaagagagacaaataagagaatgagaaggctgggaaggcccttagcggtcacatcaagcaactgtccttgccaaggttttatggaggaggaaactgaggccgccttgtgctgagtggcttacccgtgagcagccggcactccatagggccacagcagagactgtttcttcgtggcacggaaggacatctctgcttgctggtcccacgggctaggacagcccctattgacgttgcactatagctgcatgtgacctttaaccaatggtaaaatagccggatttgtttccacctccttctgaggttctgacctgtagtagagaaaagaaatagacaagcgtgggtgggccacatcctgatcagctgccaaaatgcgtgtggcccttgttacccctgtcctgcccacttggtggaccattgcaggaagtctgagccctctgccttcctttctccttgcagggcgaagatggcttaccagtccaaggctgctggaacaagtgatgcctctaaccttggattggcctgtgtgtgtgtttgtacatagaatatttatttttatacagttttcactttttgaaaatgccagaagtatgatgcatcttacagattattaaaaaagaaagaaaaacctgcatattttgtacagaaaatatcaacctcttcccttttgtttacaagatgttttgtataagcctatgtctctaatacattttttgtttggtcgtaatgtctgcatgatatttgtgcacatttattaagtatcgaagcttaataaattattgtgtcctggtgccaaagggggccagccagaactgaggtgctggctagctcatgtgtgaattcacataaatgtagaggtccatgatatttgctaagctaggtgtgtctaagagtattttaaacccttatggattttcattattaaaggaaatgaaacatggc

SEQ ID NO: 4573 - DNA, 2267 bp, Homo sapiens
  source 1..2267: mol_type = unassigned DNA
ggaaagactgggcggagagaaggagagccggtcagattcccctaactttcctggacttggaacgttcttcgaaataacttttttctcacctaggtgtaccccaattaccgctggttgtgctttttcggcacttcctctcctactgctaatttttccgtcctctttgccgggagcagcggaaagggacgttttccagcgatacaagccctttccccctgccccgcagtttggatagagccttttggcagcggctgtcgcctttatttattctatttatttatttattggttctcaagacgcgagaggatggtagcggagcgcacccacaaagcggcagccaccggtgcccgcggccctggggagttgggcgcgcccgggacggtggctctggtggcggcgcgggcggagcgcggcgcacggctgccgagtccagggtcgtgcgggctgctgacgctggccctctgctcgctggcactcagcctgctcgcccactttcggacggccgagctgcaggcccgggtgctgcgcctggaagcggagcgcggggagcagcaaatggagacggctattttgggacgagtcaatcaactgctggacgagaaatggaagctccactcaaggaggcgccgggaggccccaaagacatctccaggatgtaactgcccaccaggtcaaccaggaactagaggtttccctggatttccgggtcccattgggctggacggcaaaccgggccacccaggaccaaagggcgacatgggtctgacgggtcccccaggacagccgggaccccagggacaaaaaggagaaaagggtcagtgtggagagtacccacaccggctgctgcctctcctcaattcagtgcgactggctccacccccggtcataaaaaggcggacgttccagggcgaacagagccaggccagcatccaaggtccaccagggcccccaggcccccctggaccaagtggacctctggggcacccaggactgccagggcctatggggccacctggcttacctgggcctcctggaccaaagggagacccagggatccagggctaccacggccggaagggagaacggggcatgccagggatgccaggcaagcatggagccaagggggcgcccggaattgccgtggctgggatgaagggtgagccagggatcccaggaaccaagggtgagaagggggctgaaggctcccctgggcttcctggcctcctggggcagaagggagagaaaggcgatgctggcaactccattggaggaggcagaggggaacctggccctccagggctccctgggcccccagggccaaagggagaagcaggtgtcgatggccaggttggccccccagggcagccaggagacaagggggagcgtggagcagctggagaacagggaccagatggccccaagggctccaagggagaaccagggaaaggagagatggtggattacaatggaaacatcaatgaggctctccaggagatccggacgctggccttgatggggcctcctggtcttcctgggcaaattggcccacctggagctccagggattccaggccagaagggggagattggactgccaggccctccaggacacgatggggaaaagggacctcgcggtaaaccaggagacatgggccctcctggtccccaaggccccccaggaaaggatggacctccaggagtgaagggagaaaacgggcacccagggagcccaggagagaagggggaaaaaggggagacaggacaagcaggctcaccggttcctgggctgccagggccagaggggcctcccggacctccggggctccaaggtgttcctggaccaaagggggaagcaggactagatggagcaaaaggagagaaaggcttccagggagaaaaaggagaccgtggtcccctgggactacccggagcttcaggtttggacggcaggcctgggccaccgggtactccaggaccaattggagttccaggcccagcgggaccaaagggcgagaggggcagcaaaggagaccctgggatgacaggaccaacgggagcagctgggcttcctggtttacatggaccacccggggacaagggaaaccggggggagagggggaagaaaggctctagagggcctaaaggggataagggagaccaaggagcgcctggattagatgccccctgcccattgggcgaagatggcttaccagtccaaggctgctggaacaagtgatgcctctaaccttggattggcctgtgtgtgtg

SEQ ID NO: 4574 - DNA, 276 bp, Homo sapiens
  source 1..276: mol_type = unassigned DNA
cacccaagactgtgctccttcattcatccagcgtttattggcatctcctactacctgagctgttttaggcagggaacaaagcacagataagccctcctggagcttacattctgatgaagggggcaggcaaggaagggcgagcgcggcggccagcgctcagcgacccttcgtcctccgctaagctccaacgctctgctcgactagccgcgcgccttccggggctccgcagacccgcgagatggcaccaaggaggaacaacgggcagtgctggtgtct

SEQ ID NO: 4575 - DNA, 1412 bp, Homo sapiens
  source 1..1412: mol_type = unassigned DNA
acaggacagacttaagggcgggagggagcccatcccgcttgccccaacgaacgcgggcgcggggctttcctcgcaggttacataaggcagccgcgggtggaggcagcagaggcgagcgcacgtccgtcgagggggaaaggggcgtggggaggcggccggggcggccggtatcccccgggcgtgagtgcgcagcgcgcgggggagcgcagggcgcggcggagtcgggtttcagagcgcgggtgactcggggcgcgggccgggagccgggattctgcccgccgccgccgctgccgagcgccgcctttgttccctgcaggaagggcgagcgcggcggccagcgctcagcgacccttcgtcctccgctaagctccaacgctctgctcgactagccgcgcgccttccggggctccgcagacccgcgagatggcaccaaggaggaacaacgggcagtgctggtgtctgctgatgctgctctcggtctccacgcccctccctgctgtcacccagacccgcggtgcgacagagactgcttcccagggtcacctggacctcacgcagctcatcggtgtcccgctgccctcgtccgtatcctttgtcacaggctatggtggcttcccggcctacagtttcgggcctggtgccaatgttggccgcccagccaggactctcatcccatccaccttcttcagggacttcgccatcagcgtcgtggtgaagcccagcagcacccgtggtggcgtgctcttcgccatcactgacgccttccagaaggtcatctacctgggcctgcggctctcaggtgtggaggacggccaccagcggatcatcctctactacacggagccaggctcccatgtgtcccaagaggctgctgccttctcggtgcctgtgatgacccacaggtggaaccgcttcgccatgattgtccagggtgaggaagtgaccctcctcgtgaactgtgaggagcacagccgcatccccttccagcggtcctcccaggctttggcttttgagtccagcgctggaatcttcatgggcaatgcaggagctacagggctcgagagattcactgtgagttaaagtcccactccaggtagatcagggaggtggatgaacagactcgccatgcaataaatggagcaactattattgttattattttattcttatgtcctcaaagaagcatgcgtgttatgatgggaaataacactaggcctggaaccccaaaacctagatttccatcctcagttttcaacttaccttgtaaatttgagacagttatccagattctctgatcctctctgtgtttccttatctgtaagtggagataagaaaacctaccccacagtcttgtaggtcaaataagataatctgtgtgaaagcactttgtacgttttaagattttatataaa

SEQ ID NO: 4576 - DNA, 5496 bp, Homo sapiens
  source 1..5496: mol_type = unassigned DNA; mol_type = unassigned DNA
acaggacagacttaagggcgggagggagcccatcccgcttgccccaacgaacgcgggcgcggggctttcctcgcaggttacataaggcagccgcgggtggaggcagcagaggcgagcgcacgtccgtcgagggggaaaggggcgtggggaggcggccggggcggccggtatcccccgggcgtgagtgcgcagcgcgcgggggagcgcagggcgcggcggagtcgggtttcagagcgcgggtgactcggggcgcgggccgggagccgggattctgcccgccgccgccgctgccgagcgccgcctttgttccctgcaggaagggcgagcgcggcggccagcgctcagcgacccttcgtcctccgctaagctccaacgctctgctcgactagccgcgcgccttccggggctccgcagacccgcgagatggcaccaaggaggaacaacgggcagtgctggtgtctgctgatgctgctctcggtctccacgcccctccctgctgtcacccagacccgcggtgcgacagagactgcttcccagggtcacctggacctcacgcagctcatcggtgtcccgctgccctcgtccgtatcctttgtcacaggctatggtggcttcccggcctacagtttcgggcctggtgccaatgttggccgcccagccaggactctcatcccatccaccttcttcagggacttcgccatcagcgtcgtggtgaagcccagcagcacccgtggtggcgtgctcttcgccatcactgacgccttccagaaggtcatctacctgggcctgcggctctcaggtgtggaggacggccaccagcggatcatcctctactacacggagccaggctcccatgtgtcccaagaggctgctgccttctcggtgcctgtgatgacccacaggtggaaccgcttcgccatgattgtccagggtgaggaagtgaccctcctcgtgaactgtgaggagcacagccgcatccccttccagcggtcctcccaggctttggcttttgagtccagcgctggaatcttcatgggcaatgcaggagctacagggctcgagagattcactggctccctccagcagctcaccgtgcaccccgaccccaggactcccgaggagctgtgtgaccctgaagagtcctcggcatctggagagaccagtgggctgcaggaggcagacggagtagctgagatcttagaagccgtcacctacactcaagcctcgcccaaagaagcaaaagttgaacccataaacacacctccaactccatcctccccctttgaagacatggaactttctggtgaacctgtacccgaggggaccctggaaaccaccaacatgagcatcatccagcacagcagccccaaacaagggtctggtgagatcctgaatgacacactggagggggttcattctgtggatggtgaccccattactgacagcggctcaggggctggggccttccttgacattgctgaagaaaagaatttagcagcaacagcagcggggctggccgaggtgcccatcagcactgctggagaagcagaggccagcagtgtgcccaccgggggaccaaccctctctatgtccacggagaacccagaggaaggggtcactccaggtccagataatgaagagcgtttagcagcaacagcagcaggggaggccgaggcactcgccagcatgcctggggaagtggaggccagtggtgtggcccccggggagctggacctctccatgtccgcccagagcctcggggaagaggccactgtgggtccaagcagtgaagacagtttaacaacagctgcagctgcaaccgaagtgtccctcagtacttttgaggatgaggaagccagtggggtccccacagatggcctggctcccctcacagccaccatggcccctgagcgggcagtcacttctggtcctggtgatgaagaagacttggcagcagccacaacagaggagcccctcatcacagctgggggtgaagagtccggcagccctccccctgatgggccaccgctgcccctgcccacagtggctcctgaaagatggatcactccagctcaaagagaacatgtgggaatgaaaggacaggctgggcccaaaggagaaaagggtgatgctggggaggagcttcctggccctcctgaaccttctgggcctgttggacccacggcaggagcagaagcagagggctctggcctaggctggggctcggacgtcggctctggctctggtgacctggtgggcagtgagcagctgctgagaggtcctccaggacccccagggccacctggcttacctgggattccaggaaaaccaggaactgatgttttcatgggaccccctggatctcctggagaggatggacctgctggtgaacctgggcccccgggccctgagggacagcctggagttgatggagccaccggccttcccgggatgaaaggggagaagggagcaagagggcctaatggctcagttggtgaaaagggtgaccctggcaacagaggcttacctggacccccggggaaaaagggacaagctggccctcctggggtcatgggacccccagggcctcctggaccccctgggcccccaggccctggatgcacaatgggacttggattcgaggataccgaaggctctggaagcacccagctattgaatgaacccaaactctccagaccaacggctgcaattggtctcaaaggagagaaaggagaccggggacccaagggagaaagggggatggatggagccagtattgtgggaccccctgggccgagagggccacctgggcacatcaaggtcttgtctaattccttgatcaatatcacccatggattcatgaatttctcggacattcctgagctggtggggcctccggggccggacgggttgcctgggctgccaggatttccaggtcctagaggaccaaaaggtgacactggtttacctggctttccaggactaaaaggagaacagggcgagaagggagagccgggtgccatcctgacagaggacattcctctggaaaggctgatggggaaaaagggtgaacctggaatgcatggagccccaggaccaatggggcccaaaggaccaccaggacataaaggagaatttggccttcccgggcgacctggtcgcccaggactgaatggcctcaagggtaccaaaggagatccaggggtcattatgcagggcccacctggcttacctggccctccaggcccccctgggccacctggagctgtgattaacatcaaaggagccattttcccaatacccgtccgaccacactgcaaaatgccagttgatactgctcatcctgggagtccagagctcatcacttttcacggtgttaaaggagagaaaggatcctggggtcttcctggctcaaagggagaaaaaggcgaccagggagcccagggaccaccaggtcctccacttgatctagcttacctgagacactttctgaacaacttgaagggggagaatggagacaaggggttcaaaggtgaaaaaggagaaaaaggagacattaatggcagcttccttatgtctgggcctccaggcctgcccggaaatccaggcccggctggccaaaaaggggagacagtcgttgggccccaaggacccccaggtgctcctggtctgcctgggccacctggctttggaagacctggtgatcctgggccaccggggcccccggggccaccaggacctccagctatcctgggagcagctgtggcccttccaggtccccctggccctccaggacagccagggcttcccggatccagaaacctggtcacagcattcagcaacatggatgacatgctgcagaaagcgcatttggttatagaaggaacattcatctacctgagggacagcactgagtttttcattcgtgttagagatggctggaaaaaattacagctgggagaactgatccccattcctgccgacagccctccaccccctgcgctttccagcaacccacatcagcttctgcctccaccaaaccctatttcaagtgccaattatgagaagcctgctctgcatttggctgctctgaacatgccattttctggggacattcgagctgattttcagtgcttcaagcaggccagagctgcaggactgttgtccacctaccgagcattcttatcttcccatttgcaagatctgtccaccattgtgaggaaagcagagagatacagccttcccatagtgaacctcaagggccaagtactttttaataattgggactcaattttttctggccacggaggtcagttcaatatgcatattccaatatactcctttgatggtcgagacataatgacagatccttcttggccccagaaagtcatttggcatggctccagcccccatggcgtccgccttgtggataactactgtgaagcatggcgaaccgcggacacagcggtcacgggacttgcctccccgctgagcacggggaagattctggaccagaaagcatacagctgtgctaatcggctaattgtcctatgtatcgaaaacagtttcatgacagacgctaggaagtaatggccttctgatgattcttaaagagttttcaattttttcttatgtgaagagttgacactgaaatctaaaatgtttaattgttgtaaatattacagttttttttttttactacatattctttacaacagcaaccaaagaaaacatacctcaatacactcaaaactgaagacatagaggactcagatcaaagacaaaatctgatccatatattggtgctagattctgcaggaaaccccagcagtgtgaacgcatcccaacataggttaagagcaagttgaaaacaaaggccatggcattctgccactgcatccttcagacagttatatcctccttttaaaccattgttgttgagtgtaagatgtccttcatgttttcttataaagtcagtgtttagaaatgttaccctttctaagttatatacagatcaaatgcttttttctttcacgtacatccatcatttgcaactgctgttcgtacacagaaacaggactgctcaaatgatcctatttgtattttctgatgctatcagactctaatgtttttttccctaaaatattattgccatcatgctttaggaattttatatttttacacaatcatattttagtatggtgtctgtttatgtaactctgacttgctggaaaagttgaaactccaaataatctgaaactagaaaagaaatagcacataattactaccttccccttggcggctctcctccccaacccccaccccacaattttatgacttccatttggcaattgttgaattataactgcgactgaaacaaacaggttcatagagatgaattttctgagaaacatatatctacatgttgtataattggattttttttccatgtaagtgaacataaaaacatcttttccgggtgctttcttcatttga

SEQ ID NO: 4577 - DNA, 771 bp, Homo sapiens
  source 1..771: mol_type = unassigned DNA; mol_type = unassigned DNA
gatcaatatcacccatggattcatgaatttctcggacattcctgagctggtggggcctccggggccggacgggttgcctgggctgccaggatttccaatatggggttttgccatgttgcccaggctggtctggaactcctgagctcaagaaatccatctgcgtcagcctcccaaagtgctgggattacaagcatgagcccctgagcctggctgattttctgaactttttacattttctaaaggcacatatcatatgataacactaaaaatagtgctaactagacgttaaaaaacaaaagagagaatggcaaccatgaccacgattgtgaccatgactctgaccatgattcttggttagcagaagaaaaggccaaacccctaagctccagccccggcttggctgctccaagacctggggcacatttcagagcacactttcctctaaatgagtggtcctgtgttcctgagggagtcccaggctctgcaggagagcctccaggacctccactgcagggagtaaggagggggccaaataggcacattccaggccactgaccttcaataagggaagcttcactggacatatttgtatatattaggctttcatttaagactttatttgggggaaaaaaaaggaaggaaaagagtttcactgctaaacaataataacaaatagttgaaagccactgctgtaatgggtaattcactctttcatccagacaagacaggaacttgtgaaaagttaaaatagcaataaagtgttgaaatgcc

SEQ ID NO: 4578 - DNA, 5422 bp, Homo sapiens
  source 1..5422: mol_type = unassigned DNA; mol_type = unassigned DNA
aggttacataaggcagccgcgggtggaggcagcagaggcgagcgcacgtccgtcgagggggaaaggggcgtggggaggcggccggggcggccggtatcccccgggcgtgagtgcgcagcgcgcgggggagcgcagggcgcggcggagtcgggtttcagagcgcgggtgactcggggcgcgggccgggagccgggattctgcccgccgccgccgctgccgagcgccgcctttgttccctgcaggaagggcgagcgcggcggccagcgctcagcgacccttcgtcctccgctaagctccaacgctctgctcgactagccgcgcgccttccggggctccgcagacccgcgagatggcaccaaggaggaacaacgggcagtgctggtgtctgctgatgctgctctcggtctccacgcccctccctgctgtcacccagacccgcggtgcgacagagactgcttcccagggtcacctggacctcacgcagctcatcggtgtcccgctgccctcgtccgtatcctttgtcacaggctatggtggcttcccggcctacagtttcgggcctggtgccaatgttggccgcccagccaggactctcatcccatccaccttcttcagggacttcgccatcagcgtcgtggtgaagcccagcagcacccgtggtggcgtgctcttcgccatcactgacgccttccagaaggtcatctacctgggcctgcggctctcaggtgtggaggacggccaccagcggatcatcctctactacacggagccaggctcccatgtgtcccaagaggctgctgccttctcggtgcctgtgatgacccacaggtggaaccgcttcgccatgattgtccagggtgaggaagtgaccctcctcgtgaactgtgaggagcacagccgcatccccttccagcggtcctcccaggctttggcttttgagtccagcgctggaatcttcatgggcaatgcaggagctacagggctcgagagattcactggctccctccagcagctcaccgtgcaccccgaccccaggactcccgaggagctgtgtgaccctgaagagtcctcggcatctggagagaccagtgggctgcaggaggcagacggagtagctgagatcttagaagccgtcacctacactcaagcctcgcccaaagaagcaaaagttgaacccataaacacacctccaactccatcctccccctttgaagacatggaactttctggtgaacctgtacccgaggggaccctggaaaccaccaacatgagcatcatccagcacagcagccccaaacaaggcaaaggggccatcctgaatgacacactggagggggttcattctgtggatggtgaccccattactgacagcggctcaggggctggggccttccttgacattgctgaagaaaagaatttagcagcaacagcagcggggctggccgaggtgcccatcagcactgctggagaagcagaggccagcagtgtgcccaccgggggaccaaccctctctatgtccacggagaacccagaggaaggggtcactccaggtccagataatgaagagcgtttagcagcaacagcagcaggggaggccgaggcactcgccagcatgcctggggaagtggaggccagtggtgtggcccccggggagctggacctctccatgtccgcccagagcctcggggaagaggccactgtgggtccaagcagtgaagacagtttaacaacagctgcagctgcaaccgaagtgtccctcagtacttttgaggatgaggaagccagtggggtccccacagatggcctggctcccctcacagccaccatggcccctgagcgggcagtcacttctggtcctggtgatgaagaagacttggcagcagccacaacagaggagcccctcatcacagctgggggtgaagagtccggcagccctccccctgatgggccaccgctgcccctgcccacagtggctcctgaaagatggatcactccagctcaaagagaacatgtgggaatgaaaggacaggctgggcccaaaggagaaaagggtgatgctggggaggagcttcctggccctcctgaaccttctgggcctgttggacccacggcaggagcagaagcagagggctctggcctaggctggggctcggacgtcggctctggctctggtgacctggtgggcagtgagcagctgctgagaggtcctccaggacccccagggccacctggcttacctgggattccaggaaaaccaggaactgatgttttcatgggaccccctggatctcctggagaggatggacctgctggtgaacctgggcccccgggccctgagggacagcctggagttgatggagccaccggccttcccgggatgaaaggggagaagggagcaagagggcctaatggctcagttggtgaaaagggtgaccctggcaacagaggcttacctggacccccggggaaaaagggacaagctggccctcctggggtcatgggacccccagggcctcctggaccccctgggcccccaggccctggatgcacaatgggacttggattcgaggataccgaaggctctggaagcacccagctattgaatgaacccaaactctccagaccaacggctgcaattggtctcaaaggagagaaaggagaccggggacccaagggagaaagggggatggatggagccagtattgtgggaccccctgggccgagagggccacctgggcacatcaaggtcttgtctaattccttgatcaatatcacccatggattcatgaatttctcggacattcctgagctggtggggcctccggggccggacgggttgcctgggctgccaggatttccaggtcctagaggaccaaaaggtgacactggtttacctggctttccaggactaaaaggagaacagggcgagaagggagagccgggtgccatcctgacagaggacattcctctggaaaggctgatggggaaaaagggtgaacctggaatgcatggagccccaggaccaatggggcccaaaggaccaccaggacataaaggagaatttggccttcccgggcgacctggtcgcccaggactgaatggcctcaagggtaccaaaggagatccaggggtcattatgcagggcccacctggcttacctggccctccaggcccccctgggccacctggagctgtgattaacatcaaaggagccattttcccaatacccgtccgaccacactgcaaaatgccagttgatactgctcatcctgggagtccagagctcatcacttttcacggtgttaaaggagagaaaggatcctggggtcttcctggctcaaagggagaaaaaggcgaccagggagcccagggaccaccaggtcctccacttgatctagcttacctgagacactttctgaacaacttgaagggggagaatggagacaaggggttcaaaggtgaaaaaggagaaaaaggagacattaatggcagcttccttatgtctgggcctccaggcctgcccggaaatccaggcccggctggccaaaaaggggagacagtcgttgggccccaaggacccccaggtgctcctggtctgcctgggccacctggctttggaagacctggtgatcctgggccaccggggcccccggggccaccaggacctccagctatcctgggagcagctgtggcccttccaggtccccctggccctccaggacagccagggcttcccggatccagaaacctggtcacagcattcagcaacatggatgacatgctgcagaaagcgcatttggttatagaaggaacattcatctacctgagggacagcactgagtttttcattcgtgttagagatggctggaaaaaattacagctgggagaactgatccccattcctgccgacagccctccaccccctgcgctttccagcaacccacatcagcttctgcctccaccaaaccctatttcaagtgccaattatgagaagcctgctctgcatttggctgctctgaacatgccattttctggggacattcgagctgattttcagtgcttcaagcaggccagagctgcaggactgttgtccacctaccgagcattcttatcttcccatttgcaagatctgtccaccattgtgaggaaagcagagagatacagccttcccatagtgaacctcaagggccaagtactttttaataattgggactcaattttttctggccacggaggtcagttcaatatgcatattccaatatactcctttgatggtcgagacataatgacagatccttcttggccccagaaagtcatttggcatggctccagcccccatggcgtccgccttgtggataactactgtgaagcatggcgaaccgcggacacagcggtcacgggacttgcctccccgctgagcacggggaagattctggaccagaaagcatacagctgtgctaatcggctaattgtcctatgtatcgaaaacagtttcatgacagacgctaggaagtaatggccttctgatgattcttaaagagttttcaattttttcttatgtgaagagttgacactgaaatctaaaatgtttaattgttgtaaatattacagttttttttttttactacatattctttacaacagcaaccaaagaaaacatacctcaatacactcaaaactgaagacatagaggactcagatcaaagacaaaatctgatccatatattggtgctagattctgcaggaaaccccagcagtgtgaacgcatcccaacataggttaagagcaagttgaaaacaaaggccatggcattctgccactgcatccttcagacagttatatcctccttttaaaccattgttgttgagtgtaagatgtccttcatgttttcttataaagtcagtgtttagaaatgttaccctttctaagttatatacagatcaaatgcttttttctttcacgtacatccatcatttgcaactgctgttcgtacacagaaacaggactgctcaaatgatcctatttgtattttctgatgctatcagactctaatgtttttttccctaaaatattattgccatcatgctttaggaattttatatttttacacaatcatattttagtatggtgtctgtttatgtaactctgacttgctggaaaagttgaaactccaaataatctgaaactagaaaagaaatagcacataattactaccttccccttggcggctctcctccccaacccccaccccacaattttatgacttccatttggcaattgttgaattataactgcgactgaaacaaacaggttcatagagatgaattttctgagaaacatatatctacatgttgtataattggattttttttccatgtaagtgaacataaaaacatcttttccgggtgctttcttcatttga

SEQ ID NO: 4579 - DNA, 5436 bp, Homo sapiens
  source 1..5436: mol_type = unassigned DNA; mol_type = unassigned DNA
ctcccagcggcggcggctgcagcgcggcggtccgagcgggtgcaccgcggcggaggaggcagcatcccgcggcgctgacggtcctggggagagcatggcgccgaggtgcccctggccatggccgcggcggcggcgcctcctggacgtgctcgcgcccctggtcctgctgctcggggtccgcgcggcctccgcggagccagagcgcatcagcgaggaggtggggctgctgcagctccttggggaccccccgccccagcaggtcacccagacggatgaccccgacgtcgggctggcctacgtctttgggccagatgccaacagtggccaagtggcccggtaccacttccccagcctcttcttccgtgacttctcactgctgttccacatccggccagccacagagggcccaggggtgctgttcgccatcacggactcggcgcaggccatggtcttgctgggcgtgaagctctctggggtgcaggacgggcaccaggacatctccctgctctacacagaaccaggtgcaggccagacccacacagccgccagcttccggctccccgccttcgtcggccagtggacacacttagccctcagtgtggcaggtggctttgtggccctctacgtggactgtgaggagttccagagaatgccgcttgctcggtcctcacggggcctggagctggagcctggcgccgggctcttcgtggctcaggcggggggagcggaccctgacaagttccagggggtgatcgctgagctgaaggtgcgcagggacccccaggtgagccccatgcactgcctggacgaggaaggcgatgactcagatggggcatccggagactctggcagcgggctcggggacgcccgggagcttctcagggaggagacgggcgcggccctaaaacccaggctccccgcgccaccccccgtcaccacgccacccttggctggaggcagcagcacggaagattccagaagtgaagaagtcgaggagcagaccacggtggcttcgttaggagctcagacacttcctggctcagattctgtctccacgtgggacgggagtgtccggacccctgggggccgcgtgaaagagggcggcctgaaggggcagaaaggggagccaggtgttccgggcccacctggccgggcaggccccccaggatccccatgcctacctggtcccccgggtctcccgtgcccagtgagtcccctgggtcctgcaggcccagcgttgcaaactgtccccggaccacaaggacccccagggcctccggggagggacggcacccctggaagggacggcgagccgggcgaccccggtgaagacggaaagccgggcgacaccgggccacaaggcttccccgggactccaggggacgtaggtcccaagggcgacaagggagaccctggggttggagagagagggcccccaggaccccaagggcctccagggcccccaggaccctccttcagacacgacaagctgaccttcattgacatggagggatctggcttcgggggcgatctggaggccctgcggggtcctcgaggcttccctggacctcccggaccccccggtgtcccaggcctgcccggcgagccaggccgctttggggtgaacagctccgacgtcccaggacccgccggccttcctggtgtgcctgggcgcgagggtccccccgggtttcctggcctcccgggacccccaggccctccgggaagagaggggcccccaggaaggactgggcagaaaggcagcctgggtgaagcaggcgccccaggacataaggggagcaagggagcccccggtcctgctggtgctcgtggggagagcggcctggcaggagcccccggacctgctggaccaccaggcccccctgggccccctgggcccccaggaccaggactccccgctggatttgatgacatggaaggctccggggggcccttctggtcaacagcccgaagcgctgatgggccacagggacctcccggcctgccgggacttaagggggatcctggcgtgcctgggctgccgggggcgaagggagaagttggagcagatggagtccccgggttccccggcctccctggcagagagggcattgctgggccccaggggccaaagggagacagaggcagccggggagaaaagggagatccagggaaggacggagtcgggcagccgggcctccctggcccccccggacccccgggacctgtggtctacgtgtcggagcaggacggatccgtcctgagcgtgccgggacctgagggccggccgggtttcgcaggctttcccggacctgcaggacccaagggcaacctgggctctaagggcgaacgaggctccccgggacccaagggtgagaagggtgaaccgggcagcatcttcagccccgacggcggtgccctgggccctgcccagaaaggagccaagggagagccgggcttccgaggacccccgggtccatacggacggccggggtacaagggagagattggctttcctggacggccgggtcgccccgggatgaacggattgaaaggagagaaaggggagccgggagatgccagccttggatttggcatgaggggaatgcccggccccccaggacctccagggcccccaggccctccagggactcctgtttacgacagcaatgtgtttgctgagtccagccgccccgggcctccaggattgccagggaatcagggccctccaggacccaagggcgccaaaggagaagtgggcccccccggaccaccagggcagtttccgtttgactttcttcagttggaggctgaaatgaagggggagaagggagaccgaggtgatgcaggacagaaaggcgaaaggggggagcccgggggcggcggtttcttcggctccagcctgcccggcccccccggccccccaggccccccaggcccacgtggctaccctgggattccaggtcccaagggagagagcatccggggccagcccggcccacctggacctcagggaccccccggcatcggctacgaggggcgccagggccctcccggccccccaggccccccagggcccccttcatttcctggccctcacaggcagactatcagcgttcccggccctccgggcccccctgggccccctgggccccctggaaccatgggcgcctcctcaggggtgaggctctgggctacacgccaggccatgctgggccaggtgcacgaggttcccgagggctggctcatcttcgtggccgagcaggaggagctctacgtccgcgtgcagaacgggttccggaaggtccagctggaggcccggacaccactcccacgagggacggacaatgaagtggccgccttgcagccccccgtggtgcagctgcacgacagcaacccctacccgcggcgggagcacccccaccccaccgcgcggccctggcgggcagatgacatcctggccagcccccctcgcctgcccgagccccagccctaccccggagccccgcaccacagctcctacgtgcacctgcggccggcgcgacccacaagcccacccgcccacagccaccgcgacttccagccggtgctccacctggttgcgctcaacagccccctgtcaggcggcatgcggggcatccgcggggccgacttccagtgcttccagcaggcgcgggccgtggggctggcgggcaccttccgcgccttcctgtcctcgcgcctgcaggacctgtacagcatcgtgcgccgtgccgaccgcgcagccgtgcccatcgtcaacctcaaggacgagctgctgtttcccagctgggaggctctgttctcaggctctgagggtccgctgaagcccggggcacgcatcttctcctttgacggcaaggacgtcctgaggcaccccacctggccccagaagagcgtgtggcatggctcggaccccaacgggcgcaggctgaccgagagctactgtgagacgtggcggacggaggctccctcggccacgggccaggcctcctcgctgctggggggcaggctcctggggcagagtgccgcgagctgccatcacgcctacatcgtgctctgcattgagaacagcttcatgactgcctccaagtagccaccgcctggatgcggatggccggagaggaccggcggctcggaggaagcccccaccgtgggcagggagcggccggccagcccctggccccaggacctggctgccatactttcctgtatagttcacgtttcatgtaatcctcaagaaataaaaggaagccaaagagtgtatttttttaaaagtttaaaacagaagcctgatgctgacattcacctgccccaactctcccctgacctgtgagcccagctgggtcaggcagggtgcagtatcatgccctgtgcaacctcttggcctgatcagaccacggctcgatttctccaggatttcctgctttgggaagccgtgctcgccccagcaggtgctgacttcatctcccacctagcagcaccgttctgtgcacaaaacccagacctgttagcagacaggccccgtgaggcaatgggagctgaggccacactcagcacaaggccatctgggctcctccagggtgtgtgctcgccctgcggtagatgggagggaggctcaggtccctggggctagggggagccccttctgctcagctctgggccattctccacagcaaccccaggctgaagcaggttcccaagctcagaggcgcactgtgacccccagctccggcctgtcctccaacaccaagcacagcagcctggggctggcctcccaaatgagccatgagatgatacatccaaagcagacagctccaccctggccgagtccaagctgggagattcaagggacccatgagttggggtctggcagcctcccatccagggcccccatctcatgcccctggctgggacgtggctcagccagcacttgtccagctgagcgccaggatggaacacggccacatcaaagaggctgaggctggcacaggacatgcggtagccagcacacagggcagtgagggagggctgtcatctgtgcactgcccatggacaggctggctccagatgcagggcagtcattggctgtctcctaggaaacccatatccttaccctccttgggactgaaggggaaccccggggtgcccacaggccgccctgcgggtgaacaaagcagccacgaggtgcaacaaggtcctctgtcagtcacagccacccctgagatccggcaacatcaacccgagtcattcgttctgtggagggacaagtggactcagggcagcgccaggctgaccacagcacagccaacacgcacctgcctcaggactgcgacgaaaccggtggggctggttctgtaattgtgtgtgatgtgaagccaattcagacaggcaaataaaagtgaccttttacactga

SEQ ID NO: 4580 - DNA, 5924 bp, Homo sapiens
  source 1..5924: mol_type = unassigned DNA; mol_type = unassigned DNA
agaggccctcccgccgcccgcagctccagccgcactgccccgatggctccctacccctgtggctgccacatcctgctgctgctcttctgctgcctggcggctgcccgggccaacctgctgaacctgaactggctttggttcaataatgaggacaccagccatgcagctaccacgatccctgagccccaggggcccctgcctgtgcagcccacagcagataccaccacacacgtgaccccccggaatggttccacagagccagcgacagcccctggcagccctgagccaccctcagagctgctggaagatggccaggacacccccacttctgccgagagcccggacgcgccagaggagaacattgccggtgtcggagccgagatcctgaacgtggccaaaggcatccggagcttcgtccagctgtggaatgacactgtccccactgagagcttggccagggcggaaaccctggtcctggagactcctgtgggcccccttgccctcgctgggccttccagcaccccccaggagaatgggaccactctctggcccagccgtggcattcctagctctccgggcgcccacacaaccgaggctggcaccttgcctgcacccaccccatcgcctccctccctgggcaggccctgggcaccactcacggggccctcagtgccaccaccatcttcagagcgcatcagcgaggaggtggggctgctgcagctccttggggaccccccgccccagcaggtcacccagacggatgaccccgacgtcgggctggcctacgtctttgggccagatgccaacagtggccaagtggcccggtaccacttccccagcctcttcttccgtgacttctcactgctgttccacatccggccagccacagagggcccaggggtgctgttcgccatcacggactcggcgcaggccatggtcttgctgggcgtgaagctctctggggtgcaggacgggcaccaggacatctccctgctctacacagaaccaggtgcaggccagacccacacagccgccagcttccggctccccgccttcgtcggccagtggacacacttagccctcagtgtggcaggtggctttgtggccctctacgtggactgtgaggagttccagagaatgccgcttgctcggtcctcacggggcctggagctggagcctggcgccgggctcttcgtggctcaggcggggggagcggaccctgacaagttccagggggtgatcgctgagctgaaggtgcgcagggacccccaggtgagccccatgcactgcctggacgaggaaggcgatgactcagatggggcatccggagactctggcagcgggctcggggacgcccgggagcttctcagggaggagacgggcgcggccctaaaacccaggctccccgcgccaccccccgtcaccacgccacccttggctggaggcagcagcacggaagattccagaagtgaagaagtcgaggagcagaccacggtggcttcgttaggagctcagacacttcctggctcagattctgtctccacgtgggacgggagtgtccggacccctgggggccgcgtgaaagagggcggcctgaaggggcagaaaggggagccaggtgttccgggcccacctggccgggcaggccccccaggatccccatgcctacctggtcccccgggtctcccgtgcccagtgagtcccctgggtcctgcaggcccagcgttgcaaactgtccccggaccacaaggacccccagggcctccggggagggacggcacccctggaagggacggcgagccgggcgaccccggtgaagacggaaagccgggcgacaccgggccacaaggcttccccgggactccaggggacgtaggtcccaagggcgacaagggagaccctggggttggagagagagggcccccaggaccccaagggcctccagggcccccaggaccctccttcagacacgacaagctgaccttcattgacatggagggatctggcttcgggggcgatctggaggccctgcggggtcctcgaggcttccctggacctcccggaccccccggtgtcccaggcctgcccggcgagccaggccgctttggggtgaacagctccgacgtcccaggacccgccggccttcctggtgtgcctgggcgcgagggtccccccgggtttcctggcctcccgggacccccaggccctccgggaagagaggggcccccaggaaggactgggcagaaaggcagcctgggtgaagcaggcgccccaggacataaggggagcaagggagcccccggtcctgctggtgctcgtggggagagcggcctggcaggagcccccggacctgctggaccaccaggcccccctgggccccctgggcccccaggaccaggactccccgctggatttgatgacatggaaggctccggggggcccttctggtcaacagcccgaagcgctgatgggccacagggacctcccggcctgccgggacttaagggggatcctggcgtgcctgggctgccgggggcgaagggagaagttggagcagatggagtccccgggttccccggcctccctggcagagagggcattgctgggccccaggggccaaagggagacagaggcagccggggagaaaagggagatccagggaaggacggagtcgggcagccgggcctccctggcccccccggacccccgggacctgtggtctacgtgtcggagcaggacggatccgtcctgagcgtgccgggacctgagggccggccgggtttcgcaggctttcccggacctgcaggacccaagggcaacctgggctctaagggcgaacgaggctccccgggacccaagggtgagaagggtgaaccgggcagcatcttcagccccgacggcggtgccctgggccctgcccagaaaggagccaagggagagccgggcttccgaggacccccgggtccatacggacggccggggtacaagggagagattggctttcctggacggccgggtcgccccgggatgaacggattgaaaggagagaaaggggagccgggagatgccagccttggatttggcatgaggggaatgcccggccccccaggacctccagggcccccaggccctccagggactcctgtttacgacagcaatgtgtttgctgagtccagccgccccgggcctccaggattgccagggaatcagggccctccaggacccaagggcgccaaaggagaagtgggcccccccggaccaccagggcagtttccgtttgactttcttcagttggaggctgaaatgaagggggagaagggagaccgaggtgatgcaggacagaaaggcgaaaggggggagcccgggggcggcggtttcttcggctccagcctgcccggcccccccggccccccaggccccccaggcccacgtggctaccctgggattccaggtcccaagggagagagcatccggggccagcccggcccacctggacctcagggaccccccggcatcggctacgaggggcgccagggccctcccggccccccaggccccccagggcccccttcatttcctggccctcacaggcagactatcagcgttcccggccctccgggcccccctgggccccctgggccccctggaaccatgggcgcctcctcaggggtgaggctctgggctacacgccaggccatgctgggccaggtgcacgaggttcccgagggctggctcatcttcgtggccgagcaggaggagctctacgtccgcgtgcagaacgggttccggaaggtccagctggaggcccggacaccactcccacgagggacggacaatgaagtggccgccttgcagccccccgtggtgcagctgcacgacagcaacccctacccgcggcgggagcacccccaccccaccgcgcggccctggcgggcagatgacatcctggccagcccccctcgcctgcccgagccccagccctaccccggagccccgcaccacagctcctacgtgcacctgcggccggcgcgacccacaagcccacccgcccacagccaccgcgacttccagccggtgctccacctggttgcgctcaacagccccctgtcaggcggcatgcggggcatccgcggggccgacttccagtgcttccagcaggcgcgggccgtggggctggcgggcaccttccgcgccttcctgtcctcgcgcctgcaggacctgtacagcatcgtgcgccgtgccgaccgcgcagccgtgcccatcgtcaacctcaaggacgagctgctgtttcccagctgggaggctctgttctcaggctctgagggtccgctgaagcccggggcacgcatcttctcctttgacggcaaggacgtcctgaggcaccccacctggccccagaagagcgtgtggcatggctcggaccccaacgggcgcaggctgaccgagagctactgtgagacgtggcggacggaggctccctcggccacgggccaggcctcctcgctgctggggggcaggctcctggggcagagtgccgcgagctgccatcacgcctacatcgtgctctgcattgagaacagcttcatgactgcctccaagtagccaccgcctggatgcggatggccggagaggaccggcggctcggaggaagcccccaccgtgggcagggagcggccggccagcccctggccccaggacctggctgccatactttcctgtatagttcacgtttcatgtaatcctcaagaaataaaaggaagccaaagagtgtatttttttaaaagtttaaaacagaagcctgatgctgacattcacctgccccaactctcccctgacctgtgagcccagctgggtcaggcagggtgcagtatcatgccctgtgcaacctcttggcctgatcagaccacggctcgatttctccaggatttcctgctttgggaagccgtgctcgccccagcaggtgctgacttcatctcccacctagcagcaccgttctgtgcacaaaacccagacctgttagcagacaggccccgtgaggcaatgggagctgaggccacactcagcacaaggccatctgggctcctccagggtgtgtgctcgccctgcggtagatgggagggaggctcaggtccctggggctagggggagccccttctgctcagctctgggccattctccacagcaaccccaggctgaagcaggttcccaagctcagaggcgcactgtgacccccagctccggcctgtcctccaacaccaagcacagcagcctggggctggcctcccaaatgagccatgagatgatacatccaaagcagacagctccaccctggccgagtccaagctgggagattcaagggacccatgagttggggtctggcagcctcccatccagggcccccatctcatgcccctggctgggacgtggctcagccagcacttgtccagctgagcgccaggatggaacacggccacatcaaagaggctgaggctggcacaggacatgcggtagccagcacacagggcagtgagggagggctgtcatctgtgcactgcccatggacaggctggctccagatgcagggcagtcattggctgtctcctaggaaacccatatccttaccctccttgggactgaaggggaaccccggggtgcccacaggccgccctgcgggtgaacaaagcagccacgaggtgcaacaaggtcctctgtcagtcacagccacccctgagatccggcaacatcaacccgagtcattcgttctgtggagggacaagtggactcagggcagcgccaggctgaccacagcacagccaacacgcacctgcctcaggactgcgacgaaaccggtggggctggttctgtaattgtgtgtgatgtgaagccaattcagacaggcaaataaaagtgaccttttacactga

SEQ ID NO: 4581 - DNA, 3386 bp, Homo sapiens
  source 1..3386: mol_type = unassigned DNA; mol_type = unassigned DNA
ggagaagttggagcagatggagtccccgggttccccggcctccctggcagagagggcattgctgggccccaggggccaaagggagacagaggcagccggggagaaaagggagatccagggaaggacggagtcgggcagccgggcctccctggcccccccggacccccgggacctgtggtctacgtgtcggagcaggacggatccgtcctgagcgtgccgggacctgagggccggccgggtttcgcaggctttcccggacctgcaggacccaagggcaacctgggctctaagggcgaacgaggctccccgggacccaagggtgagaagggtgaaccgggcagcatcttcagccccgacggcggtgccctgggccctgcccagaaaggagccaagggagagccgggcttccgaggacccccgggtccatacggacggccggggtacaagggagagattggctttcctggacggccgggtcgccccgggatgaacggattgaaaggagagaaaggggagccgggagatgccagccttggatttggcatgaggggaatgcccggccccccaggacctccagggcccccaggccctccagggactcctgtttacgacagcaatgtgtttgctgagtccagccgccccgggcctccaggattgccagggaatcagggccctccaggacccaagggcgccaaaggagaagtgggcccccccggaccaccagggcagtttccgtttgactttcttcagttggaggctgaaatgaagggggagaagggagaccgaggtgatgcaggacagaaaggcgaaaggggggagcccgggggcggcggtttcttcggctccagcctgcccggcccccccggccccccaggccccccaggcccacgtggctaccctgggattccaggtcccaagggagagagcatccggggccagcccggcccacctggacctcagggaccccccggcatcggctacgaggggcgccagggccctcccggccccccaggccccccagggcccccttcatttcctggccctcacaggcagactatcagcgttcccggccctccgggcccccctgggccccctgggccccctggaaccatgggcgcctcctcagggcaggtgaggctctgggctacacgccaggccatgctgggccaggtgcacgaggttcccgagggctggctcatcttcgtggccgagcaggaggagctctacgtccgcgtgcagaacgggttccggaaggtccagctggaggcccggacaccactcccacgagggacggacaatgaagtggccgccttgcagccccccgtggtgcagctgcacgacagcaacccctacccgcggcgggagcacccccaccccaccgcgcggccctggcgggcagatgacatcctggccagcccccctcgcctgcccgagccccagccctaccccggagccccgcaccacagctcctacgtgcacctgcggccggcgcgacccacaagcccacccgcccacagccaccgcgacttccagccggtgctccacctggttgcgctcaacagccccctgtcaggcggcatgcggggcatccgcggggccgacttccagtgcttccagcaggcgcgggccgtggggctggcgggcaccttccgcgccttcctgtcctcgcgcctgcaggacctgtacagcatcgtgcgccgtgccgaccgcgcagccgtgcccatcgtcaacctcaaggacgagctgctgtttcccagctgggaggctctgttctcaggctctgagggtccgctgaagcccggggcacgcatcttctcctttgacggcaaggacgtcctgaggcaccccacctggccccagaagagcgtgtggcatggctcggaccccaacgggcgcaggctgaccgagagctactgtgagacgtggcggacggaggctccctcggccacgggccaggcctcctcgctgctggggggcaggctcctggggcagagtgccgcgagctgccatcacgcctacatcgtgctctgcattgagaacagcttcatgactgcctccaagtagccaccgcctggatgcggatggccggagaggaccggcggctcggaggaagcccccaccgtgggcagggagcggccggccagcccctggccccaggacctggctgccatactttcctgtatagttcacgtttcatgtaatcctcaagaaataaaaggaagccaaagagtgtatttttttaaaagtttaaaacagaagcctgatgctgacattcacctgccccaactctcccctgacctgtgagcccagctgggtcaggcagggtgcagtatcatgccctgtgcaacctcttggcctgatcagaccacggctcgatttctccaggatttcctgctttgggaagccgtgctcgccccagcaggtgctgacttcatctcccacctagcagcaccgttctgtgcacaaaacccagacctgttagcagacaggccccgtgaggcaatgggagctgaggccacactcagcacaaggccatctgggctcctccagggtgtgtgctcgccctgcggtagatgggagggaggctcaggtccctggggctagggggagccccttctgctcagctctgggccattctccacagcaaccccaggctgaagcaggttcccaagctcagaggcgcactgtgacccccagctccggcctgtcctccaacaccaagcacagcagcctggggctggcctcccaaatgagccatgagatgatacatccaaagcagacagctccaccctggccgagtccaagctgggagattcaagggacccatgagttggggtctggcagcctcccatccagggcccccatctcatgcccctggctgggacgtggctcagccagcacttgtccagctgagcgccaggatggaacacggccacatcaaagaggctgaggctggcacaggacatgcggtagccagcacacagggcagtgagggagggctgtcatctgtgcactgcccatggacaggctggctccagatgcagggcagtcattggctgtctcctaggaaacccatatccttaccctccttgggactgaaggggaaccccggggtgcccacaggccgccctgcgggtgaacaaagcagccacgaggtgcaacaaggtcctctgtcagtcacagccacccctgagatccggcaacatcaacccgagtcattcgttctgtggagggacaagtggactcagggcagcgccaggctgaccacagcacagccaacacgcacctgcctcaggactgcgacgaaaccggtggggctggttctgtaattgtgtgtgatgtgaagccaattcagacaggcaaataaaagtgaccttttacactga

SEQ ID NO: 4582 - DNA, 588 bp, Homo sapiens
  source 1..588: mol_type = unassigned DNA; mol_type = unassigned DNA
taagggcgaacgaggctccccgggacccaagggtgagaagggtgaaccgggcagcatcttcagccccgacggcggtgccctgggccctgcccagaaaggagccaagggagagccgggcttccgaggacccccgggtccatacggacggccggggtacaagggagagattggctttcctggacggccgggtcgccccgggatgaacggattgaaaggagagaaaggggagccgggagatgccagccttggatttggcatgaggggaatgcccggccccccaggacctccagggcccccaggccctccagggactcctgtttacgacagcaatgtgtttgctgagtccagccgccccgggcctccaggattgccagggaatcagggccctccaggacccaagggcgccaaaggagaagtgggcccccccggaccaccaggtgagcaactctggacatcccaggcaggagagccatggcgtggccagcactgaagtgtggtcacacctagagccgccaccacaagcaggtcctggaccctcactgggtggtgaccacctcaccctgcgggaggaaggaagccccttctggg

SEQ ID NO: 4583 - DNA, 839 bp, Homo sapiens
  source 1..839: mol_type = unassigned DNA; mol_type = unassigned DNA
ctatcagcgttcccggccctccgggcccccctgggccccctgggccccctggaaccatgggcgcctcctcaggggtgaggctctgggctacacgccaggccatgctgggccaggtgcacgaggttcccgagggctggctcatcttcgtggccgagcaggaggagctctacgtccgcgtgcagaacgggttccggaaggtccaggacaatgaagtggccgccttgcagccccccgtggtgcagctgcacgacagcaacccctacccgcggcgggagcacccccaccccaccgcgcggccctggcgggcagatgacatcctggccagcccccctcgcctgcccgagccccagccctaccccggagccccgcaccacagctcctacgtgcacctgcggccggcgcgacccacaagcccacccgcccacagccaccgcgacttccagccggtgctccacctggttgcgctcaacagccccctgtcaggcggcatgcggggcatccgcggggccgacttccagtgcttccagcaggcgcgggccgtggggctggcgggcaccttccgcgccttcctgtcctcgcgcctgcaggacctgtacagcatcgtgcgccgtgccgaccgcgcagccgtgcccatcgtcaacctcaaggacgagctgctgtttcccagctgggaggctctgttctcaggctctgagggtccgctgaagcccggggcacgcatcttctcctttgacggcaaggacgtcctgaggcaccccacctggccccagaagagcgtgtggcatggctcggaccccaacgggcgcaggctgaccgagagctactgtgagacgtggcgg

SEQ ID NO: 4584 - DNA, 2515 bp, Homo sapiens
  source 1..2515: mol_type = unassigned DNA; mol_type = unassigned DNA
cctggggcttaaggaaggcgagaggctcaggccccggacagggatgggagcaggtggcagccagcgcttcttaaactttcaaacttttggtaaagtttagtaaaatacttttgtgagcagttttgggtttaaagaaaagtgagctcaagcttctgaaagtggatgaacacatggcgtgtgaggggctcctggtgggtcatgtcacagtgaacgtttacaaagataaatgtcacctcacacacccgataataagacaaggcgcctgacgggacgaggcggcaggggggctcaggccctccagggccacgtgacgtccacagcacggccccggctggggggcaggctgtcccgtggctctgcaccccgcgttataaacaccaaggtgggatgaaatgcatcctctctgcttagcacgggccttgctcaccagcctggctcctcagacacacctgggattgccccttccaggacaggccagcccctttcctgctttcccaaaatggtctgggtggcaggagtggccgctctgatccaggtgggtgcggccatgcttgcagggccccgggaaggtttaccttcgtgtggcaaaggtgaggacgggtagaagccccatgccgccgaaacggcctgtgacatccgtgggagcctccatggcagaacactgcacactgacacagccctgactcctggagccctcccaccttccaacacacccaccttccttctagagccctcccaccttccctctggaaccctcccaccttccctctggagccctcccaccttccctctagcactccctccctctcgccaccggccccctcctaggcctggccagcccctgcagcaccccagacagtgaatcccactccagtcccttcatctggccagggagaggctgccagtctcatagcagatgctgagctggtgcccactgtgtgccaggtgtgcttgtaggcacccggatgcagccccatcctaactttcaggggctttggtcctgacaggaggaggcaggggatggcatcctagcaaacgcgtgctgggagggctgggtgctgggcagggagggcaacctgccgtggactgggagggctgggtgctgggcagggagggcaccctcctgtgggctgggagggccgggtgttggggagggagaggcgggtgctgggcagggagggcaccctcctgtgggctgggagggccgggtgttggggagggagaggtgggtgctgggcagggagggcaacctgctgtggactgggagggccgggtgctgggcagggagggcaccctcctgtgggctggcagggccgggtgctgggcagggagggcaccctgctgtggactgggagggccgggtgctgggcagggagcgtaccctggcacaggcttggaggggcaggtgctgggcagggagggcaccctcctgtgggctgggagggccaggtgctggggcgggagagtcgggtgctgggcagggagggcaccctggctcaggcccagccgcaggtcctgggtgaccctgctgctttcttccagctggaggcccggacaccactcccacgagggacggacaatgaagtggccgccttgcagccccccgtggtgcagctgcacgacagcaacccctacccgcggcgggagcacccccaccccaccgcgcggccctggcgggcagatgacatcctggccagcccccctcgcctgcccgagccccagccctaccccggagccccgcaccacagctcctacgtgcacctgcggccggcgcgacccacaagcccacccgcccacagccaccgcgacttccagccggtgctccacctggttgcgctcaacagccccctgtcaggcggcatgcggggcatccgcggggccgacttccagtgcttccagcaggcgcgggccgtggggctggcgggcaccttccgcgccttcctgtcctcgcgcctgcaggacctgtacagcatcgtgcgccgtgccgaccgcgcagccgtgcccatcgtcaacctcaaggacgagctgctgtttcccagctgggaggctctgttctcaggctctgagggtccgctgaagcccggggcacgcatcttctcctttgacggcaaggacgtcctgaggcaccccacctggccccagaagagcgtgtggcatggctcggaccccaacgggcgcaggctgaccgagagctactgtgagacgtggcggacggaggctccctcggccacgggccaggcctcctcgctgctggggggcaggctcctggggcagagtgccgcgagctgccatcacgcctacatcgtgctctgcattgagaacagcttcatgactgcctccaagtagccaccgcctggatgcggatggccggagaggaccggcggctcggaggaagcccccaccgtgggcagggagcggccggccagcccctggccccaggacctggctgccatactttcctgtatagttcacgtttcatgtaatcctcaagaaataaaaggaagccaaagagtgt

SEQ ID NO: 4585 - DNA, 6586 bp, Homo sapiens
  source 1..6586: mol_type = unassigned DNA; mol_type = unassigned DNA
atggctccctacccctgtggctgccacatcctgctgctgctcttctgctgcctggcggctgcccgggccaacctgctgaacctgaactggctttggttcaataatgaggacaccagccatgcagctaccacgatccctgagccccaggggcccctgcctgtgcagcccacagcagataccaccacacacgtgaccccccggaatggttccacagagccagcgacagcccctggcagccctgagccaccctcagagctgctggaagatggccaggacacccccacttctgccgagagcccggacgcgccagaggagaacattgccggtgtcggagccgagatcctgaacgtggccaaaggcatccggagcttcgtccagctgtggaatgacactgtccccactgagagcttggccagggcggaaaccctggtcctggagactcctgtgggcccccttgccctcgctgggccttccagcaccccccaggagaatgggaccactctctggcccagccgtggcattcctagctctccgggcgcccacacaaccgaggctggcaccttgcctgcacccaccccatcgcctccctccctgggcaggccctgggcaccactcacggggccctcagtgccaccaccatcttcaggtagagcttctctctcctccttgctgggcggggcccctccctggggaagcctgcaggacccagacagccaaggactctcgcccgccgcagccgctcccagccagcagctccaacgccctgacgtccgcctgcgcacgccacttctgcaccccctggtgatgggctccctgggcaagcacgcggccccctccgccttctcctctgggctcccgggcgcactgtctcaggtcgcagtcaccactttaaccagggacagcggtgcttgggtctcccacgtggctaactctgtggggccgggtcttgctaataactctgccctgctcggggctgaccccgaggcccccgccggtcgctgcctgcccctgccaccctccctgccagtctgcggccacctgggcatctcacgcttctggctgcccaaccacctccaccacgagagcggcgagcaggtgcgggccggggcacgggcgtgggggggcctgctgcagacgcactgccaccccttcctcgcctggttcttctgcctgctgctggtccccccatgcggcagcgtcccgccgcccgccccgccaccctgctgccagttctgcgaggccctgcaggatgcgtgttggagccgcctgggcgggggccggctgcccgtcgcctgtgcctcgctcccgacccaggaggatgggtactgtgtgctcattgggccggctgcagagcgcatcagcgaggaggtggggctgctgcagctccttggggaccccccgccccagcaggtcacccagacggatgaccccgacgtcgggctggcctacgtctttgggccagatgccaacagtggccaagtggcccggtaccacttccccagcctcttcttccgtgacttctcactgctgttccacatccggccagccacagagggcccaggggtgctgttcgccatcacggactcggcgcaggccatggtcttgctgggcgtgaagctctctggggtgcaggacgggcaccaggacatctccctgctctacacagaaccaggtgcaggccagacccacacagccgccagcttccggctccccgccttcgtcggccagtggacacacttagccctcagtgtggcaggtggctttgtggccctctacgtggactgtgaggagttccagagaatgccgcttgctcggtcctcacggggcctggagctggagcctggcgccgggctcttcgtggctcaggcggggggagcggaccctgacaagttccagggggtgatcgctgagctgaaggtgcgcagggacccccaggtgagccccatgcactgcctggacgaggaaggcgatgactcagatggggcatccggagactctggcagcgggctcggggacgcccgggagcttctcagggaggagacgggcgcggccctaaaacccaggctccccgcgccaccccccgtcaccacgccacccttggctggaggcagcagcacggaagattccagaagtgaagaagtcgaggagcagaccacggtggcttcgttaggagctcagacacttcctggctcagattctgtctccacgtgggacgggagtgtccggacccctgggggccgcgtgaaagagggcggcctgaaggggcagaaaggggagccaggtgttccgggcccacctggccgggcaggccccccaggatccccatgcctacctggtcccccgggtctcccgtgcccagtgagtcccctgggtcctgcaggcccagcgttgcaaactgtccccggaccacaaggacccccagggcctccggggagggacggcacccctggaagggacggcgagccgggcgaccccggtgaagacggaaagccgggcgacaccgggccacaaggcttccccgggactccaggggacgtaggtcccaagggcgacaagggagaccctggggttggagagagagggcccccaggaccccaagggcctccagggcccccaggaccctccttcagacacgacaagctgaccttcattgacatggagggatctggcttcgggggcgatctggaggccctgcggggtcctcgaggcttccctggacctcccggaccccccggtgtcccaggcctgcccggcgagccaggccgctttggggtgaacagctccgacgtcccaggacccgccggccttcctggtgtgcctgggcgcgagggtccccccgggtttcctggcctcccgggacccccaggccctccgggaagagaggggcccccaggaaggactgggcagaaaggcagcctgggtgaagcaggcgccccaggacataaggggagcaagggagcccccggtcctgctggtgctcgtggggagagcggcctggcaggagcccccggacctgctggaccaccaggcccccctgggccccctgggcccccaggaccaggactccccgctggatttgatgacatggaaggctccggggggcccttctggtcaacagcccgaagcgctgatgggccacagggacctcccggcctgccgggacttaagggggatcctggcgtgcctgggctgccgggggcgaagggagaagttggagcagatggagtccccgggttccccggcctccctggcagagagggcattgctgggccccaggggccaaagggagacagaggcagccggggagaaaagggagatccagggaaggacggagtcgggcagccgggcctccctggcccccccggacccccgggacctgtggtctacgtgtcggagcaggacggatccgtcctgagcgtgccgggacctgagggccggccgggtttcgcaggctttcccggacctgcaggacccaagggcaacctgggctctaagggcgaacgaggctccccgggacccaagggtgagaagggtgaaccgggcagcatcttcagccccgacggcggtgccctgggccctgcccagaaaggagccaagggagagccgggcttccgaggacccccgggtccatacggacggccggggtacaagggagagattggctttcctggacggccgggtcgccccgggatgaacggattgaaaggagagaaaggggagccgggagatgccagccttggatttggcatgaggggaatgcccggccccccaggacctccagggcccccaggccctccagggactcctgtttacgacagcaatgtgtttgctgagtccagccgccccgggcctccaggattgccagggaatcagggccctccaggacccaagggcgccaaaggagaagtgggcccccccggaccaccagggcagtttccgtttgactttcttcagttggaggctgaaatgaagggggagaagggagaccgaggtgatgcaggacagaaaggcgaaaggggggagcccgggggcggcggtttcttcggctccagcctgcccggcccccccggccccccaggccccccaggcccacgtggctaccctgggattccaggtcccaagggagagagcatccggggccagcccggcccacctggacctcagggaccccccggcatcggctacgaggggcgccagggccctcccggccccccaggccccccagggcccccttcatttcctggccctcacaggcagactatcagcgttcccggccctccgggcccccctgggccccctgggccccctggaaccatgggcgcctcctcaggggtgaggctctgggctacacgccaggccatgctgggccaggtgcacgaggttcccgagggctggctcatcttcgtggccgagcaggaggagctctacgtccgcgtgcagaacgggttccggaaggtccagctggaggcccggacaccactcccacgagggacggacaatgaagtggccgccttgcagccccccgtggtgcagctgcacgacagcaacccctacccgcggcgggagcacccccaccccaccgcgcggccctggcgggcagatgacatcctggccagcccccctcgcctgcccgagccccagccctaccccggagccccgcaccacagctcctacgtgcacctgcggccggcgcgacccacaagcccacccgcccacagccaccgcgacttccagccggtgctccacctggttgcgctcaacagccccctgtcaggcggcatgcggggcatccgcggggccgacttccagtgcttccagcaggcgcgggccgtggggctggcgggcaccttccgcgccttcctgtcctcgcgcctgcaggacctgtacagcatcgtgcgccgtgccgaccgcgcagccgtgcccatcgtcaacctcaaggacgagctgctgtttcccagctgggaggctctgttctcaggctctgagggtccgctgaagcccggggcacgcatcttctcctttgacggcaaggacgtcctgaggcaccccacctggccccagaagagcgtgtggcatggctcggaccccaacgggcgcaggctgaccgagagctactgtgagacgtggcggacggaggctccctcggccacgggccaggcctcctcgctgctggggggcaggctcctggggcagagtgccgcgagctgccatcacgcctacatcgtgctctgcattgagaacagcttcatgactgcctccaagtagccaccgcctggatgcggatggccggagaggaccggcggctcggaggaagcccccaccgtgggcagggagcggccggccagcccctggccccaggacctggctgccatactttcctgtatagttcacgtttcatgtaatcctcaagaaataaaaggaagccaaagagtgtatttttttaaaagtttaaaacagaagcctgatgctgacattcacctgccccaactctcccctgacctgtgagcccagctgggtcaggcagggtgcagtatcatgccctgtgcaacctcttggcctgatcagaccacggctcgatttctccaggatttcctgctttgggaagccgtgctcgccccagcaggtgctgacttcatctcccacctagcagcaccgttctgtgcacaaaacccagacctgttagcagacaggccccgtgaggcaatgggagctgaggccacactcagcacaaggccatctgggctcctccagggtgtgtgctcgccctgcggtagatgggagggaggctcaggtccctggggctagggggagccccttctgctcagctctgggccattctccacagcaaccccaggctgaagcaggttcccaagctcagaggcgcactgtgacccccagctccggcctgtcctccaacaccaagcacagcagcctggggctggcctcccaaatgagccatgagatgatacatccaaagcagacagctccaccctggccgagtccaagctgggagattcaagggacccatgagttggggtctggcagcctcccatccagggcccccatctcatgcccctggctgggacgtggctcagccagcacttgtccagctgagcgccaggatggaacacggccacatcaaagaggctgaggctggcacaggacatgcggtagccagcacacagggcagtgagggagggctgtcatctgtgcactgcccatggacaggctggctccagatgcagggcagtcattggctgtctcctaggaaacccatatccttaccctccttgggactgaaggggaaccccggggtgcccacaggccgccctgcgggtgaacaaagcagccacgaggtgcaacaaggtcctctgtcagtcacagccacccctgagatccggcaacatcaacccgagtcattcgttctgtggagggacaagtggactcagggcagcgccaggctgaccacagcacagccaacacgcacctgcctcaggactgcgacgaaaccggtggggctggttctgtaattgtgtgtgatgtgaagccaattcagacaggcaaataaaagtgaccttttacactg

SEQ ID NO: 4586 - DNA, 6727 bp, Homo sapiens
  source 1..6727: mol_type = unassigned DNA; mol_type = unassigned DNA
agcagacgggagtttctcctcggggtcggagcaggaggcacgcggagtgtgaggccacgcatgagcggacgctaaccccctccccagccacaaagagtctacatgtctagggtctagacatgttcagctttgtggacctccggctcctgctcctcttagcggccaccgccctcctgacgcacggccaagaggaaggccaagtcgagggccaagacgaagacatcccaccaatcacctgcgtacagaacggcctcaggtaccatgaccgagacgtgtggaaacccgagccctgccggatctgcgtctgcgacaacggcaaggtgttgtgcgatgacgtgatctgtgacgagaccaagaactgccccggcgccgaagtccccgagggcgagtgctgtcccgtctgccccgacggctcagagtcacccaccgaccaagaaaccaccggcgtcgagggacccaagggagacactggcccccgaggcccaaggggacccgcaggcccccctggccgagatggcatccctggacagcctggacttcccggaccccccggaccccccggacctcccggaccccctggcctcggaggaaactttgctccccagctgtcttatggctatgatgagaaatcaaccggaggaatttccgtgcctggccccatgggtccctctggtcctcgtggtctccctggcccccctggtgcacctggtccccaaggcttccaaggtccccctggtgagcctggcgagcctggagcttcaggtcccatgggtccccgaggtcccccaggtccccctggaaagaatggagatgatggggaagctggaaaacctggtcgtcctggtgagcgtgggcctcctgggcctcagggtgctcgaggattgcccggaacagctggcctccctggaatgaagggacacagaggtttcagtggtttggatggtgccaagggagatgctggtcctgctggtcctaagggtgagcctggcagccctggtgaaaatggagctcctggtcagatgggcccccgtggcctgcctggtgagagaggtcgccctggagcccctggccctgctggtgctcgtggaaatgatggtgctactggtgctgccgggccccctggtcccaccggccccgctggtcctcctggcttccctggtgctgttggtgctaagggtgaagctggtccccaagggccccgaggctctgaaggtccccagggtgtgcgtggtgagcctggcccccctggccctgctggtgctgctggccctgctggaaaccctggtgctgatggacagcctggtgctaaaggtgccaatggtgctcctggtattgctggtgctcctggcttccctggtgcccgaggcccctctggaccccagggccccggcggccctcctggtcccaagggtaacagcggtgaacctggtgctcctggcagcaaaggagacactggtgctaagggagagcctggccctgttggtgttcaaggaccccctggccctgctggagaggaaggaaagcgaggagctcgaggtgaacccggacccactggcctgcccggaccccctggcgagcgtggtggacctggtagccgtggtttccctggcgcagatggtgttgctggtcccaagggtcccgctggtgaacgtggttctcctggccctgctggccccaaaggatctcctggtgaagctggtcgtcccggtgaagctggtctgcctggtgccaagggtctgactggaagccctggcagccctggtcctgatggcaaaactggcccccctggtcccgccggtcaagatggtcgccccggacccccaggcccacctggtgcccgtggtcaggctggtgtgatgggattccctggacctaaaggtgctgctggagagcccggcaaggctggagagcgaggtgttcccggaccccctggcgctgtcggtcctgctggcaaagatggagaggctggagctcagggaccccctggccctgctggtcccgctggcgagagaggtgaacaaggccctgctggctcccccggattccagggtctccctggtcctgctggtcctccaggtgaagcaggcaaacctggtgaacagggtgttcctggagaccttggcgcccctggcccctctggagcaagaggcgagagaggtttccctggcgagcgtggtgtgcaaggtccccctggtcctgctggtccccgaggggccaacggtgctcccggcaacgatggtgctaagggtgatgctggtgcccctggagctcccggtagccagggcgcccctggccttcagggaatgcctggtgaacgtggtgcagctggtcttccagggcctaagggtgacagaggtgatgctggtcccaaaggtgctgatggctctcctggcaaagatggcgtccgtggtctgactggccccattggtcctcctggccctgctggtgcccctggtgacaagggtgaaagtggtcccagcggccctgctggtcccactggagctcgtggtgcccccggagaccgtggtgagcctggtccccccggccctgctggctttgctggcccccctggtgctgacggccaacctggtgctaaaggcgaacctggtgatgctggtgctaaaggcgatgctggtccccctggccctgccggacccgctggaccccctggccccattggtaatgttggtgctcctggagccaaaggtgctcgcggcagcgctggtccccctggtgctactggtttccctggtgctgctggccgagtcggtcctcctggcccctctggaaatgctggaccccctggccctcctggtcctgctggcaaagaaggcggcaaaggtccccgtggtgagactggccctgctggacgtcctggtgaagttggtccccctggtccccctggccctgctggcgagaaaggatcccctggtgctgatggtcctgctggtgctcctggtactcccgggcctcaaggtattgctggacagcgtggtgtggtcggcctgcctggtcagagaggagagagaggcttccctggtcttcctggcccctctggtgaacctggcaaacaaggtccctctggagcaagtggtgaacgtggtccccctggtcccatgggcccccctggattggctggaccccctggtgaatctggacgtgagggggctcctggtgccgaaggttcccctggacgagacggttctcctggcgccaagggtgaccgtggtgagaccggccccgctggaccccctggtgctcctggtgctcctggtgcccctggccccgttggccctgctggcaagagtggtgatcgtggtgagactggtcctgctggtcccgccggtcctgtcggccctgttggcgcccgtggccccgccggaccccaaggcccccgtggtgacaagggtgagacaggcgaacagggcgacagaggcataaagggtcaccgtggcttctctggcctccagggtccccctggccctcctggctctcctggtgaacaaggtccctctggagcctctggtcctgctggtccccgaggtccccctggctctgctggtgctcctggcaaagatggactcaacggtctccctggccccattgggccccctggtcctcgcggtcgcactggtgatgctggtcctgttggtccccccggccctcctggacctcctggtccccctggtcctcccagcgctggtttcgacttcagcttcctgccccagccacctcaagagaaggctcacgatggtggccgctactaccgggctgatgatgccaatgtggttcgtgaccgtgacctcgaggtggacaccaccctcaagagcctgagccagcagatcgagaacatccggagcccagagggcagccgcaagaaccccgcccgcacctgccgtgacctcaagatgtgccactctgactggaagagtggagagtactggattgaccccaaccaaggctgcaacctggatgccatcaaagtcttctgcaacatggagactggtgagacctgcgtgtaccccactcagcccagtgtggcccagaagaactggtacatcagcaagaaccccaaggacaagaggcatgtctggttcggcgagagcatgaccgatggattccagttcgagtatggcggccagggctccgaccctgccgatgtggccatccagctgaccttcctgcgcctgatgtccaccgaggcctcccagaacatcacctaccactgcaagaacagcgtggcctacatggaccagcagactggcaacctcaagaaggccctgctcctccagggctccaacgagatcgagatccgcgccgagggcaacagccgcttcacctacagcgtcactgtcgatggctgcacgagtcacaccggagcctggggcaagacagtgattgaatacaaaaccaccaagacctcccgcctgcccatcatcgatgtggcccccttggacgttggtgccccagaccaggaattcggcttcgacgttggccctgtctgcttcctgtaaactccctccatcccaacctggctccctcccacccaaccaactttccccccaacccggaaacagacaagcaacccaaactgaaccccctcaaaagccaaaaaatgggagacaatttcacatggactttggaaaatatttttttcctttgcattcatctctcaaacttagtttttatctttgaccaaccgaacatgaccaaaaaccaaaagtgcattcaaccttaccaaaaaaaaaaaaaaaaaaagaataaataaataactttttaaaaaaggaagcttggtccacttgcttgaagacccatgcgggggtaagtccctttctgcccgttgggcttatgaaaccccaatgctgccctttctgctcctttctccacaccccccttggggcctcccctccactccttcccaaatctgtctccccagaagacacaggaaacaatgtattgtctgcccagcaatcaaaggcaatgctcaaacacccaagtggcccccaccctcagcccgctcctgcccgcccagcacccccaggccctgggggacctggggttctcagactgccaaagaagccttgccatctggcgctcccatggctcttgcaacatctccccttcgtttttgagggggtcatgccgggggagccaccagcccctcactgggttcggaggagagtcaggaagggccacgacaaagcagaaacatcggatttggggaacgcgtgtcaatcccttgtgccgcagggctgggcgggagagactgttctgttccttgtgtaactgtgttgctgaaagactacctcgttcttgtcttgatgtgtcaccggggcaactgcctgggggcggggatgggggcagggtggaagcggctccccattttataccaaaggtgctacatctatgtgatgggtggggtggggagggaatcactggtgctatagaaattgagatgcccccccaggccagcaaatgttcctttttgttcaaagtctatttttattccttgatatttttctttttttttttttttttttgtggatggggacttgtgaatttttctaaaggtgctatttaacatgggaggagagcgtgtgcggctccagcccagcccgctgctcactttccaccctctctccacctgcctctggcttctcaggcctctgctctccgacctctctcctctgaaaccctcctccacagctgcagcccatcctcccggctccctcctagtctgtcctgcgtcctctgtccccgggtttcagagacaacttcccaaagcacaaagcagtttttccccctaggggtgggaggaagcaaaagactctgtacctattttgtatgtgtataataatttgagatgtttttaattattttgattgctggaataaagcatgtggaaatgacccaaacataatccgcagtggcctcctaatttccttctttggagttgggggaggggtagacatggggaaggggctttggggtgatgggcttgccttccattcctgccctttccctccccactattctcttctagatccctccataaccccactcccctttctctcacccttcttataccgcaaacctttctacttcctctttcattttctattcttgcaatttccttgcaccttttccaaatcctcttctcccctgcaataccatacaggcaatccacgtgcacaacacacacacacactcttcacatctggggttgtccaaacctcatacccactccccttcaagcccatccactctccaccccctggatgccctgcacttggtggcggtgggatgctcatggatactgggagggtgaggggagtggaacccgtgaggaggacctgggggcctctccttgaactgacatgaagggtcatctggcctctgctcccttctcacccacgctgacctcctgccgaaggagcaacgcaacaggagaggggtctgctgagcctggcgagggtctgggagggaccaggaggaaggcgtgctccctgctcgctgtcctggccctgggggagtgagggagacagacacctgggagagctgtggggaaggcactcgcaccgtgctcttgggaaggaaggagacctggccctgctcaccacggactgggtgcctcgacctcctgaatccccagaacacaacccccctgggctggggtggtctggggaaccatcgtgcccccgcctcccgcctactcctttttaagctt

SEQ ID NO: 4587 - DNA, 1147 bp, Homo sapiens
  source 1..1147: mol_type = unassigned DNA; mol_type = unassigned DNA
ggtccccctggctctgctggtgctcctggcaaagatggactcaacggtctccctggccccattgggccccctggtcctcgcggtcgcactggtgatgctggtcctgttgtatgtagcccctcatcccctctgctcatggccctccagcccccaaagcacttggatgccggtaatccccactctcttccctctctgtgcagggtccccccggccctcctggacctcctggtccccctggtcctcccagcgctggtttcgacttcagcttcctgccccagccacctcaagagaaggctcacgatggtggccgctactaccgggctgatgatgccaatgtggttcgtgaccgtgacctcgaggtggacaccaccctcaagagcctgagccagcagatcgagaacatccggagcccagagggcagccgcaagaaccccgcccgcacctgccgtgacctcaagatgtgccactctgactggaagagtggagagtactggattgaccccaaccaaggctgcaacctggatgccatcaaagtcttctgcaacatggagactggtgagacctgcgtgtaccccactcagcccagtgtggcccagaagaactggtacatcagcaagaaccccaaggacaagaggcatgtctggttcggcgagagcatgaccgatggattccaggtgcgtgagctggacctcagagccagtgttaggagatgggctagcccagtgctcagaagggacatgaagtcctggagtaggtctctgctaagggtgatggacagagctgggctgggaggcaggggtctcaggtccctgatagtggttcagacacaggctgccgatgggcaggtggtgcctcctctcgatataacggtgcattgggcagctctctgaggaccctggacagggaggccaggcaggactagaggttcccgcatagcggctcactcttccctctctcccctcccctgcagttcgagtatggcggccagggctccgaccctgccgatgtggccatccagctgaccttcctgcgcctgatgtccaccgaggcctcccagaacatcacctaccactgcaagaacagcgtggcctacatggaccagcagactggcaacctcaagaaggccctgctcctccagggctccaac

SEQ ID NO: 4588 - DNA, 836 bp, Homo sapiens
  source 1..836: mol_type = unassigned DNA; mol_type = unassigned DNA
caagagtggtgatcgtggtgagactgtaagtagctgggctccagttccctgtacctggtcaggccagggactcttcaggcctccttagaggcctggggatgggtgtcggacttcacccaggcagggggaggaaaggagatcctgcaagatgtcagggccttaatccaaaaaactgagttaaagctcagccccaagtcccctctcccagacaggaccgcctctcccatgagttggccccagctcccgtgaagattgcagtggggaggtttccctgggagttgggagagatggccacagtgggaagcagctgaggagagagagatccagcagaggggaggcctcatcctgcagccccagcctcagccttccctggccaagagctcatgctttccttgctctccccagggtcctgctggtcccgccggtcctgtcggccctgttggcgcccgtggccccgccggaccccaaggcccccgtggtgacaagggtgagacaggcgaacagggcgacagaggcataaagggtcaccgtggcttctctggcctccagggtccccctggccctcctgtaagtatgctcagcccctccccagtccccatgctgtgctgtgggataggagggggagcttcgcctcagtttccccctctggatagtcattctttcccctccctagtggggactggggtctgaagatttgtgggcatgtccaagtagcttctgagagggtgaggggtacacagagagggattatgggagaggtctctgcctatggacaccctcgggctagatttccagaataatgaaggggcatgggttgcccacactgcccttgtctc

SEQ ID NO: 4589 - DNA, 789 bp, Homo sapiens
  source 1..789: mol_type = unassigned DNA; mol_type = unassigned DNA
tgccgaaggttcccctggacgagacggttctcctggcgccaagggtgaccgtggtgagaccggccccgctggaccccctggtgctcctggtgctcctggtgcccctggccccgttggccctgctggcaagagtggtgatcgtggtgagactgtaagtagctgggctccagttccctgtacctggtcaggccagggactcttcaggcctccttagaggcctggggatgggtgtcggacttcacccaggcagggggaggaaaggagatcctgcaagatgtcagggccttaatccaaaaaactgagttaaagctcagccccaagtcccctctcccagacaggaccgcctctcccatgagttggccccagctcccgtgaagattgcagtggggaggtttccctgggagttgggagagatggccacagtgggaagcagctgaggagagagagatccagcagaggggaggcctcatcctgcagccccagcctcagccttccctggccaagagctcatgctttccttgctctccccagggtcctgctggtcccgccggtcctgtcggccctgttggcgcccgtggccccgccgtaagtaccctgctgtgtcccccatgcctttagaactctacagatgcagacagtgccccactcgatgccaatggaacttccgcctgacagtttgtccctttctctcttctagggaccccaaggcccccgtggtgacaagggtgagacaggcgaacagggcgacagaggcataaagggtcaccgtggcttctctggcctccaggg

SEQ ID NO: 4590 - DNA, 396 bp, Homo sapiens
  source 1..396: mol_type = unassigned DNA; mol_type = unassigned DNA
ggtgatgctggtcccaaaggtgctgatggctctcctggcaaagatggcgtccgtggtctgactggccccattggtcctcctggccctgctggtgcccctggtgacaagggtgaaagtggtcccagcggccctgctggtcccactggagctcgtggtgcccccgtaagtacagaagacctgttaagaccccatacttggcccttccctcccttcacacagcacccctggccctgtctgtgccttcaccccttgcctctcccctcaccgcatccccgccttccctcctgtcagcgcatctctccaatctgactccttttcttctagggagaccgtggtgagcctggtccccccggccctgctggctttgctggcccccctgtgagtaccaagaccccc

SEQ ID NO: 4591 - DNA, 600 bp, Homo sapiens
  source 1..600: mol_type = unassigned DNA; mol_type = unassigned DNA
gtgcctcccatccttagggtcccgccggtcaagatggtcgccccggacccccaggcccacctggtgcccgtggtcaggctggtgtgatgggattccctggacctaaaggtgctgctggagagcccggcaaggctggagagcgaggtgttcccggaccccctggcgctgtcggtcctgctggcaaagatggagaggctggagctcagggaccccctggccctgctggtcccgctggcgagagaggtgaacaaggccctgctggctcccccggattccagggtctccctggtcctgctggtcctccaggtgaagcaggcaaacctggtgaacagggtgttcctggagaccttggcgcccctggcccctctggagcaagaggcgagagaggtttccctggcgagcgtggtgtgcaaggtccccctggtcctgctggtccccgaggggccaacggtgctcccggcaacgatggtgctaagggtgatgctggtgcccctggagctcccggtagccagggcgcccctggccttcagggaatgcctggtgaacgtggtgcagctggtcttccagggcctaagggtgacagaggtgatgctggtccca

SEQ ID NO: 4592 - DNA, 481 bp, Homo sapiens
  source 1..481: mol_type = unassigned DNA; mol_type = unassigned DNA
gcagggaatccagagggacaggcccccgctcctagctaatcagacagccatcaactagagggattgaggttagacgccggaaagaacttcctcccatgaagggagcagcacagagggaagtgggggctgcatgattgctagtctgggtgacttcttttaagagctgctggaatatgctgtgactttccctcaacccttctattgataaatcttggtccatagtttggggaggggggaagcctttgacacatccctaggaggaagagaggggctgtttgggataatctcaattcagtgctgagaaggggttcctctctaatcacggccagaccccaggaggaaggaccgtgctttccagcagagtggccccaggtgggttttgctcactgtctgttcctctctccctccccctcagggtgttcctggagaccttggcgcccctggcccctctggagcaagaggcgagagaggtttccctggc

SEQ ID NO: 4593 - DNA, 614 bp, Homo sapiens
  source 1..614: mol_type = unassigned DNA
caagggtctgactggaagccctggcagccctggtcctgatggcaaaactggcccccctggtcccgccggtcaagatggtcgccccggacccccaggcccacctggtgcccgtggtcaggctggtgtgatgggattccctggacctaaaggtgctgctgtgagtattaagtgaggatccatgaagagccagggacaaacacacctgagacttgaaggagtcctgggctctgggctcagctgtgccgctgacctgccgtgtggccactcactctcactttctggacctcagcctccctatctgtaaaatgaaagacttctcggcggggcacggtggctcatgcctgtaatcccagcactttgggaggccaaggcgggcagaccatgaggtcaggagtttgagaccagtcgggccaacatagtgaaaccacgtctctactaaaaatacaaaagattagctgggtgtggtggtgtgcacctgtaaccccagctagtcaggaggctgaggcaggagaattgcatgaacccgggaggtggaggttgcagtgagctgagatcacgccattgcactccagcctgggcaacagtgcgagattccatctcaaaaaaaaaaaaaa

SEQ ID NO: 4594 - DNA, 1192 bp, Homo sapiens
  source 1..1192: mol_type = unassigned DNA
ggtgaagctggtccccaagggccccgaggctctgaaggtccccagggtgtgcgtggtgagcctggcccccctggccctgctggtgctgctggccctgctggaaaccctggtgctgatggacagcctggtgctaaaggtgccaatggtgctcctggtattgctggtgctcctggcttccctggtgcccgaggcccctctggaccccagggccccggcggccctcctggtcccaagggtaacagcggtgaacctggtgctcctggcagcaaaggagacactggtgctaagggagagcctggccctgttggtgttcaaggaccccctggccctgctggagaggaaggaaagcgaggagctcgaggtgaacccggacccactggcctgcccggaccccctggcgagcgtggtggacctggtagccgtggtttccctggcgcagatggtgttgctggtcccaagggtcccgctggtgaacgtggttctcctggccctgctggccccaaaggatctcctggtgaagctggtcgtcccggtgaagctggtctgcctggtgccaagggtctgactggaagccctggcagccctggtcctgatggcaaaactggcccccctgtaagtatcactccccctgaaccccctgccattgtcctgtctgcctccctgctgtcctcactgctgctttcgtgcctcccatccttagggtcccgccggtcaagatggtcgccccggacccccaggcccacctggtgcccgtggtcaggctggtgtgatgggattccctggacctaaaggtgctgctgtgagtattaagtgaggatccatgaagagccagggacaaacacacctgagacttgaaggagtcctgggctctgggctcagctgtgccgctgacctgccgtgtggccactcactctcactttctggacctcagcctccctatctgtaaaatgaaagacttctcggcggggcacggtggctcatgcctgtaatcccagcactttgggaggccaaggcgggcagaccatgaggtcaggagtttgagaccagtcgggccaacatagtgaaaccacgtctctactaaaaatacaaaagattagctgggtgtggtggtgtgcacctgtaaccccagctagtcaggaggctgaggcaggagaattgcatgaacccgggaggtggaggttgcagtgagctg

SEQ ID NO: 4595 - DNA, 403 bp, Homo sapiens
  source 1..403: mol_type = unassigned DNA
atggtcctccacatccccagagtcccaccatgaatgaatttctcactcattattctctgatctacagggtgagcctggcagccctggtgaaaatggagctcctggtcagatggtgagtgtgcccagttccagagggcagggatggggcaggaggcaggggcaagatggaggcctgggggaacaaggctgtctcccatctcatctgacttctcttggtttggttgtcagggcccccgtggcctgcctggtgagagaggtcgccctggagcccctggccctgctggtgctcgtggaaatgatggtgctactggtgctgccgggccccctgtgagtgtggcctgtaggcctcagggcctgggagtggggaggggtctcagtatctgctcttggggctgacaatggg

SEQ ID NO: 4596 - DNA, 594 bp, Homo sapiens
  source 1..594: mol_type = unassigned DNA
gcagactgtccctcaatttgggattgtctcattagattagatgcagggatgcatctttgcaggaatgtcttaaaagcaatgttattcttctcagcacatcacaccaggaagtgcatgatgtcagtttcttccatcctcagtgccgtcttctgcctttcaattcactgtcctcactctgacttctcttgtttgttctagaactttgctccccagctgtcttatggctatgatgagaaatcaaccggaggaatttccgtgcctggccccatgggtccctctggtcctcgtggtctccctggcccccctggtgcacctggtccccaaggcttccaaggtccccctggtgagcctggcgagcctggagcttcaggtcccatgggtccccgaggtcccccaggtccccctggaaagaatggagatgatggggaagctggaaaacctggtcgtcctggtgagcgtgggcctcctgggcctcagggtgctcgaggattgcccggaacagctggcctccctggaatgaagggacacagaggtttcagtggtttggatggtgccaagggagatgctggtcctgctggtcctaagggtgagcct

SEQ ID NO: 4597 - DNA, 640 bp, Homo sapiens
  source 1..640: mol_type = unassigned DNA
agcagacgggagtttctcctcggggtcggagcaggaggcacgcggagtgtgaggccacgcatgagcggacgctaaccccctccccagccacaaagagtctacatgtctagggtctagacatgttcagctttgtggacctccggctcctgctcctcttagcggccaccgccctcctgacgcacggccaagaggaaggccaagtcgagggccaagacgaagacatcccaccaatcacctgcgtacagaacggcctcaggtaccatgaccgagacgtgtggaaacccgagccctgccggatctgcgtctgcgacaacggcaaggtgttgtgcgatgacgtgatctgtgacgagaccaagaactgccccggcgccgaagtccccgagggcgagtgctgtcccgtctgccccgacggctcagagtcacccaccgaccaagaaaccaccggcgtcgaggtaatctcctgccctcgaattttgcccctgcgcggcccgtgactcctcacagtcctcccttctctaacctggcctcttgtttcttctcccccaatcccacagggacccaagggagacactggcccccgaggcccaaggggacccgcaggcccccctggccgagatggcatccctggacagcctggact

SEQ ID NO: 4598 - DNA, 549 bp, Homo sapiens
  source 1..549: mol_type = unassigned DNA
gcggactaaagctttgtttaaattcctgagaactggaaagagttacagcctccctggccaggcgcctcggcgctgtcacccgcgctgatgaggagcaggcgagcttttaaggatttgaggaaagaagaacggggggaggggcgggaagtgaaaaatccaagtgtgcctcttagacccgggggaaaggtggttaagctgggggttgcagtcactactgacaacgcccctcttccgcctgtcccagtcccaccaatcacctgcgtacagaacggcctcaggtaccatgaccgagacgtgtggaaacccgagccctgccggatctgcgtctgcgacaacggcaaggtgttgtgcgatgacgtgatctgtgacgagaccaagaactgccccggcgccgaagtccccgagggcgagtgctgtcccgtctgccccgacggctcagagtcacccaccgaccaagaaaccaccggcgtcgagggacccaagggagacactggcccccgaggcccaaggggacccgcaggcccccctggccgagatggcatccctgga

SEQ ID NO: 4599 - DNA, 5411 bp, Homo sapiens
  source 1..5411: mol_type = unassigned DNA
gtgtcccatagtgtttccaaacttggaaagggcgggggagggcgggaggatgcggagggcggaggtatgcagacaacgagtcagagtttccccttgaaagcctcaaaagtgtccacgtcctcaaaaagaatggaaccaatttaagaagccagccccgtggccacgtcccttcccccattcgctccctcctctgcgcccccgcaggctcctcccagctgtggctgcccgggcccccagccccagccctcccattggtggaggcccttttggaggcaccctagggccagggaaacttttgccgtataaatagggcagatccgggctttattattttagcaccacggcagcaggaggtttcggctaagttggaggtactggccacgactgcatgcccgcgcccgccaggtgatacctccgccggtgacccaggggctctgcgacacaaggagtctgcatgtctaagtgctagacatgctcagctttgtggatacgcggactttgttgctgcttgcagtaaccttatgcctagcaacatgccaatctttacaagaggaaactgtaagaaagggcccagccggagatagaggaccacgtggagaaaggggtccaccaggccccccaggcagagatggtgaagatggtcccacaggccctcctggtccacctggtcctcctggcccccctggtctcggtgggaactttgctgctcagtatgatggaaaaggagttggacttggccctggaccaatgggcttaatgggacctagaggcccacctggtgcagctggagccccaggccctcaaggtttccaaggacctgctggtgagcctggtgaacctggtcaaactggtcctgcaggtgctcgtggtccagctggccctcctggcaaggctggtgaagatggtcaccctggaaaacccggacgacctggtgagagaggagttgttggaccacagggtgctcgtggtttccctggaactcctggacttcctggcttcaaaggcattaggggacacaatggtctggatggattgaagggacagcccggtgctcctggtgtgaagggtgaacctggtgcccctggtgaaaatggaactccaggtcaaacaggagcccgtgggcttcctggtgagagaggacgtgttggtgcccctggcccagctggtgcccgtggcagtgatggaagtgtgggtcccgtgggtcctgctggtcccattgggtctgctggccctccaggcttcccaggtgcccctggccccaagggtgaaattggagctgttggtaacgctggtcctgctggtcccgccggtccccgtggtgaagtgggtcttccaggcctctccggccccgttggacctcctggtaatcctggagcaaacggccttactggtgccaagggtgctgctggccttcccggcgttgctggggctcccggcctccctggaccccgcggtattcctggccctgttggtgctgccggtgctactggtgccagaggacttgttggtgagcctggtccagctggctccaaaggagagagcggtaacaagggtgagcccggctctgctgggccccaaggtcctcctggtcccagtggtgaagaaggaaagagaggccctaatggggaagctggatctgccggccctccaggacctcctgggctgagaggtagtcctggttctcgtggtcttcctggagctgatggcagagctggcgtcatgggccctcctggtagtcgtggtgcaagtggccctgctggagtccgaggacctaatggagatgctggtcgccctggggagcctggtctcatgggacccagaggtcttcctggttcccctggaaatatcggccccgctggaaaagaaggtcctgtcggcctccctggcatcgacggcaggcctggcccaattggcccagctggagcaagaggagagcctggcaacattggattccctggacccaaaggccccactggtgatcctggcaaaaacggtgataaaggtcatgctggtcttgctggtgctcggggtgctccaggtcctgatggaaacaatggtgctcagggacctcctggaccacagggtgttcaaggtggaaaaggtgaacagggtccccctggtcctccaggcttccagggtctgcctggcccctcaggtcccgctggtgaagttggcaaaccaggagaaaggggtctccatggtgagtttggtctccctggtcctgctggtccaagaggggaacgcggtcccccaggtgagagtggtgctgccggtcctactggtcctattggaagccgaggtccttctggacccccagggcctgatggaaacaagggtgaacctggtgtggttggtgctgtgggcactgctggtccatctggtcctagtggactcccaggagagaggggtgctgctggcatacctggaggcaagggagaaaagggtgaacctggtctcagaggtgaaattggtaaccctggcagagatggtgctcgtggtgctcctggtgctgtaggtgcccctggtcctgctggagccacaggtgaccggggcgaagctggggctgctggtcctgctggtcctgctggtcctcggggaagccctggtgaacgtggtgaggtcggtcctgctggccccaatggatttgctggtcctgctggtgctgctggtcaacctggtgctaaaggagaaagaggagccaaagggcctaagggtgaaaacggtgttgttggtcccacaggccccgttggagctgctggcccagctggtccaaatggtccccccggtcctgctggaagtcgtggtgatggaggcccccctggtatgactggtttccctggtgctgctggacggactggtcccccaggaccctctggtatttctggccctcctggtccccctggtcctgctgggaaagaagggcttcgtggtcctcgtggtgaccaaggtccagttggccgaactggagaagtaggtgcagttggtccccctggcttcgctggtgagaagggtccctctggagaggctggtactgctggacctcctggcactccaggtcctcagggtcttcttggtgctcctggtattctgggtctccctggctcgagaggtgaacgtggtctaccaggtgttgctggtgctgtgggtgaacctggtcctcttggcattgccggccctcctggggcccgtggtcctcctggtgctgtgggtagtcctggagtcaacggtgctcctggtgaagctggtcgtgatggcaaccctgggaacgatggtcccccaggtcgcgatggtcaacccggacacaagggagagcgcggttaccctggcaatattggtcccgttggtgctgcaggtgcacctggtcctcatggccccgtgggtcctgctggcaaacatggaaaccgtggtgaaactggtccttctggtcctgttggtcctgctggtgctgttggcccaagaggtcctagtggcccacaaggcattcgtggcgataagggagagcccggtgaaaaggggcccagaggtcttcctggcttaaagggacacaatggattgcaaggtctgcctggtatcgctggtcaccatggtgatcaaggtgctcctggctccgtgggtcctgctggtcctaggggccctgctggtccttctggccctgctggaaaagatggtcgcactggacatcctggtacagttggacctgctggcattcgaggccctcagggtcaccaaggccctgctggcccccctggtccccctggccctcctggacctccaggtgtaagcggtggtggttatgactttggttacgatggagacttctacagggctgaccagcctcgctcagcaccttctctcagacccaaggactatgaagttgatgctactctgaagtctctcaacaaccagattgagacccttcttactcctgaaggctctagaaagaacccagctcgcacatgccgtgacttgagactcagccacccagagtggagcagtggttactactggattgaccctaaccaaggatgcactatggatgctatcaaagtatactgtgatttctctactggcgaaacctgtatccgggcccaacctgaaaacatcccagccaagaactggtataggagctccaaggacaagaaacacgtctggctaggagaaactatcaatgctggcagccagtttgaatataatgtagaaggagtgacttccaaggaaatggctacccaacttgccttcatgcgcctgctggccaactatgcctctcagaacatcacctaccactgcaagaacagcattgcatacatggatgaggagactggcaacctgaaaaaggctgtcattctacagggctctaatgatgttgaacttgttgctgagggcaacagcaggttcacttacactgttcttgtagatggctgctctaaaaagacaaatgaatggggaaagacaatcattgaatacaaaacaaataagccatcacgcctgcccttccttgatattgcacctttggacatcggtggtgctgaccaggaattctttgtggacattggcccagtctgtttcaaataaatgaactcaatctaaattaaaaaagaaagaaatttgaaaaaactttctctttgccatttcttcttcttcttttttaactgaaagctgaatccttccatttcttctgcacatctacttgcttaaattgtgggcaaaagagaaaaagaaggattgatcagagcattgtgcaatacagtttcattaactccttcccccgctcccccaaaaatttgaatttttttttcaacactcttacacctgttatggaaaatgtcaacctttgtaagaaaaccaaaataaaaattgaaaaataaaaaccataaacatttgcaccacttgtggcttttgaatatcttccacagagggaagtttaaaacccaaacttccaaaggtttaaactacctcaaaacactttcccatgagtgtgatccacattgttaggtgctgacctagacagagatgaactgaggtccttgttttgttttgttcataatacaaaggtgctaattaatagtatttcagatacttgaagaatgttgatggtgctagaagaatttgagaagaaatactcctgtattgagttgtatcgtgtggtgtattttttaaaaaatttgatttagcattcatattttccatcttattcccaattaaaagtatgcagattatttgcccaaatcttcttcagattcagcatttgttctttgccagtctcattttcatcttcttccatggttccacagaagctttgtttcttgggcaagcagaaaaattaaattgtacctattttgtatatgtgagatgtttaaataaattgtgaaaaaaatgaaataaagcatgtttggttttccaaaagaacatat

SEQ ID NO: 4600 - DNA, 594 bp, Homo sapiens
  source 1..594: mol_type = unassigned DNA
gaaacaatggtgctcagggacctcctggaccacagggtgttcaaggtggaaaaggtgaacagggtccccctggtcctccaggcttccagggtctgcctggcccctcaggtcccgctggtgaagttggcaaaccaggagaaaggggtctccatggtgagtttggtctccctggtcctgctggtccaagaggggaacgcggtcccccaggtgagagtggtgctgccggtcctactggtcctattggaagccgaggtccttctggacccccagggcctgatggaaacaaggtaaaatcttatgttttctatattgctggtttggcccagtctgcctggaataagtagaccctttacaatagaaagataattgtttttcagatttttatttatttccagttctgtgatgacttccctctcagtaaacagcaatccgattccagtggacctgaattattctaaacaaacaaacaatagcaacaaactgtgggggaaaattcagagttcccaaaacataaatgaattagtatgggttgtcactcttttctcctcacgctgtttatgcttttgttttaatctagaaacattgtattcattg

SEQ ID NO: 4601 - DNA, 828 bp, Homo sapiens
  source 1..828: mol_type = unassigned DNA
agggtctgcctggcccctcaggtcccgctggtgaagttggcaaaccaggagaaaggggtctccatggtgagtttggtctccctggtcctgctggtccaagaggggaacgcggtcccccaggtgagagtggtgctgccggtcctactggtcctattggaagccgaggtccttctggacccccagggcctgatggaaacaagggtgaacctggtgtggttggtgctgtgggcactgctggtccatctggtcctagtggactcccaggagagaggggtgctgctggcatacctggaggcaagggagaaaagggtgaacctggtctcagaggtgaaattggtaaccctggcagagatggtgctcgtggtgctcctggtgctgtaggtgcccctggtcctgctggagccacaggtgaccggggcgaagctggggctgctggtcctgctggtcctgctggtcctcggggaagccctggtgaacgtggtgaggtcggtcctgctggccccaatggatttgctggtcctgctggtgctgctggtcaacctggtgctaaaggagaaagaggagccaaagggcctaagggtgaaaacggtgttgttggtcccacaggccccgttggagctgctggcccagctggtccaaatggtccccccggtcctgctggaagtcgtggtgatggaggcccccctggtatgactggtttccctggtgctgctggacggactggtcccccaggaccctctgtaagtaaatcactgtaaacgtgtcttcatttactctagccaaaaggcctggcttctgataggaaactggtaagaaactcttcatgaa

SEQ ID NO: 4602 - DNA, 962 bp, Homo sapiens
  source 1..962: mol_type = unassigned DNA
catccttaagaggactgaagcaggttatagaggaatcgcagctgtgcactcccactaccctcatctcttcagtcaccatgtcattaacagcatctctctctgctatattctccctcctttcaatagcccagccttctttgtgtttcaaagcaggcaagaagcctgtctagctagctgtttaaattggaattcttctagagtttgattcttcattttcttctttctccactaaaattgatttcacatgtgtttgactcaagggtgaacctggtgtggttggtgctgtgggcactgctggtccatctggtcctagtggactcccaggagagaggggtgctgctggcatacctggaggcaagggagaaaagggtgaacctggtctcagaggtgaaattggtaaccctggcagagatggtgctcgtggtgctcctggtgctgtaggtgcccctggtcctgctggagccacaggtgaccggggcgaagctggggctgctggtcctgctggtcctgctggtcctcggggaagccctggtgaacgtggtgaggtcggtcctgctggccccaatggatttgctggtcctgctggtgctgctggtcaacctggtgctaaaggagaaagaggagccaaagggcctaagggtgaaaacggtgttgttggtcccacaggccccgttggagctgctggcccagctggtccaaatggtccccccggtcctgctggaagtcgtggtgatggaggcccccctggtatgactggtttccctggtgctgctggacggactggtcccccaggaccctctggtatttctggccctcctggtccccctggtcctgctgggaaagaagggcttcgtggtcctcgtggtgaccaaggtccagttggccgaactggagaagtaggtgcagttggtccccctggcttcgctggtgagaagggtccctctggagaggctggtactgct

SEQ ID NO: 4603 - DNA, 776 bp, Homo sapiens
  source 1..776: mol_type = unassigned DNA; mol_type = unassigned DNA
cctagtggactcccaggagagaggggtgctgctggcatacctggaggcaagggagaaaagggtgaacctggtctcagaggtgaaattggtaaccctggcagagatggtgctcgtggtgctcctggtgctgtaggtgcccctggtcctgctggagccacaggtgaccggggcgaagctggggctgctggtcctgctggtcctgctggtcctcggggaagccctggtgaacgtggtgaggtcggtcctgctggccccaatggatttgctggtcctgctggtgctgctggtcaacctggtgctaaaggagaaagaggagccaaagggcctaagggtgaaaacggtgttgttggtcccacaggccccgttggagctgctggcccagctggtccaaatggtccccccggtcctgctggaagtcgtggtgatggaggcccccctgtgagtatttacaatggactctcgccgcttttcttttttcagaatctattaaggacacttgaaagttttgaaatttttggtaaatttggactaccatgaggaaacttttgagattcaagttcattctattcagagcaattccgatattgatgttaacttgaactcagctggaactcagtgtatgttgctatcagctcacttgaggtaataaccaaggtgggccctaggcagtttaattgtaaagtcggaaaaaatattccttttggcgtttattaatatgccccttcttctgcctgaccatgtccttctcctttgcaggcaatgctatcacaacaatt

SEQ ID NO: 4604 - DNA, 713 bp, Homo sapiens
  source 1..713: mol_type = unassigned DNA; mol_type = unassigned DNA
gatacggggtgttattaataagacatgtttcctttttggtactagggtgctcctggtgctgtaggtgcccctggtcctgctggagccacaggtgaccggggcgaagctggggctgctggtcctgctggtcctgctggtcctcggggaagccctggtgaacgtggtgaggtcggtcctgctggccccaatggatttgctggtcctgctggtgctgctggtcaacctggtgctaaaggagaaagaggagccaaagggcctaagggtgaaaacggtgttgttggtcccacaggccccgttggagctgctggcccagctgtaagttgaattcactggtggtccacacagcagctacccattagatcttccaattaaatatatatccgtcaagtgcctgctatgcaacagggaatataccagatagaagatggaaaataacggaaggattaacatttgcacactgctttacaaagtataaaagtttcatgaatattgttttattttaattctctgataacctcataagggtggtaatattgaagaacattctgacacagatagtcattttttatttctatattttcttctaagagatgcgggaatgatccacttgaagaaaagagtagcatttacaagggtttgtttgtgatttgactccatctttttgtttgcatttagggtccaaatggtccccccggtcctgctggaagtcgtgg

SEQ ID NO: 4605 - DNA, 5993 bp, Homo sapiens
  source 1..5993: mol_type = unassigned DNA; mol_type = unassigned DNA
taacagaaaaatcttcattccctgtaggcatttaattaaacctagttgagaagtgtgtgggattcctcaattatgaacaaaacacgtatattggctttctttaaaaaaaaaaaaaaagaagaaaaaagaaaaggcaaagtccttcgaaactcagagtcccattcatttatcattaactcctatcattctacatagttctgattccaatatgccagggtaccagtggcatgacattgtttttcctcatagaaatttgccatagtctctcctccattatttggttggttacagcctcataaaggaagacaggagttgcttctttctgcaagaaagaaggttaaaaactataaatatttcccccaaatggccagggtattattttattgcatcacattgtttgcatcttaagatctagaatctttgctgctctcttccaggcccttggtgattaacagaaaggaaatgaccttgtacatttgctcatagggtatttctggccctcctggtccccctggtcctgctgggaaagaagggcttcgtggtcctcgtggtgaccaaggtccagttggccgaactggagaagtaggtgcagttggtccccctggcttcgctggtgagaagggtccctctggagaggctggtactgctgtaagtgatttccaactcctctttcttaataccttatgctgaattaaaataaagcccctacacaaatcttcaagtggcatctatttgttgatgagtattgcaggctctcaagtagagctcagttgagccaggaaatctgtccagcacacactgaggggctgtggcttccaagatgctcagaaagcacaaaatcgggaagacaataaatgagggaactcagttttatcacaaagcccttaaagctattgaaggcaccttactggtaccaggattagaacagagtcccattgctgtggccatcctactacatattaatcaatctcagtaggctaccaatttcttaaacatacactgtccagtattagtgctactctgaaaggtgcccctattagaccttagaggccaaagtcaaaatttgcttccttttgatatactgattttactgatttcctttttgtttttgttttttgtttttgtttttgtttttttgttttgggatggagttcccctctgttgcccaggctggagtgcagtggcacgatctcagctcactgcgacttccgcctccccagtttaagtaattatcttgtctcagcctcccgagtagctgggactacaggcacacaccatcatgcctagctaatttttgtatttttagtaaagacggggtttcaccatattggtcaggctggtctcgatctcctgacctcaggtgatccacccaccttgacctcctaaagtgctgggattacacatgtgagccaccccacccagcctgatttcctttcctttgtgtatatacccagcagtgtgattgctggatcttatggtagttctatttttagttttttgaggaacccctcctactatgtacaactattatgtatccataacaatttaaatttttttatttgtttccctgcctagaggctataaaaactctatttcaccaccccaagtgtctttataaatctcaaccacatatttttaaatgttgtgccattggtctcaaggatgaatcagatacaaaagtattcatgccaagatgtaaactcaccgtcatcactagagaaaagatatccaaggatatgtcctagtaataggaggtcattagcctttttctaagctgaagacagtttattctcacaatcttcaagccaacctgtgttatcacctagggtcttacccataatactcagtattttttctctatttagggacctcctggcactccaggtcctcagggtcttcttggtgctcctggtattctgggtctccctggctcgagaggtgaacgtggtctaccaggtgttgctggtgctgtggtgagtgcttgacagtattctgactccattaacataagaaaagattttaaaagctgccacttcaaatgtgacagattgatcactgaataacttcacttaagatttttattcatggcattttctttatacagatcacatgtcacttatctaagaagctttaataccaccttacttagacacacactataaagacacagcttaaaattatgcagaatgatttttgttctttccacgcacttaggaatgatacaatctctaattgcgtttactcctctgcaatatgaaatgctggcatcatttatcctgtaggaagaatgaaactctggaagttctgaatcgttccattaaaccttatacgtgacaacaactagaaaccatctcatctccataaaatatatcaactttttgaattcatttcatttgggatactgaatgacacgaggctcactttttacagagcaacatcccgtgattacataaagctggccatctacatgtggagaaggagggcagagatgatactaatgatacttcttaccattgtgtgacccattcacattcaatttaccttcttccttcaaactagaatctcctgagtagggttgttttggaggggaaggttagcattccatcgaataaggggaatgtcattttatcttctctgcctgtttagggtgaacctggtcctcttggcattgccggccctcctggggcccgtggtcctcctggtgctgtgggtagtcctggagtcaacggtgctcctggtgaagctggtcgtgatggcaaccctgggaacgatggtcccccaggtcgcgatggtcaacccggacacaagggagagcgcggttaccctggcaatattggtcccgttggtgctgcaggtgcacctggtcctcatggccccgtgggtcctgctggcaaacatggaaaccgtggtgaaactggtccttctggtcctgttggtcctgctggtgctgttggcccaagaggtcctagtggcccacaaggcattcgtggcgataagggagagcccggtgaaaaggggcccagaggtcttcctggcttaaagggacacaatggattgcaaggtctgcctggtatcgctgtaagtaaactgtagccatctcgcacataaactgatcctgaaggccttcagctcagaaggattttcatattttcactgctattgttccagtatagcctatataatatccatttcccattctctggctaactccatctcactcttggaggtaatgctatttcataccaacatgaaaggtgaggattaagggagatagaaatagacatacaataaaatctcctggtaacaatgtccttcaaccccacttaaaataaacataattagaggaatgactaatattgcactgctgaaataggttgtgaaaaaaaaattgaatataatagacataatgggagaaaagagccccactttacattttcaattttctcaatccggagtccatttaactaaagtttcccattcaatttggaaaaaaaaaaaaaatatgtctcttgacatgtgctctgaaagtgtgattttcctcttctgtctttaaagggtcaccatggtgatcaaggtgctcctggctccgtgggtcctgctggtcctaggggccctgctggtccttctggccctgctggaaaagatggtcgcactggacatcctggtacagttggacctgctggcattcgaggccctcagggtcaccaaggccctgctgtaagtatgatttggggaaataataaagaagatcacggacctaaggaatgttttcttcagactaaaccaagacaactttgacaacccattaaagttagccccatttcaatatatcctctaaaatatctggaaattgtctatatgcaatgggcttgttaagtccatccctgcaagtgtgcctgggggctcgttatttatttatgtgaacttgattattttttactgatgagaacatgcttccgtgtgaagctcaactgaaaatctgctgccatggatgtctctcactgtaacaaaatataaagcctctcctatctcactttcacctttgcagggcccccctggtccccctggccctcctggacctccaggtgtaagcggtggtggttatgactttggttacgatggagacttctacagggctgaccagcctcgctcagcaccttctctcagacccaaggactatgaagttgatgctactctgaagtctctcaacaaccagattgagacccttcttactcctgaaggctctagaaagaacccagctcgcacatgccgtgacttgagactcagccacccagagtggagcagtggttactactggattgaccctaaccaaggatgcactatggatgctatcaaagtatactgtgatttctctactggcgaaacctgtatccgggcccaacctgaaaacatcccagccaagaactggtataggagctccaaggacaagaaacacgtctggctaggagaaactatcaatgctggcagccagtttgaatataatgtagaaggagtgacttccaaggaaatggctacccaacttgccttcatgcgcctgctggccaactatgcctctcagaacatcacctaccactgcaagaacagcattgcatacatggatgaggagactggcaacctgaaaaaggctgtcattctacagggctctaatgatgttgaacttgttgctgagggcaacagcaggttcacttacactgttcttgtagatggctgctctgtaagtaatagtgaaatatgggaatagctttgggaagtgggatggagggggttctaacttagactgcccccaagggggggtctaaaggggggttaaaagaacagaagaatgagagaactaacttatttcataagtaaattcagtttttgtatgtattttatatttatttatttatacgtattaatttcgtacttaaattcagatgataaattcagagtattcttatcagatagtgccttctgaaatgctgaaatgtatactatgtccatgcattgttttttctttagcatgttttttaaatggtaatgtgtgcccagaacttaaaatttcttgagacttcagtggcctaaactataatttatagttatgtgtattttattttacttattagtatggcctacatttaacttttaatgctttttctacaatatgctataaatataagaaaaattaaaattcactaacagcaagactacatacccacccaggtcccgctcccaaagacacacatagagggacatacacacaacaatcctaaaaatgactttgtagagataggtcacttggaatgtgtgttgaaatgttgttggtttttttggtttgtttgtttgtttgttttttgttagactgatagggagcccctcccactaaagacacccttgatactgttatttcaaggatgaacttatttatctgggacagacatcttcagaatgacacatgccaaacagtggttcttattaaatcaaaggttcagatattatcagattcagaaatagtgatgctttgtgtatctattttcttctctttaaacagaaaaagacaaatgaatggggaaagacaatcattgaatacaaaacaaataagccatcacgcctgcccttccttgatattgcacctttggacatcggtggtgctgaccaggaattctttgtggacattggcccagtctgtttcaaataaatgaactcaatctaaattaaaaaagaaagaaatttgaaaaaactttctctttgccatttcttcttcttcttttttaactgaaagctgaatccttccatttcttctgcacatctacttgcttaaattgtgggcaaaagagaaaaagaaggattgatcagagcattgtgcaatacagtttcattaactccttcccccgctcccccaaaaatttgaatttttttttcaacactcttacacctgttatggaaaatgtcaacctttgtaagaaaaccaaaataaaaattgaaaaataaaa

SEQ ID NO: 4606 - DNA, 656 bp, Homo sapiens
  source 1..656: mol_type = unassigned DNA; mol_type = unassigned DNA
tgtacaactattatgtatccataacaatttaaatttttttatttgtttccctgcctagaggctataaaaactctatttcaccaccccaagtgtctttataaatctcaaccacatatttttaaatgttgtgccattggtctcaaggatgaatcagatacaaaagtattcatgccaagatgtaaactcaccgtcatcactagagaaaagatatccaaggatatgtcctagtaataggaggtcattagcctttttctaagctgaagacagtttattctcacaatcttcaagccaacctgtgttatcacctagggtcttacccataatactcagtattttttctctatttagggacctcctggcactccaggtcctcagggtcttcttggtgctcctggtattctgggtctccctggctcgagaggtgaacgtggtctaccaggtgttgctggtgctgtgggtgaacctggtcctcttggcattgccggccctcctggggcccgtggtcctcctggtgctgtgggtagtcctggagtcaacggtgctcctggtgaagctggtcgtgatggcaaccctgggaacgatggtcccccaggtcgcgatggtcaacccggacacaagggagagcgcggttaccctggcaatattggtcccgttgg

SEQ ID NO: 4607 - DNA, 863 bp, Homo sapiens
  source 1..863: mol_type = unassigned DNA; mol_type = unassigned DNA
attgtgtgaaactttatgtcctgagctgaggttctcttcttccaaatttctgaacaagatggtcagcttctccatagtatctacacctagtactgaaaatatgaaaattgcttaggccaaagaatgggcttttcaatagcacactgcaaaactgggcccaagtatttaaaacatctctaaaaaatatctaggttggcaggtttttatccctagttttaacagtctgaaagagggttcgttactgagcactggaagtgatgaagacagagtagctacaacataggggctggtaggcagcagagcctcaccaacagccttaatttgtgtggtgtcttcacagggcaaccctgggaacgatggtcccccaggtcgcgatggtcaacccggacacaagggagagcgcggttaccctggcaatattggtcccgttggtgctgcaggtgcacctggtcctcatggccccgtgggtcctgctggcaaacatggaaaccgtggtgaaactggtccttctggtcctgttggtcctgctggtgctgttggcccaagaggtcctagtggcccacaaggcattcgtggcgataagggagagcccggtgaaaaggggcccagaggtcttcctggcttaaagggacacaatggattgcaaggtctgcctggtatcgctgtaagtaaactgtagccatctcgcacataaactgatcctgaaggccttcagctcagaaggattttcatattttcactgctattgttccagtatagcctatataatatccatttcccattctctggctaactccatctcactcttggaggtaatgctatttcataccaacatgaaaggtgaggattaagggagatagaaa

SEQ ID NO: 4608 - DNA, 380 bp, Homo sapiens
  source 1..380: mol_type = unassigned DNA; mol_type = unassigned DNA
caaggtctgcctggtatcgctggtcaccatggtgatcaaggtgctcctggctccgtgggtcctgctggtcctaggggccctgctggtccttctggccctgctggaaaagatggtcgcactggacatcctggtacagttggacctgctggcattcgaggccctcagggtcaccaaggccctgctgtaagtatgatttggggaaataataaagaagatcacggacctaaggaatgttttcttcagactaaaccaagacaactttgacaacccattaaagttagccccatttcaatatatcctctaaaatatctggaaattgtctatatgcaatgggcttgttaagtccatccctgcaagtgtgcctgggggctcgttattta

SEQ ID NO: 4609 - DNA, 599 bp, Homo sapiens
  source 1..599: mol_type = unassigned DNA; mol_type = unassigned DNA
aaacataattagaggaatgactaatattgcactgctgaaataggttgtgaaaaaaaaattgaatataatagacataatgggagaaaagagccccactttacattttcaattttctcaatccggagtccatttaactaaagtttcccattcaatttggaaaaaaaaaaaaaatatgtctcttgacatgtgctctgaaagtgtgattttcctcttctgtctttaaagggtcaccatggtgatcaaggtgctcctggctccgtgggtcctgctggtcctaggggccctgctggtccttctggccctgctggaaaagatggtcgcactggacatcctggtacagttggacctgctggcattcgaggccctcagggtcaccaaggccctgctgtaagtatgatttggggaaataataaagaagatcacggacctaaggaatgttttcttcagactaaaccaagacaactttgacaacccattaaagttagccccatttcaatatatcctctaaaatatctggaaattgtctatatgcaatgggcttgttaagtccatccctgcaagtgtgcctgggggctcgttatttatttatgtgaacttga

SEQ ID NO: 4610 - DNA, 1123 bp, Homo sapiens
  source 1..1123: mol_type = unassigned DNA; mol_type = unassigned DNA
gaaataataaagaagatcacggacctaaggaatgttttcttcagactaaaccaagacaactttgacaacccattaaagttagccccatttcaatatatcctctaaaatatctggaaattgtctatatgcaatgggcttgttaagtccatccctgcaagtgtgcctgggggctcgttatttatttatgtgaacttgattattttttactgatgagaacatgcttccgtgtgaagctcaactgaaaatctgctgccatggatgtctctcactgtaacaaaatataaagcctctcctatctcactttcacctttgcagggcccccctggtccccctggccctcctggacctccaggtgtaagcggtggtggttatgactttggttacgatggagacttctacagggctgaccagcctcgctcagcaccttctctcagacccaaggactatgaagttgatgctactctgaagtctctcaacaaccagattgagacccttcttactcctgaaggctctagaaagaacccagctcgcacatgccgtgacttgagactcagccacccagagtggagcagtggttactactggattgaccctaaccaaggatgcactatggatgctatcaaagtatactgtgatttctctactggcgaaacctgtatccgggcccaacctgaaaacatcccagccaagaactggtataggagctccaaggacaagaaacacgtctggctaggagaaactatcaatgctggcagccagtttgaatataatgtagaaggagtgacttccaaggaaatggctacccaacttgccttcatgcgcctgctggccaactatgcctctcagaacatcacctaccactgcaagaacagcattgcatacatggatgaggagactggcaacctgaaaaaggctgtcattctacagggctctaatgatgttgaacttgttgctgagggcaacagcaggttcacttacactgttcttgtagatggctgctctaaaaagacaaatgaatggggaaagacaatcattgaatacaaaacaaataagccatcacgcctgcccttccttgatattgcacctttggacatcggtggtgctgaccaggaattctttgtgg

SEQ ID NO: 4611 - DNA, 4523 bp, Homo sapiens
  source 1..4523: mol_type = unassigned DNA; mol_type = unassigned DNA
gtttcggctaagttggaggtactggccacgactgcatgcccgcgcccgccaggtgatacctccgccggtgacccaggggctctgcgacacaaggagtctgcatgtctaagtgctagacatgctcagctttgtggatacgcggactttgttgctgcttgcagtaaccttatgcctagcaacatgccaatttttcgaaactgtaagaaagggcccagccggagatagaggaccacgtggagaaaggggtccaccaggccccccaggcagagatggtgaagatggtcccacaggccctcctggtccacctggtcctcctggcccccctggtctcggtgggaactttgctgctcagtatgatggaaaaggagttggacttggccctggaccaatgggcttaatgggacctagaggcccacctggtgcagctggagccccaggccctcaaggtttccaaggacctgctggtgagcctggtgaacctggtcaaactggtcctgcaggtgctcgtggtccagctggccctcctggcaaggctggtgaagatggtcaccctggaaaacccggacgacctggtgagagaggagttgttggaccacagggtgctcgtggtttccctggaactcctggacttcctggcttcaaaggcattaggggacacaatggtctggatggattgaagggacagcccggtgctcctggtgtgaagggtgaacctggtgcccctggtgaaaatggaactccaggtcaaacaggagcccgtgggcttcctggtgagagaggacgtgttggtgcccctggcccagctggtgcccgtggcagtgatggaagtgtgggtcccgtgggtcctgctggtcccattgggtctgctggccctccaggcttcccaggtgcccctggccccaagggtgaaattggagctgttggtaacgctggtcctgctggtcccgccggtccccgtggtgaagtgggtcttccaggcctctccggccccgttggacctcctggtaatcctggagcaaacggccttactggtgccaagggtgctgctggccttcccggcgttgctggggctcccggcctccctggaccccgcggtattcctggccctgttggtgctgccggtgctactggtgccagaggacttgttggtgagcctggtccagctggctccaaaggagagagcggtaacaagggtgagcccggctctgctgggccccaaggtcctcctggtcccagtggtgaagaaggaaagagaggccctaatggggaagctggatctgccggccctccaggacctcctgggctgagaggtagtcctggttctcgtggtcttcctggagctgatggcagagctggcgtcatgggccctcctggtagtcgtggtgcaagtggccctgctggagtccgaggacctaatggagatgctggtcgccctggggagcctggtctcatgggacccagaggtcttcctggttcccctggaaatatcggccccgctggaaaagaaggtcctgtcggcctccctggcatcgacggcaggcctggcccaattggcccagctggagcaagaggagagcctggcaacattggattccctggacccaaaggccccactggtgatcctggcaaaaacggtgataaaggtcatgctggtcttgctggtgctcggggtgctccaggtcctgatggaaacaatggtgctcagggacctcctggaccacagggtgttcaaggtggaaaaggtgaacagggtccccctggtcctccaggcttccagggtctgcctggcccctcaggtcccgctggtgaagttggcaaaccaggagaaaggggtctccatggtgagtttggtctccctggtcctgctggtccaagaggggaacgcggtcccccaggtgagagtggtgctgccggtcctactggtcctattggaagccgaggtccttctggacccccagggcctgatggaaacaagggtgaacctggtgtggttggtgctgtgggcactgctggtccatctggtcctagtggactcccaggagagaggggtgctgctggcatacctggaggcaagggagaaaagggtgaacctggtctcagaggtgaaattggtaaccctggcagagatggtgctcgtggtgctcctggtgctgtaggtgcccctggtcctgctggagccacaggtgaccggggcgaagctggggctgctggtcctgctggtcctgctggtcctcggggaagccctggtgaacgtggtgaggtcggtcctgctggccccaatggatttgctggtcctgctggtgctgctggtcaacctggtgctaaaggagaaagaggagccaaagggcctaagggtgaaaacggtgttgttggtcccacaggccccgttggagctgctggcccagctggtccaaatggtccccccggtcctgctggaagtcgtggtgatggaggcccccctggtatgactggtttccctggtgctgctggacggactggtcccccaggaccctctggtatttctggccctcctggtccccctggtcctgctgggaaagaagggcttcgtggtcctcgtggtgaccaaggtccagttggccgaactggagaagtaggtgcagttggtccccctggcttcgctggtgagaagggtccctctggagaggctggtactgctggacctcctggcactccaggtcctcagggtcttcttggtgctcctggtattctgggtctccctggctcgagaggtgaacgtggtctaccaggtgttgctggtgctgtgggtgaacctggtcctcttggcattgccggccctcctggggcccgtggtcctcctggtgctgtgggtagtcctggagtcaacggtgctcctggtgaagctggtcgtgatggcaaccctgggaacgatggtcccccaggtcgcgatggtcaacccggacacaagggagagcgcggttaccctggcaatattggtcccgttggtgctgcaggtgcacctggtcctcatggccccgtgggtcctgctggcaaacatggaaaccgtggtgaaactggtccttctggtcctgttggtcctgctggtgctgttggcccaagaggtcctagtggcccacaaggcattcgtggcgataagggagagcccggtgaaaaggggcccagaggtcttcctggcttaaagggacacaatggattgcaaggtctgcctggtatcgctggtcaccatggtgatcaaggtgctcctggctccgtgggtcctgctggtcctaggggccctgctggtccttctggccctgctggaaaagatggtcgcactggacatcctggtacagttggacctgctggcattcgaggccctcagggtcaccaaggccctgctggcccccctggtccccctggccctcctggacctccaggtgtaagcggtggtggttatgactttggttacgatggagacttctacagggctgaccagcctcgctcagcaccttctctcagacccaaggactatgaagttgatgctactctgaagtctctcaacaaccagattgagacccttcttactcctgaaggctctagaaagaacccagctcgcacatgccgtgacttgagactcagccacccagagtggagcagtggttactactggattgaccctaaccaaggatgcactatggatgctatcaaagtatactgtgatttctctactggcgaaacctgtatccgggcccaacctgaaaacatcccagccaagaactggtataggagctccaaggacaagaaacacgtctggctaggagaaactatcaatgctggcagccagtttgaatataatgtagaaggagtgacttccaaggaaatggctacccaacttgccttcatgcgcctgctggccaactatgcctctcagaacatcacctaccactgcaagaacagcattgcatacatggatgaggagactggcaacctgaaaaaggctgtcattctacagggctctaatgatgttgaacttgttgctgagggcaacagcaggttcacttacactgttcttgtagatggctgctctaaaaagacaaatgaatggggaaagacaatcattgaatacaaaacaaataagccatcacgcctgcccttccttgatattgcacctttggacatcggtggtgctgaccaggaattctttgtggacattggcccagtctgtttcaaataaatgaactcaatctaaattaaaaaagaaagaaatttgaaaaaactttctctttgccatttcttcttcttcttttttaactgaaagctgaatccttccatttcttctgcacatctacttgcttaaattgtgggcaaaagagaaaaagaaggattgatcagagcattgtgcaatacagtttcattaactccttcccccgctcccccaaaaatttgaatttttttttcaacactcttacacctgttatggaaaatgtcaacctttgtaagaaaaccaaaataaaaattgaaaaataaaaaccataaacatttgc

SEQ ID NO: 4612 - DNA, 4172 bp, Homo sapiens
  source 1..4172: mol_type = unassigned DNA; mol_type = unassigned DNA
ataagctccagccttcctgtggccacagcaggaccagagtggaccagcacaccccaggagagaggactggggtcccaggagtaggaggagcccgagcaccatgagctccggagaccctgcacacctcggcctctgcctctggctgtggctgggcgccaccctgggaagagagcaagttcaagcaagcggtctcctgaggctggctgtgctgcctgaggaccggctgcagatgaagtggagagagtcggaggggagcggcctcggctacctggtgcaggtgaagcccatggcaggggactcggaacaggaggtgatactgaccaccaagacccctaaggccacagtggggggcctgagcccctccaagggctacaccttgcagatcttcgagctcactggctctgggcgcttcctgctagctcggagggagtttgtgattgaggatctgaagagtagctccctggacaggagcagccagaggcccctcggctctggagccccggagcccaccccctcccacacggggagcccagaccctgagcaggcttctgagccccaagttgccttcacaccaagccaggatccgcgcactcctgccggcccccagttccgctgcctgccccccgtgcctgctgacatggtcttcctggtggacgggtcctggagcattggccacagtcacttccagcaggtcaaggacttcctggccagtgtcatcgcaccctttgaaatcgggccggataaggtccaagtaggcctgactcagtacagcggggatgctcagactgagtgggacctgaactccctcagcaccaaggaacaggtgctggcagctgtgcgccgcctccgctacaagggggggaacacgttcacaggccttgccctgacccacgtgctggggcagaacctgcagccggcggctggcctccgtccagaggcagccaaggtggtgattctggtgacggacggcaagtcccaggacgatgtgcacactgctgcccgtgtcctcaaggacctgggcgtgaacgtcttcgctgtgggtgtgaagaacgccgatgaggctgagctgaggctcctggcgtccccgccgagggacatcaccgtccacagcgtgctggacttcctgcagctcggcgcgctggctggcctgctcagccgtctcatctgccagaggctccagggtgggagcccgcggcagggcccagcagcggctccagccctggacaccctccctgcccccaccagcctggtcctgagccaggtgacctcctccagcatccgcctgtcctggactccagccccccggcaccccctcaagtatctgatcgtttggcgagcctctagaggtggcacccccagggaggtggtggtggagggacccgccgcctccacggagctgcacaacctggcctcccgcacagagtacctggtctccgtgttccccatctatgagggcggggttggcgaaggcctgcggggcctggtgaccacagcacctctgcctccgccccgggcgctgaccctggccgcagtgacgcccagaaccgtccacctcacctggcagccctcggccggggccacccactacctggtgcgatgttctcctgcttcccccaagggtgaagaggaggagcgagaggtgcaggtcgggcggcccgaggtgctgctggatggcctggaacctggcagggactatgaggtctcggtgcagagcctgcgaggccctgagggcagcgaggcccggggcatccgtgccaggacccccaccctggcccccccgagacacctgggcttctcagacgtgagccacgacgcggcacgagtgttctgggagggtgccccgaggcctgtgcgcctggtcagggtcacctatgtgtccagcgagggtggacactcggggcagacagaggctcctgggaacgccacctcggccacgctggggcctctctcttcctccaccacctacactgtccgtgtcacctgcctctaccctgggggtggctcctctacgctgactggccgggtgaccaccaagaaagctcccagcccaagccagctgtccatgacggagctgccaggggatgcagtccagctggcgtgggtggccgcagccccgtctggcgtgcttgtctaccagatcacgtggacgcccctgggagaggggaaggctcacgagatctctgtcccagggaacctcggcacggccgtcctgcctggcctagggaggcacacagagtacgacgtcaccatcttggcctactacagggacggggcccgcagtgaccctgtgtccctccgctataccccctccacggtgagcaggagcccaccctccaacctggccctggcctcggagacccccgacagcctgcaggtcagctggacgcccccgcttggccgcgtgctccattactggctcacctacgcccccgcctctggcttgggacccgagaaatccgtctctgtgccaggagccaggagccacgtgacactgcccgacctgcaggcagccacgaagtacagggtcctggtctcagctatctatgcagcaggcaggagtgaggctgtgtctgccacgggccagacagcctgcccagccctccgccctgacggctccctcccagggtttgacctgatggtggccttcagcctggtggaaaaggcttatgcgtccatccggggcgtggccatggagccctctgccttcggtgggaccccgaccttcacgctcttcaaggacgcccagctgacaagacgggtcagtgacgtctacccagcccccctacctccagagcacaccatcgtcttccttgtgcgcctacttcccgagacaccccgtgaggccttcgcgctgtggcagatgacagccgaggacttccagcccctccttggggttctgctggatgccgggaagaagtccctgacctacttccaccgtgaccccagggctgccttgcaggaggccaccttcgacccgcaggaagtgaggaagattttcttcgggagcttccacaaggtgcacgtggctgtgggccgctccaaggtcaggctctatgtggactgccggaaggtggctgagcggccccttggggagatgggcagcccacccgctgcgggcttcgtcacgctggggaggctggccaaggccaggggcccccggagcagttcggccgcgtttcagctccagatgctgcagatcgtgtgcagtgacacctgggccgatgaggaccggtgctgtgagctccctgcctcgagggatggagagacctgccccgccttcgtgtctgcctgttcctgttcctcagagacccctgggcccccaggacctcaaggacccccaggcctccctgggaggaatggcaccccaggagagcagggcttcccagggcccaggggtccaccaggggtcaaaggagagaagggagaccatgggcttccaggcttgcagggccaccccggccaccagggcatccccgggagagttggcctccagggaccaaagggaatgagaggcctggagggaactgctggcctgcctggaccccctggccccagggggttccagggcatggcaggggccaggggcactagtggagagcgaggacctccagggaccgtggggcccacaggactgccagggcccaaaggggaacgaggagagaagggcgagccgcagtcccttgccaccctctaccagcttgtgagccaggcctcacacgtgtcaaagttcgactccttccacgagaacaccaggccccccatgcccatcttggagcagaagctggagccgggcactgagcccctggggtcccctggcacccgcagcaaggccctggttcctggagaatgggggcgtggtggccgccaccttgagggcagaggggagcctggagctgttggtcagatgggcagccctgggcagcagggggctagcacccagggcctctgggagtgacaggacattttctgcactgccccgaggaacgctgagccttcctccctgggtttgtctggacaccgagagcgaccacatcctggagaagccaggagaaaagctcaggaagagcctgcaggtggaaggagagggaagcagcggcctcggccaaggcccaccccatactcttggctctgtagcatttccaagttcagataaacccctgagtgctcaccca

SEQ ID NO: 4613 - DNA, 4536 bp, Homo sapiens
  source 1..4536: mol_type = unassigned DNA
gtggaccagcacaccccaggagagaggactggggtcccaggagtaggaggagcccgagcaccatgagctccggagaccctgcacacctcggcctctgcctctggctgtggctgggcgccaccctgggaagagagcaagttcaagcaagcggtctcctgaggctggctgtgctgcctgaggaccggctgcagatgaagtggagagagtcggaggggagcggcctcggctacctggtgcaggtgaagcccatggcaggggactcggaacaggaggtgatactgaccaccaagacccctaaggccacagtggggggcctgagcccctccaagggctacaccttgcagatcttcgagctcactggctctgggcgcttcctgctagctcggagggagtttgtgattgaggatctgaagagtagctccctggacaggagcagccagaggcccctcggctctggagccccggagcccaccccctcccacacggggagcccagaccctgagcaggcttctgagccccaagttgccttcacaccaagccaggatccgcgcactcctgccggcccccagttccgctgcctgccccccgtgcctgctgacatggtcttcctggtggacgggtcctggagcattggccacagtcacttccagcaggtcaaggacttcctggccagtgtcatcgcaccctttgaaatcgggccggataaggtccaagtaggcctgactcagtacagcggggatgctcagactgagtgggacctgaactccctcagcaccaaggaacaggtgctggcagctgtgcgccgcctccgctacaagggggggaacacgttcacaggccttgccctgacccacgtgctggggcagaacctgcagccggcggctggcctccgtccagaggcagccaaggtggtgattctggtgacggacggcaagtcccaggacgatgtgcacactgctgcccgtgtcctcaaggacctgggcgtgaacgtcttcgctgtgggtgtgaagaacgccgatgaggctgagctgaggctcctggcgtccccgccgagggacatcaccgtccacagcgtgctggacttcctgcagctcggcgcgctggctggcctgctcagccgtctcatctgccagaggctccagggtgggagcccgcggcagggcccagcagcagcggctccagccctggacaccctccctgcccccaccagcctggtcctgagccaggtgacctcctccagcatccgcctgtcctggactccagccccccggcaccccctcaagtatctgatcgtttggcgagcctctagaggtggcacccccagggaggtggtggtggagggacccgccgcctccacggagctgcacaacctggcctcccgcacagagtacctggtctccgtgttccccatctatgagggcggggttggcgaaggcctgcggggcctggtgaccacagcacctctgcctccgccccgggcgctgaccctggccgcagtgacgcccagaaccgtccacctcacctggcagccctcggccggggccacccactacctggtgcgatgttctcctgcttcccccaagggtgaagaggaggagcgagaggtgcaggtcgggcggcccgaggtgctgctggatggcctggaacctggcagggactatgaggtctcggtgcagagcctgcgaggccctgagggcagcgaggcccggggcatccgtgccaggacccccaccctggcccccccgagacacctgggcttctcagacgtgagccacgacgcggcacgagtgttctgggagggtgccccgaggcctgtgcgcctggtcagggtcacctatgtgtccagcgagggtggacactcggggcagaggctcctgggaacgccacctcggccacgctggggcctctctcttcctccaccacctacactgtccgtgtcacctgcctctaccctgggggtggctcctctacgctgactggccgggtgaccaccaagaaagctcccagcccaagccagctgtccatgacggagctgccaggggatgcagtccagctggcgtgggtggccgcagccccgtctggcgtgcttgtctaccagatcacgtggacgcccctgggagaggggaaggctcacgagatctctgtcccagggaacctcggcacggccgtcctgcctggcctagggaggcacacagagtacgacgtcaccatcttggcctactacagggacggggcccgcagtgaccctgtgtccctccgctataccccctccacggtgagcaggagcccaccctccaacctggccctggcctcggagacccccgacagcctgcaggtcagctggacgcccccgcttggccgcgtgctccattactggctcacctacgcccccgcctctggcttgggacccgagaaatccgtctctgtgccaggagccaggagccacgtgacactgcccgacctgcaggcagccacgaagtacagggtcctggtctcagctatctatgcagcaggcaggagtgaggctgtgtctgccacgggccagacagcagcctgcccagccctccgccctgacggctccctcccagggtttgacctgatggtggccttcagcctggtggaaaaggcttatgcgtccatccggggcgtggccatggagccctctgccttcggtgggaccccgaccttcacgctcttcaaggacgcccagctgacaagacgggtcagtgacgtctacccagcccccctacctccagagcacaccatcgtcttccttgtgcgcctacttcccgagacaccccgtgaggccttcgcgctgtggcagatgacagccgaggacttccagcccctccttggggttctgctggatggtgacgtgggccccgcgtcgcccccagcagtcaggaggagtaggggcagggaggccccagagccctgggaggccttcagaggaagtccagcctccaggccaggccctcagcaccctctgggtgggaggcaggtgtcccgggcagggggctgtgggccacattgagggtcacctccagcttggcaccctcagggctgctcctgtcctgtcgtgggggccgccctgctcaaggtataggcccggctggttgcagcccgttctcacctgctccaccccttccctggcagccgggaagaagtccctgacctacttccaccgtgaccccagggctgccttgcaggaggccaccttcgacccgcaggaagtgaggaagattttcttcgggagcttccacaaggtgcacgtggctgtgggccgctccaaggtcaggctctatgtggactgccggaaggtggctgagcggccccttggggagatgggcagcccacccgctgcgggcttcgtcacgctggggaggctggccaaggccaggggcccccggagcagttcggccgcgtttcagctccagatgctgcagatcgtgtgcagtgacacctgggccgatgaggaccggtgctgtgagctccctgcctcgagggatggagagacctgccccgccttcgtgtctgcctgttcctgttcctcagagacccctgggcccccaggacctcaaggacccccaggcctccctgggaggaatggcaccccaggagagcagggcttcccagggcccaggggagagcccgggccacccggacagatgggaccagaaggtcctggaggccagcagggctcgccggggacccagggccgtgcagtccaggggcctgtgggtccaccaggggtcaaaggagagaagggagaccatgggcttccaggcttgcagggccaccccggccaccagggcatccccgggagagttggcctccagggaccaaagggaatgagaggcctggagggaactgctggcctgcctggaccccctggccccagggggttccagggcatggcaggggccaggggcactagtggagagcgaggacctccagggaccgtggggcccacaggactgccagggcccaaaggggaacgaggagagaagggcgagccgcagtcccttgccaccctctaccagcttgtgagccaggcctgtgagtctgccattcagacacacgtgtcaaagttcgactccttccacgagaacaccaggccccccatgcccatcttggagcagaagctggagccgggcactgagcccctggggtcccctggcacccgcagcaaggccctggttcctggagaatgggggcgtggtggccgccaccttgagggcagaggggagcctggagctgttggtcagatgggcagccctgggcagcagggggctagcacccagggcctctgggagtgacaggacattttctgcactgccccgaggaacgctgagccttcctccctgggtttgtctggacaccgagagcgaccacatcctggagaagccaggagaaaagctcaggaagagcctgcaggtggaaggagagggaagcagcggcctcggccaaggcccaccccatactcttggctctgtagcatttccaagttcagataaacccctgagtgctcaccca

SEQ ID NO: 4614 - DNA, 8097 bp, Homo sapiens
  source 1..8097: mol_type = unassigned DNA
gtcagggagaggacagacggggggacggctgaagggcatggcctcttccctgccacagcccgagcaccatgagctccggagaccctgcacacctcggcctctgcctctggctgtggctgggcgccaccctgggaagagagcaagttcaagcaagcggtctcctgaggctggctgtgctgcctgaggaccggctgcagatgaagtggagagagtcggaggggagcggcctcggctacctggtgcaggtgaagcccatggcaggggactcggaacaggaggtgatactgaccaccaagacccctaaggccacagtggggggcctgagcccctccaagggctacaccttgcagatcttcgagctcactggctctgggcgcttcctgctagctcggagggagtttgtgattgaggatctgaagagtagctccctggacaggagcagccagaggcccctcggctctggagccccggagcccaccccctcccacacggggagcccagaccctgagcaggcttctgagccccaagttgccttcacaccaagccaggatccgcgcactcctggtgggtcagagtggagagagaccggcccccagttccgctgcctgccccccgtgcctgctgacatggtcttcctggtggacgggtcctggagcattggccacagtcacttccagcaggtcaaggacttcctggccagtgtcatcgcaccctttgaaatcgggccggataaggtccaagtaggcctgactcagtacagcggggatgctcagactgagtgggacctgaactccctcagcaccaaggaacaggtgctggcagctgtgcgccgcctccgctacaagggggggaacacgttcacaggccttgccctgacccacgtgctggggcagaacctgcagccggcggctggcctccgtccagaggcagccaaggtggtgattctggtgacggacggcaagtcccaggacgatgtgcacactgctgcccgtgtcctcaaggacctgggcgtgaacgtcttcgctgtgggtgtgaagaacgccgatgaggctgagctgaggctcctggcgtccccgccgagggacatcaccgtccacagcgtgctggacttcctgcagctcggcgcgctggctggcctgctcagccgtctcatctgccagaggctccagggtgggagcccgcggcagggcccagcagcggctccagccctggacaccctccctgcccccaccagcctggtcctgagccaggtgacctcctccagcatccgcctgtcctggactccagccccccggcaccccctcaagtatctgatcgtttggcgagcctctagaggtggcacccccagggaggtggtggtggagggacccgccgcctccacggagctgcacaacctggcctcccgcacagagtacctggtctccgtgttccccatctatgagggcggggttggcgaaggcctgcggggcctggtgaccacagcacctctgcctccgccccgggcgctgaccctggccgcagtgacgcccagaaccgtccacctcacctggcagccctcggccggggccacccactacctggtgcgatgttctcctgcttcccccaagggtgaagaggaggagcgagaggtgcaggtcgggcggcccgaggtgctgctggatggcctggaacctggcagggactatgaggtctcggtgcagagcctgcgaggccctgagggcagcgaggcccggggcatccgtgccaggacccccaccctggcccccccgagacacctgggcttctcagacgtgagccacgacgcggcacgagtgttctgggagggtgccccgaggcctgtgcgcctggtcagggtcacctatgtgtccagcgagggtggacactcggggcagacagaggctcctgggaacgccacctcggccacgctggggcctctctcttcctccaccacctacactgtccgtgtcacctgcctctaccctgggggtggctcctctacgctgactggccgggtgaccaccaagaaagctcccagcccaagccagctgtccatgacggagctgccaggggatgcagtccagctggcgtgggtggccgcagccccgtctggcgtgcttgtctaccagatcacgtggacgcccctgggagaggggaaggctcacgagatctctgtcccagggaacctcggcacggccgtcctgcctggcctagggaggcacacagagtacgacgtcaccatcttggcctactacagggacggggcccgcagtgaccctgtgtccctccgctataccccctccacggtgagcaggagcccaccctccaacctggccctggcctcggagacccccgacagcctgcaggtcagctggacgcccccgcttggccgcgtgctccattactggctcacctacgcccccgcctctggcttgggacccgagaaatccgtctctgtgccaggagccaggagccacgtgacactgcccgacctgcaggcagccacgaagtacagggtcctggtctcagctatctatgcagcaggcaggagtgaggctgtgtctgccacgggccagacagcctgcccagccctccgccctgacggctccctcccagggtttgacctgatggtggccttcagcctggtggaaaaggcttatgcgtccatccggggcgtggccatggagccctctgccttcggtgggaccccgaccttcacgctcttcaaggacgcccagctgacaagacgggtcagtgacgtctacccagcccccctacctccagagcacaccatcgtcttccttgtgcgcctacttcccgagacaccccgtgaggccttcgcgctgtggcagatgacagccgaggacttccagcccctccttggggttctgctggatgccgggaagaagtccctgacctacttccaccgtgaccccagggctgccttgcaggaggccaccttcgacccgcaggaagtgaggaagattttcttcgggagcttccacaaggtgcacgtggctgtgggccgctccaaggtcaggctctatgtggactgccggaaggtggctgagcggccccttggggagatgggcagcccacccgctgcgggcttcgtcacgctggggaggctggccaaggccaggggcccccggagcagttcggccgcgtttcagctccagatgctgcagatcgtgtgcagtgacacctgggccgatgaggaccggtgctgtgagctccctgcctcgagggatggagagacctgccccgccttcgtgtctgcctgttcctgttcctcagagacccctgggcccccaggacctcaaggacccccaggcctccctgggaggaatggcaccccaggagagcagggcttcccagggcccaggggtccaccaggggtcaaaggagagaagggagaccatgggcttccaggcttgcagggccaccccggccaccagggcatccccgggagagttggcctccagggaccaaagggaatgagaggcctggagggaactgctggcctgcctggaccccctggccccagggggttccagggcatggcaggggccaggggcactagtggagagcgaggacctccagggaccgtggggcccacaggactgccagggcccaaaggggaacgaggagagaagggcgagccgcagtcccttgccaccctctaccagcttgtgagccaggcctgtgagtctgccattcagacacacgtgtcaaagttcgactccttccacgagaacaccaggccccccatgcccatcttggagcagaagctggagccgggcactgagcccctggggtcccctggcacccgcagcaaggccctggttcctggagaatgggggcgtggtggccgccaccttgagggcagaggggagcctggagctgttggtcagatgggcagccctgggcagcagggggctagcacccagggcctctgggagtgacaggacattttctgcactgccccgaggaacgctgagccttcctccctgggtttgtctggacaccgagagcgaccacatcctggagaagccaggagaaaagctcaggaagagcctgcaggtggaaggagagggaagcagcggcctcggccaaggcccaccccatactcttggctctgtagcatttccaagttcagataaacccctgagtgctcacccagccaagcgaggcgggagtcatttcctgggagagtgtcccccaccctggctctgtgcaccccaccttgaggccctgcagcttcagccgcagtggggaaggggaggggctgggctgatggcgaatcgggttcaggagggcagcagtgccctgtggccgtctcagtagctctaaaacaggctcaacaacatgccccgcccctttctctgggcctcatctaagcctggccagggccctgtgggcccgcctctctctgcgcctcacgcaggcaacagatggttccactgctggcccaccagtcacctgcacgatggctcctccctcagaacagcactcccaccccggccccagcaccttcacatctgggcacaggcaggtccctgcctgcctcatcgtcccctctgtccccagcccaagaaggagttcagatcctgtgtgtgaatggccacccctcacccacccagccctgtgctgagttccttgtgcagggacattgctttgagacttggcaccatcagcccctggtccttagggtctcagagcaaggtcatccctcagcaggcttctggcctgtgcgctcctcagcacctctgcccaggtctctcccaaccatcacagacgctgtgtgagcctggacttcctgccttatccccactgtggcccaaacagcatgggggcaagctcagaacacacacctgggcttctgggccttgtggcccgtgggggtgatgtgggaacttctacttcctttccaaacaaatattcagtaactagtccactgttaccacttaggcagctaagcaagaaaggtgccagaaatgaagagggaagccatatcattgaggagagaatgaaaagtattaaaaaggaacaaagagagacccttgatattgacagaaggaaaacccaccaagatcaccagtgcagcattgcgtgcaccaaagcataccccaaagaggtgagcgcaaaacagcttcagggcaaacacttcatctatgattcaactgttccaggaactgaccagacctggagaccaaatagagagtcataggcagggtcagcaggatgggagagagcgcctgcacccacaggagccacagccctgactgaggccaggaagcagccccaaatgccagctcccactgcagcatgagaacagaaacagaccactgaaaattcccaaagtctgtggacaaatcagacgtcgaagaagtcacgtggcatcgagacagattttgcactgagggacaaggagagcatgtggccaaagtaggtgcaggtaaagcagcatctggggcagagttatagccttcagtgcaggtatcagacacagttgttgagagcagcagcccaagccagcccctccgtcctgcagggaggacacctaggtcacttggcttctgttggggagctgagttgcttcagattgtgtgaccagcaaaacagcttggttgctctcacttggtttctccagggcggggaattacatgtccccagctgaactgagaaggctctttgagcagtggagtgagcaggctttgtcatgaggcaggagtggggctagaatcaagcccagagcccacagggcatccagagccttccaaaggagcccctctcctggggctctccaatttgatgaagggactgggcactgggtggctgagaccacattggcagccaggaggaggcagcctggccggggggaaccagggtggctctaatccccaccaccccctcagctgccctacccccgccacgctggtgtgacaccagtgatgctcagcctcaaaaggggagtccggctgtcttcgggaaactgactttatgctggaggccaattaaaatggcacagcaaaggcagcggccagctggtgcccaggcagcttagggactggtccctgaggccccacccgccccagcctgtgcagtggagctgagtacgaatcaaaggtgaggatggcaagggagctgagagcagcctccggatgcaccaaaccggcctggctcctgtttgcaggaaggcagcctccccgagacccagccgacctgcacgtctcccatcagccccgactccaccgcatccctctgggtccttttaggagcccccagggactgagccggggctcacgctcctggccagagcgctgggtttctggcaatgcctcccctcctgcctttacggccacagctctcccctccagaggcccctctgtagtgggcctcggtcccctctccacccccagaggcagcacagcttcagccctacgcagtgtgggggctccgggaggaaatgcagggaggtgcttggtcttggcccagagctcatggccttaggtgctgcccccagtcacccccgtgcccatgcagccggggatgttcagctcaggccagccaccgaggtggtgtgacgcaaggctgatctgacgctcagctcaggccgctggggtcatgggggttgtgggaaggtcatggaatcacggggctcacgctggggtcacagggtggtgtggctgtgtggactgtaaggggcgtgcagccatgcgtatctgacctgccctccctaggtctgcaggcagtgccgagtggctctgcctgaggccccaagagcgaccttggaagctccaggccttcacagcccctctgagagccacctgcaaggtggggagctgggaagaacggctcagtgatgagctcagagggaggggtgggcacagcgcccaggaaggcgggtgcgtgcaggcctgggaggaatgtgtagcaggaggcagggggtgctgtgcccgcaggaccagcaggtgaggcgtgtccacccacagaggatggctctggcccaggcagtgtcagaaatggaagctgaggaaacccaaccccagctgtagaggagcctgccccgatgccatctgcacctggggggcgacgtatggctgccagcctcttcatctaccaaggaccagggcagtggggacgggagagctgggacacgtggactcacaccagggcagatggtgggggaagccagtgtctgtagattcagtgcatttcttggggaagggcgtggaacatttggacttgagccccagcacagagacgatgtcataatacagccccccatcgtgatctgatggtaagtacagaactccttgcccagtggagaaacactctcctctcatgtgtggaatatccacacactaaccatgaactgggccataagaaaccttacattccaaaggatcctgctgttcagaactcactcactcactgatgaaactggaaaaacaaccaatgataacaagctaaagaatgcctctagaagctaaaagacacacccatgactccacagtaattcatgggttaaagagaaaaaaggaaacgtgaagatacttgtaaccaaataatgatggatgcagcgccacgtcagaatctctgtgctgcagctgcagtggtacctagagggcaatttatagctgtaaatacagtgctttgttttgttttcttgttttttgagacaaggtcttgctctgtcacccaggctggagtacagtggcatgatctcggctcaatgcaacctctgtgccaccctgggctcaagtggtcctcctgctccggtcttctgagtagcaggaaccacaggcgtgcgccaccacgcttggctaatgttttttgtatttttttaaatagagacagggtgttgccgtgttacccaggctggtcttgaacttctgagctcaaacgatccaccctccttggcctcccaaagtggtgggattacaggtgtgagtcacctcaccggcccttaaacacagtttttagggaagattccaactcaaacaattttaaatagtagaaaataaaccctgaagcagtgtgcattcattagtactgtgtttgcctgtatttaattaaaacctgattgccattggc

SEQ ID NO: 4615 - DNA, 1204 bp, Homo sapiens
  source 1..1204: mol_type = unassigned DNA
gagcacaccatcgtcttccttgtgcgcctacttcccgagacaccccgtgaggccttcgcgctgtggcagatgacagccgaggacttccagcccctccttggggttctgctggatgccgggaagaagtccctgacctacttccaccgtgaccccagggctgccttgcaggaggccaccttcgacccgcaggaagtgaggaagattttcttcgggagcttccacaaggtgcacgtggctgtgggccgctccaaggtcaggctctatgtggactgccggaaggtggctgagcggccccttggggagatgggcagcccacccgctgcgggcttcgtcacgctggggaggctggccaaggccaggggcccccggagcagttcggccgcgtttcagctccagatgctgcagatcgtgtgcagtgacacctgggccgatgaggaccggtgctgtgagctccctgcctcgagggatggagagacctgccccgccttcgtgtctgcctgttcctgttcctcagagacccctgggcccccaggacctcaaggacccccaggcctccctgggaggaatggcaccccaggagagcagggcttcccagggcccaggggagagcccgggccacccggacagatgggaccagaaggtcctggaggccagcagggctcgccggggacccagggccgtgcagtccaggggcctgtgggtccaccaggggtcaaaggagagaagggagaccatgggcttccaggcttgcagggccaccccggccaccagggcatccccgggagagttggcctccagggaccaaagggaatgagaggcctggagggaactgctggcctgcctggaccccctggccccagggggttccagggcatggcaggggccaggggcactagtggagagcgaggacctccagggaccgtggggcccacaggactgccagggcccaaaggggaacgaggagagaagggcgagccgcagtcccttgccaccctctaccagcttgtgagccaggcctgtgagtctgccattcagacacacgtgtcaaagttcgactccttccacgagaacaccaggccccccatgcccatcttggagcagaagctggagccgggcactgagcccctggggtcccctggcacccgcagcaaggccctggttcctggagaatgggggcgtggtggccgccaccttgagggcagag

SEQ ID NO: 4616 - DNA, 750 bp, Homo sapiens
  source 1..750: mol_type = unassigned DNA
gagcggccccttggggagatgggcagcccacccgctgcgggcttcgtcacgctggggaggctggccaaggccaggggcccccggagcagttcggccgcgtttcagctccagatgctgcagatcgtgtgcagtgacacctgggccgatgaggaccggtgctgtgagctccctgcctcgagggatggagagacctgccccgccttcgtgtctgcctgttcctgttcctcagagacccctgggcccccaggacctcaaggacccccaggtccaccaggggtcaaaggagagaagggagaccatgggcttccaggcttgcagggccaccccggccaccagggcatccccgggagagttggcctccagggaccaaagggaatgagaggcctggagggaactgctggcctgcctggaccccctggccccagggggttccagggcatggcaggggccaggggcactagtggagagcgaggacctccagggaccgtggggcccacaggactgccagggcccaaaggggaacgaggagagaagggcgagccgcagtcccttgccaccctctaccagcttgtgagccaggcctgtgagtctgccattcagacacacgtgtcaaagttcgactccttccacgagaacaccaggccccccatgcccatcttggagcagaagctggagccgggcactgagcccctggggtcccctggcacccgcagcaaggccctggttcctggagaatgggggcgtggtggc

SEQ ID NO: 4617 - DNA, 1924 bp, Homo sapiens
  source 1..1924: mol_type = unassigned DNA
ttttcttgtctaatggtgttggtgaatactccagaattttgtcagagaacagtggcagtagcagatactctcattttcttcttggcctaacagaagtgcttctagcatttgaccattaaagtgctgtcctggaagcggagacaggtgcattttgtcatgtggtagtgaagtccatccactcttcttttattagatttaaaacaccaagaatgcacattaaacaagctctagtgctgttatggacataatgaaatgactgtgcgtcttggagctattaattgtaggatatccctaaatactggatgattgctgcatccgtcgaaaatctgacgtggtcgctgaattctcgttatccatgccatgtgctgcagagctcagcttgctgacattttgttttggatttcgcactgatgcttctaaataagactgtcacagttttctttatagtgtttggaacctcagtttgctttgttcaaaagataatttgagtttaaatagcagcagtgtcctctgccccacagggttggatttcccataaaacctgagtctagtgttttggggtccagggcttaagaaagttttctgtctcttccatacagttggcctgtgggggtctctggcttttcctcggtgatttctgcagcgccccccacaccccgttagaacccagagttgggcaggggagggctgggggtgaggttggttggaactggcttcacaggcttggctctgccattctctagctctgcagacccctgctgtgggttctcccagaccctcccagggtgagcagtgagggtgctggggctgcccctgctcctttaatggaggtgtctccatgtcggtctgggtctgaatgcccagagggctgggagggctggctgtgacccagaggggccacaggaggggtggcaagcgtgaccttgtcaggccctacccgctgcctgtgtctccagggagagcccgggccacccggacagatgggaccagaaggtcctggaggccagcagggctcgccggggacccagggccgtgcagtccaggggcctgtggtaggtgtcactccttccctgccctcctgccctgtgccccctccgcttcgctgtccagcccatcttccccctccagggtccaccaggggtcaaaggagagaagggagaccatgggcttccaggcttgcagggccaccccggccaccagggcatccccgggagagttggcctccagggaccaaagggaatgagaggcctggagggaactgctggcctgcctggaccccctggccccagggggttccagggcatggcaggggccaggggcactagtggagagcgaggacctccagggaccgtggggcccacaggactgccagggcccaaaggggaacgaggagagaagggcgagccgcagtcccttgccaccctctaccagcttgtgagccaggcctgtgagtctgccattcagacacacgtgtcaaagttcgactccttccacgagaacaccaggccccccatgcccatcttggagcagaagctggagccgggcactgagcccctggggtcccctggcacccgcagcaaggccctggttcctggagaatgggggcgtggtggccgccaccttgagggcagaggggagcctggagctgttggtcagatgggcagccctgggcagcagggggctagcacccagggcctctgggagtgacaggacattttctgcactgccccgaggaacgctgagccttcctccctgggtttgtctggacaccgagagcgaccacatcctggagaagccaggagaaaagctcaggaagagcctgcaggtggaaggagagggaagcagcggcctcggccaaggcccaccccatactcttggctctgtagcatttccaagttcagataaacccctgagtgctcaccca

SEQ ID NO: 4618 - DNA, 1497 bp, Homo sapiens
  source 1..1497: mol_type = unassigned DNA
gacttcctgttgaccgctcagagacttcctgttggccactcagggacttcctattgaccacccagggacttcctattgaccactcagggacttcccatttgttgttggaggcctgttctgagctgggagcttggtgttggtgctagtacaagagagtgtagctaagggctggttctgcacctctcccaaccccacccaggacagacgtggtggaggggaggtggtggggcggcaggctccatggagggtagggggacagacgtgggagatgggggtgtagtgtcccctgggggatgccttggccttcagcagctccatgggcccccccttaggtgggctccaggttcaccaaggagctggggaggtggaagaagacagaagacggcagggaagtgccagcacaggcctgacccgggcccggggcccgggaggggtctgttctctgggcagtgtcccacacccgccatctcccctagcacaaaatctacagccagaggcaagtcctttgtggcacaagttccagccccactcaggactctgctgcagaaccgagcctctcacatgcctgctctcgggtgcaggcgaggaccacaggctcctaggatctgggaatttgggatggggctttcacaccgccactgtggctatcaggctgcctgagtgaggatccacctcagggccatctcacacttgtcacgtgtggtctcaggccatctctgctgacttcttttctcttcccctcctcatcagggactgccagggcccaaaggggaacgaggagagaagggcgagccgcagtcccttgccaccctctaccagcttgtgagccaggcctgtgagtctgccattcagagtgagtgaggccagcagccctgcacctgtgcctaccacacctgtctgtcctcacactggccaggccgagggaggccgccttcacccatcgttagcacacctgggccaggtgtcctggcgtggcctgcacaggcctcgcatccccgggtccccactgtgtcctgctgacacccctcctccccacagcacacgtgtcaaagttcgactccttccacgagaacaccaggccccccatgcccatcttggagcagaagctggagccgggcactgagcccctggggtcccctggcacccgcagcaaggccctggttcctggagaatgggggcgtggtggccgccaccttgagggcagaggggagcctggagctgttggtcagatgggcagccctgggcagcagggggctagcacccagggcctctgggagtgacaggacattttctgcactgccccgaggaacgctgagccttcctccctgggtttgtctggacaccgagagcgaccacatcctggagaagccaggagaaaagctcaggaagagcctgcaggtggaaggagagggaagcagcggcctcggccaaggcccaccccatactcttggctctgtagcatttccaagttcagataaacccctgagtgctcaccca

SEQ ID NO: 4619 - DNA, 723 bp, Homo sapiens
  source 1..723: mol_type = unassigned DNA
acagacgtctcaggaaactgggggcaacctggggggagccccgtgggctgtgggaacccctgcccccggcttggaagctgcccacagtggcctggttgcagcctggcagatgaggggtacatcactactcagaataaacggccccctctgcacccacctgtctagatgagggtgacaggcactatcacagggcccccacctgacgccttcccacctggccatgcccccccagaactgtcatggagcccaggaggcgcctgtgtggagcacggggacctggcacgctgctgcccctagatctcagactcccatctaaggaccagacctgctgcctgtgcccagggaggggccctgacaccctctgtccccgtcagaacagggccccaagccactgcattgctccgtcctcacatgccctccctttcctcgcaggggagcctggagctgttggtcagatgggcagccctgggcagcagggggctagcacccagggcctctgggagtgacaggacattttctgcactgccccgaggaacgctgagccttcctccctgggtttgtctggacaccgagagcgaccacatcctggagaagccaggagaaaagctcaggaagagcctgcaggtggaaggagagggaagcagcggcctcggccaaggcccaccccatactcttggctctgtagcatttccaagttcagataaacccctgagtgctcaccca

SEQ ID NO: 4620 - DNA, 3584 bp, Homo sapiens
  source 1..3584: mol_type = unassigned DNA
ctgcattctggctgcaaaaacagctcctggtttgaaacaacttaatggagaaccaggagaaagaggggaagatggtctgcctggaaaaccaggccttcggggagaaattggggagcagggcctggcaggccgacctggagagaagggagaagcaggcctcccaggggctccaggcttcccaggtgtgagaggagagaaaggagaccagggagaaaaaggtgaactgggacttccaggactgaaaggtgaccgaggtgaaaagggtgaagctggtcctgcaggccctcccgggttacctggaactacatccctgttcacaccacatccacggatgcccggagaacaagggcccaaaggagagaagggcgatccaggcctgcctggggaaccgggactgcagggccgtcctggagaattggggcctcagggacccactggaccaccgggtgccaagggacaggaaggtgcacatggggctcctggagcagctggaaaccccggtgctcccggacatgtcggtgcccccggtcccagtggccctccaggaagtgtgggtgctcccggcctcagaggcaccccagggaaagatggggagcgtggtgagaagggtgcagcgggggaagaaggcagcccagggccagttggtcccaggggagatcctggtgctcctgggctccctgggccacccggaaaagggaaggatggagagccgggactccgtggatcacctggactccctggacccctaggaaccaagggggatcgaggagctcctgggatccctggttctcctggcagccgtggtgacccaggcattggggttgctggccctcctggcccttccggaccaccaggagacaaaggatccccgggatcacgaggcttacctggattccctggcccccagggcccagccggccgggacggtgcaccaggaaatccaggagaaagagggcctcctggcaagccgggcctctcttcactactgtctccaggggacataaatctcttggctaaggatgtgtgcaatgactgccctcctggccccccaggcctccctggtctaccaggttttaaaggggacaaaggtgtcccaggaaagccagggagagaaggcacagaagggaaaaagggagaggctgggcctccaggcctaccagggcccccaggaatagctggaccacagggaagtcaaggagaacgtggtgcagatggtgaggttgggcagaaaggtgatcagggtcatcctggagttccaggtttcatggggcccccagggaaccctgggccaccaggggcagatggaattgcaggagctgctggaccaccaggaatccaagggtcacctgggaaagaaggccctcctggcccccaaggcccatctggattacccggaatcccaggagaagaaggcaaagagggcagagatggaaagccgggtccccctggagagccgggcaaagcaggagagccaggtctaccaggaccagagggtgcccgaggcccacctggcttcaagggacacacaggcgattctggtgcacccggtccccggggagagtctggtgccatggggcttcctggtcaggaagggttaccaggaaaagatggtgacactggacccactgggccacagggtccccaaggaccaaggggcccaccgggcaagaatggatcaccgggatctccaggagagcctggcccttcaggaacccctggccagaaaggaagcaaaggggaaaatggcagcccaggacttcctggcttcctgggtccccgtgggcctccgggagaaccaggagagaaaggagtcccaggcaaggagggggtccctgggaagcctggagagcctggattcaaaggagaaaggggagatcctgggatcaaaggtgacaaaggacctcctggtggaaaaggccagcctggggaccctggaatcccaggccacaaaggccacacaggcctgatgggtccccaaggactacctggggagaatggaccagttggacccccagggcctccaggccagccgggatttccaggactgaggggggagtctccatccatggaaaccctgcgtcggcttattcaagaagagctggggaagcagcttgaaaccagactcgcctacctcctggcccagatgcccccggcgtacatgaagtcatctcaaggcagacctgggcccccagggccccctggaaaagatgggcttccaggccgggccggccccatgggggagccaggtcgtcctgggcaggggggtctggaaggaccctctggacccataggtcccaaaggtgagcgaggagccaaaggtgacccaggtgcacctggagttggcctccgaggcgagatgggaccccctggaatcccaggtcaacccggggaacctggctatgctaaagatggacttcctgggatccctggccctcaaggggagacaggaccagctggacatcctggcctcccaggacctcccggtcccccaggccaatgtgacccttcccagtgtgcctacttcgccagccttgctgcccggccgggtaatgtgaagggtccctaaaggactctggaaagccagaagactgcagtggatttctgaaacttgaactcagagcccagtgggaagccagaggtcttgaaagacttcagccatgtgttccttttttttttctttcttttatcgtttgctttttgttttattttcttgagagacctcaaaattattaaatccaacagacgctgccggtcggtcagattattattaatattattgttgttgttaattattattattatttcatatgctgatgctttgtgagttcttttccactcctttaaagttgggaaaacttgattcgtggggcaggagattgtttcttcattcttctgacagcccccatctgacgcgtaactgcccattttaaggaaactcttggtgctacaaaaccctgaccagacacttggcaaatttacctctttcttcaaaagaaaaactttaagaaaatgagccaatgggcttcattctcagtcatgcccggagatcacccaggagaaataatacaaacaccaccactgtccagagagagtaaagaagcagaaagagaaagaatttgcaaccatgaggaatgttcccacctcccgacgggacgtgcatttggaaaacacagaatcagccctcagggtgcactccagccacctcagtgctctaagctcacagaagtgaaataatgtctgtgggttggcaatggctttgtgggatcatatgtcttggccaaagatgggaaaacctatgttgaagaggcagcccttgagtgttaatttgtcttctaaactgtgtaaggccccttcaagttcctcttgttggtttcaattatattaattataaaacaagtggatgtggtgaccatccacttgtgtttccctaatgatgggcagttggccagggcactgaccagagctgggaaatttgtatctccaaggcggctctgtctctgaaataaatggcatcaagtgcatgtgtgtatgcgacatgccctgcctgaacaggtgctcaataaatccaagtttccttctcttga

SEQ ID NO: 4621 - DNA, 6346 bp, Homo sapiens
  source 1..6346: mol_type = unassigned DNA
ggggctggccgaggctgcggcgtttctccccaaggaagtgtcttctccgctttccctgttcttctgtttctcacacactttctatctcattctgtaactttcaagcctttccttctaactgtatgtatttagttacttgttttcaagctggttccctctctggccccctggcctggggaaagcctccacacttactgcgggtcttgtttagagtctgagtttgtgagattatttgggggagagtgggcgagtggctgacaggtgacccccaggaggaggattcctggggctggtgtcttctcccagctgctgcttccagtgggcctgggcccaggactggacctccgctggcacccctgagtgcctccctgccaggccatgctgctgtagaccctaacagcgtctcttcctggccaagagaagcctgtccccaagaacaggagagccatggccggcctccgagggaacgctgtggctggcctcctctggatgctgctgctgtggagtgggggcggcggctgccaggctcagcgggcaggttgcaaaagtgtccactacgatctggtcttcctcctggacacctcctccagcgtgggcaaggaggactttgagaaggtccggcagtgggtggccaacctggtggacaccttcgaggtgggccccgaccgcacccgtgtgggggtcgtgcgctacagcgaccggcccaccacggccttcgagttgggactctttggctcgcaggaggaggtcaaggcggctgcccggcgtctcgcctaccacgggggcaacaccaacacgggagacgcgctccgctacatcacggcccgcagcttctccccacacgccggcggccgccccagggaccgcgcctacaagcaggtggccatcctgctcaccgacggccgcagccaggacctggtgctggacgccgcggcggcagcccaccgcgctggcatccgcatctttgccgtgggcgtgggcgaggcactcaaggaggagctggaggagatcgcctcagagcccaagtccgcccacgtcttccacgtgtccgacttcaatgccatcgacaagatccggggcaagctgcggcgccgtctttgtgaaaatgtgctctgtcctagcgttcgtgtagaaggagatcgctttaagcacaccaatggaggaaccaaggaaatcacaggttttgacctgatggatttgttcagtgtgaaggaaatcttggggaagagagagaatggagctcagagttcctatgtacggatgggatccttccctgtggtgcaaagtactgaggatgtgttcccccaaggtttacctgatgagtacgcctttgtcacaaccttccggttcaggaaaacctctcggaaggaagactggtatatctggcaggtcatcgaccagtacagcatcccacaggtctccatccggctggatggtgaaaacaaggcagtcgagtacaacgctgtgggtgccatgaaagatgctgtcagggtggtcttccgaggttctcgggtcaatgacctctttgaccgggactggcacaagatggccctgagcatccaggcccagaacgtctccctgcacattgactgtgcgctggtgcagacactacccatcgaggaacgggagaacattgacatccagggcaagactgtgattggcaagcgcctctacgacagtgtgcccattgactttgacctacagcggattgtgatctattgtgactcgagacacgcagaattggagacttgttgtgatatcccctcgggtccgtgccaggtgaccgtggtgacagagcctccacctccacccccaccccagcggcctcccaccccaggcagtgaacagattgggtttttgaagaccatcaactgctcctgcccagctggagagaagggtgaaatgggagttgctggccccatggggctccctggtccaaagggagacataggagccattgggccggttggcgctcctggacctaagggagagaaaggtgatgtgggcataggaccttttggccaaggggaaaagggtgaaaagggttccctgggcctgcccggcccccctgggagagacggcagcaaaggcatgagaggggagccaggagagctgggagagccggggctgccgggtgaggtcggcatgcgggggccccaaggaccacctggactccccggacctcctggacgtgtcggagctcctggtctccaaggagaacgaggtgaaaagggaactcgaggagaaaagggagagcgaggcctggatggattccctgggaagcctggggacacaggacagcagggcaggcccggcccttctggtgtggcaggaccccagggagaaaagggtgacgtgggacctgcggggccacctggtgtaccaggctcagtggtgcagcaagagggcttgaaaggggaacagggagctccaggacccagaggtcaccaaggcgcccccggtcctccaggagctcggggtccaataggcccagaaggcagggatggacctcctggtttgcaaggtctccgagggaagaaaggtgacatgggaccacctggaatccctggattgctggggctgcagggccctccaggaccccctggtgtcccaggcccccctggaccgggaggttctccgggtttgcctggagagatcggcttcccgggaaagcctggacctcctgggcccacgggaccccctggaaaggacgggccaaatggaccaccaggtccgccaggaaccaagggagaaccaggagaaagaggggaagatggtctgcctggaaaaccaggccttcggggagaaattggggagcagggcctggcaggccgacctggagagaagggagaagcaggcctcccaggggctccaggcttcccaggtgtgagaggagagaaaggagaccagggagaaaaaggtgaactgggacttccaggactgaaaggtgaccgaggtgaaaagggtgaagctggtcctgcaggccctcccgggttacctggaactacatccctgttcacaccacatccacggatgcccggagaacaagggcccaaaggagagaagggcgatccaggcctgcctggggaaccgggactgcagggccgtcctggagaattggggcctcagggacccactggaccaccgggtgccaagggacaggaaggtgcacatggggctcctggagcagctggaaaccccggtgctcccggacatgtcggtgcccccggtcccagtggccctccaggaagtgtgggtgctcccggcctcagaggcaccccagggaaagatggggagcgtggtgagaagggtgcagcgggggaagaaggcagcccagggccagttggtcccaggggagatcctggtgctcctgggctccctgggccacccggaaaagggaaggatggagagccgggactccgtggatcacctggactccctggacccctaggaaccaaggctgcttgcggaaaagtcagagggtcagaaaactgtgcactgggagggcaatgtgttaagggggatcgaggagctcctgggatccctggttctcctggcagccgtggtgacccaggcattggggttgctggccctcctggcccttccggaccaccaggagacaaaggatccccgggatcacgaggcttacctggattccctggcccccagggcccagccggccgggacggtgcaccaggaaatccaggagaaagagggcctcctggcaagccgggcctctcttcactactgtctccaggggacataaatctcttggctaaggatgtgtgcaatgactgccctcctggccccccaggcctccctggtctaccaggttttaaaggggacaaaggtgtcccaggaaagccagggagagaaggcacagaagggaaaaagggagaggctgggcctccaggcctaccagggcccccaggaatagctggaccacagggaagtcaaggagaacgtggtgcagatggtgaggttgggcagaaaggtgatcagggtcatcctggagttccaggtttcatggggcccccagggaaccctgggccaccaggggcagatggaattgcaggagctgctggaccaccaggaatccaagggtcacctgggaaagaaggccctcctggcccccaaggcccatctggattacccggaatcccaggagaagaaggcaaagagggcagagatggaaagccgggtccccctggagagccgggcaaagcaggagagccaggtctaccaggaccagagggtgcccgaggcccacctggcttcaagggacacacaggcgattctggtgcacccggtccccggggagagtctggtgccatggggcttcctggtcaggaagggttaccaggaaaagatggtgacactggacccactgggccacagggtccccaaggaccaaggggcccaccgggcaagaatggatcaccgggatctccaggagagcctggcccttcaggaacccctggccagaaaggaagcaaaggggaaaatggcagcccaggacttcctggcttcctgggtccccgtgggcctccgggagaaccaggagagaaaggagtcccaggcaaggagggggtccctgggaagcctggagagcctggattcaaaggagaaaggggagatcctgggatcaaaggtgacaaaggacctcctggtggaaaaggccagcctggggaccctggaatcccaggccacaaaggccacacaggcctgatgggtccccaaggactacctggggagaatggaccagttggacccccagggcctccaggccagccgggatttccaggactgaggggggagtctccatccatggaaaccctgcgtcggcttattcaagaagagctggggaagcagcttgaaaccagactcgcctacctcctggcccagatgcccccggcgtacatgaagtcatctcaaggcagacctgggcccccagggccccctggaaaagatgggcttccaggccgggccggccccatgggggagccaggtcgtcctgggcaggggggtctggaaggaccctctggacccataggtcccaaaggtgagcgaggagccaaaggtgacccaggtgcacctggagttggcctccgaggcgagatgggaccccctggaatcccaggtcaacccggggaacctggctatgctaaagatggacttcctgggatccctggccctcaaggggagacaggaccagctggacatcctggcctcccaggacctcccggtcccccaggccaatgtgacccttcccagtgtgcctacttcgccagccttgctgcccggccgggtaatgtgaagggtccctaaaggactctggaaagccagaagactgcagtggatttctgaaacttgaactcagagcccagtgggaagccagaggtcttgaaagacttcagccatgtgttccttttttttttctttcttttatcgtttgctttttgttttattttcttgagagacctcaaaattattaaatccaacagacgctgccggtcggtcagattattattaatattattgttgttgttaattattattattatttcatatgctgatgctttgtgagttcttttccactcctttaaagttgggaaaacttgattcgtggggcaggagattgtttcttcattcttctgacagcccccatctgacgcgtaactgcccattttaaggaaactcttggtgctacaaaaccctgaccagacacttggcaaatttacctctttcttcaaaagaaaaactttaagaaaatgagccaatgggcttcattctcagtcatgcccggagatcacccaggagaaataatacaaacaccaccactgtccagagagagtaaagaagcagaaagagaaagaatttgcaaccatgaggaatgttcccacctcccgacgggacgtgcatttggaaaacacagaatcagccctcagggtgcactccagccacctcagtgctctaagctcacagaagtgaaataatgtctgtgggttggcaatggctttgtgggatcatatgtcttggccaaagatgggaaaacctatgttgaagaggcagcccttgagtgttaatttgtcttctaaactgtgtaaggccccttcaagttcctcttgttggtttcaattatattaattataaaacaagtggatgtggtgaccatccacttgtgtttccctaatgatgggcagttggccagggcactgaccagagctgggaaatttgtatctccaaggcggctctgtctctgaaataaatggcatcaagtgcatgtgtgtatgcgacatgccctgcctgaacaggtgctcaataaatccaagtttccttctcttga

SEQ ID NO: 4622 - DNA, 697 bp, Homo sapiens
  source 1..697: mol_type = unassigned DNA
ggccatcacagttgactctgaggcaggagccaggctatgtacaccctctatcacaaagacctacaagggaggactgtcccaaatttacagatccagagatccggagaaaggaaatggcactttaagatcacacagctaaactaagaaacagacaaacctggaagtcagggctttaggccccacccttctttctatagttttttttttttttctaaatccaaggatgttcctttctctccccactccccaataatgggctgcatatgatttccaaggtttaaaacttgtaaacatgaggtggacagaaggtttgggaacagggcaatgccaagctgtgggcagtaaagaattttaaatagcaagagtgtcctgacaagctcttttaagatgatggggtgaggaaaaggctgtgtacgtcacaggtcgccctgccagtagggcaaagcaggagagccaggtctaccaggaccagagggtgcccgaggcccacctggcttcaagggacacacaggcgattctggtgcacccggtccccgggtaaagtctggtgccatggggcttcctggtcaggaagggttaccaggaaaagatggtgacactggacccactgggccacagggtccccaaggaccaaggggcccaccgggcaagaatggatcaccgggatctccaggagagcctggcccttcaggaaccc

SEQ ID NO: 4623 - DNA, 554 bp, Homo sapiens
  source 1..554: mol_type = unassigned DNA
ggggagccaggagagctgggagagccggggctgccgggtgaggtcggcatgcgggggccccaaggaccacctggactccccggacctcctggacgtgtcggagctcctgtaagtgaaggcacttgtctgggcaggggttctaccccttctccaggaatcaaaaaccaggttctagcaagttcctccacctgcatctagacagtaatgctgttttgccttactgatgccaatgaagtgttggtatctcctttcttagaccagaaattattagatgttacagtccataagaatcacccagagaacaagtttaaatgcatattcctgggacccctttctcacatcaagaagcagggtagatcccaggaatctgcatttttaaccagcaccacaggatttttgacacttgatctaaagaattcattttccccagcctgtcctgtactgtactcttgtaagaagggtggagtctactgaattcttagcccctggaacagtgccagactgtccagtatggtgttcagtatgtccagtgaataaagagatgaacaaacaga

SEQ ID NO: 4624 - DNA, 661 bp, Homo sapiens
  source 1..661: mol_type = unassigned DNA
gatttgtcagtgtttcctcaccagggacctcacgaggaaaacatggggaggatggagagctggaagacagggcacaaatcccattcgtgagctttctgccctcaagacctaatcacccgccaccaaaaccccatctgctgttaccatcaccttggtgtgaagatttcaacatatggatttaggaagacagcaacattcagaccatggcatcctggcatctgggacagggcaccaagcaggataagggatgtgttcccccaaggtttacctgatgagtacgcctttgtcacaaccttccggttcaggaaaacctctcggaaggaagactggtatatctggcaggtcatcgaccagtacagcatcccacagctttcagttcccatgaaggtaggacagctctccaccagcacacagtccggtgaggaaagagaaatctgaaattcaaagccatcaacaccatctgttggtttgagataaaagcaacactactatttgttctctgccaaatccaaatccccttgttctcaagtcatagacaaaccgtttctttctcctctcctagtaaaatgaactggatgaagatattactcacttttcagctgggagatactgactaaactttcactgggggctaaaataaaataaaagcatgctcaagcaa

SEQ ID NO: 4625 - DNA, 572 bp, Homo sapiens
  source 1..572: mol_type = unassigned DNA
cctgggcagtggcggggctggccgaggctgcggcgtttctccccaaggaagtgtcttctccgctttccctgttcttctgtttctcacacactttctatctcattctgtaactttcaagcctttccttctaactgtatgtatttagttacttgttttcaagctggttccctctctggccccctggcctggggaaagcctccacacttactgcgggtcttgtttagagtctgagtttgtgagattatttgggggagagtgggcgagtggctgacaggtgacccccaggaggaggattcctggggctggtgtcttctcccagctgctgcttccagtgggcctgggcccaggactggacctccgctggcacccctgagtgcctccctgccaggttgcaaaagtgtccactacgatctggtcttcctcctggacacctcctccagcgtgggcaaggaggactttgagaaggtccggcagtgggtggccaacctggtggacaccttcgaggtgggccccgaccgcacccgtgtgggggtcgtgcgctacagcgaccggcccaccacggccttcgagtt

SEQ ID NO: 4626 - DNA, 4355 bp, Homo sapiens
  source 1..4355: mol_type = unassigned DNA
cctggccaagagaagcctgtccccaagaacaggagagccatggccggcctccgagggaacgctgtggctggcctcctctggatgctgctgctgtggagtgggggcggcggctgccaggctcagcgggcaggttgcaaaagtgtccactacgatctggtcttcctcctggacacctcctccagcgtgggcaaggaggactttgagaaggtccggcagtgggtggccaacctggtggacaccttcgaggtgggccccgaccgcacccgtgtgggggtcgtgcgctacagcgaccggcccaccacggccttcgagttgggactctttggctcgcaggaggaggtcaaggcggctgcccggcgtctcgcctaccacgggggcaacaccaacacgggagacgcgctccgctacatcacggcccgcagcttctccccacacgccggcggccgccccagggaccgcgcctacaagcaggtggccatcctgctcaccgacggccgcagccaggacctggtgctggacgccgcggcggcagcccaccgcgctggcatccgcatctttgccgtgggcgtgggcgaggcactcaaggaggagctggaggagatcgcctcagagcccaagtccgcccacgtcttccacgtgtccgacttcaatgccatcgacaagatccggggcaagctgcggcgccgtctttgtgaaaatgtgctctgtcctagcgttcgtgtagaaggagatcgctttaagcacaccaatggaggaaccaaggaaatcacaggttttgacctgatggatttgttcagtgtgaaggaaatcttggggaagagagagaatggagctcagagttcctatgtacggatgggatccttccctgtggtgcaaagtactgaggatgtgttcccccaaggtttacctgatgagtacgcctttgtcacaaccttccggttcaggaaaacctctcggaaggaagactggtatatctggcaggtcatcgaccagtacagcatcccacaggtctccatccggctggatggtgaaaacaaggcagtcgagtacaacgctgtggcaggaccccagggagaaaagggtgacgtgggacctgcggggccacctggtgtaccaggctcagtggtgcagcaagagggcttgaaaggggaacagggagctccaggacccagaggtcaccaaggcgcccccggtcctccaggagctcggggtccaataggcccagaaggcagggatggacctcctggtttgcaaggtctccgagggaagaaaggtgacatgggaccacctggaatccctggattgctggggctgcagggccctccaggaccccctggtgtcccaggcccccctggaccgggaggttctccgggtttgcctggagagatcggcttcccgggaaagcctggacctcctgggcccacgggaccccctggaaaggacgggccaaatggaccaccaggtccgccaggaaccaagggagaaccaggagaaagaggggaagatggtctgcctggaaaaccaggccttcggggagaaattggggagcagggcctggcaggccgacctggagagaagggagaagcaggcctcccaggggctccaggcttcccaggtgtgagaggagagaaaggagaccagggagaaaaaggtgaactgggacttccaggactgaaaggtgaccgaggtgaaaagggtgaagctggtcctgcaggccctcccgggttacctggaactacatccctgttcacaccacatccacggatgcccggagaacaagggcccaaaggagagaagggcgatccaggcctgcctggggaaccgggactgcagggccgtcctggagaattggggcctcagggacccactggaccaccgggtgccaagggacaggaaggtgcacatggggctcctggagcagctggaaaccccggtgctcccggacatgtcggtgcccccggtcccagtggccctccaggaagtgtgggtgctcccggcctcagaggcaccccagggaaagatggggagcgtggtgagaagggtgcagcgggggaagaaggcagcccagggccagttggtcccaggggagatcctggtgctcctgggctccctgggccacccggaaaagggaaggatggagagccgggactccgtggatcacctggactccctggacccctaggaaccaagggggatcgaggagctcctgggatccctggttctcctggcagccgtggtgacccaggcattggggttgctggccctcctggcccttccggaccaccaggagacaaaggatccccgggatcacgaggcttacctggattccctggcccccagggcccagccggccgggacggtgcaccaggaaatccaggagaaagagggcctcctggcaagccgggcctctcttcactactgtctccaggggacataaatctcttggctaaggatgtgtgcaatgactgccctcctggccccccaggcctccctggtctaccaggttttaaaggggacaaaggtgtcccaggaaagccagggagagaaggcacagaagggaaaaagggagaggctgggcctccaggcctaccagggcccccaggaatagctggaccacagggaagtcaaggagaacgtggtgcagatggtgaggttgggcagaaaggtgatcagggtcatcctggagttccaggtttcatggggcccccagggaaccctgggccaccaggggcagatggaattgcaggagctgctggaccaccaggaatccaagggtcacctgggaaagaaggccctcctggcccccaaggcccatctggattacccggaatcccaggagaagaaggcaaagagggcagagatggaaagccgggtccccctggagagccgggcaaagcaggagagccaggtctaccaggaccagagggtgcccgaggcccacctggcttcaagggacacacaggcgattctggtgcacccggtccccggggagagtctggtgccatggggcttcctggtcaggaagggttaccaggaaaagatggtgacactggacccactgggccacagggtccccaaggaccaaggggcccaccgggcaagaatggatcaccgggatctccaggagagcctggcccttcaggaacccctggccagaaaggaagcaaaggggaaaatggcagcccaggacttcctggcttcctgggtccccgtgggcctccgggagaaccaggagagaaaggagtcccaggcaaggagggggtccctgggaagcctggagagcctggattcaaaggagaaaggggagatcctgggatcaaaggtgacaaaggacctcctggtggaaaaggccagcctggggaccctggaatcccaggccacaaaggccacacaggcctgatgggtccccaaggactacctggggagaatggaccagttggacccccagggcctccaggccagccgggatttccaggactgaggggggagtctccatccatggaaaccctgcgtcggcttattcaagaagagctggggaagcagcttgaaaccagactcgcctacctcctggcccagatgcccccggcgtacatgaagtcatctcaaggcagacctgggcccccagggccccctggaaaagatgggcttccaggccgggccggccccatgggggagccaggtcgtcctgggcaggggggtctggaaggaccctctggacccataggtcccaaaggtgagcgaggagccaaaggtgacccaggtgcacctggagttggcctccgaggcgagatgggaccccctggaatcccaggtcaacccggggaacctggctatgctaaagatggacttcctgggatccctggccctcaaggggagacaggaccagctggacatcctggcctcccaggacctcccggtcccccaggccaatgtgacccttcccagtgtgcctacttcgccagccttgctgcccggccgggtaatgtgaagggtccctaaaggactctggaaagccagaagactgcagtggatttctgaaacttgaactcagagcccagtgggaagccagaggtcttgaaagacttcagccatgtgttccttttttttttctttcttttatcgtttgctttttgttttattttcttgagagacctcaaaattattaaatccaacagacgctgccggtcggtcagattattattaatattattgttgttgttaattattattattatttcatatgctgatgctttgtgagttcttttccactcctttaaagttgggaaaacttgattcgtggggcaggagattgtttcttcattcttctgacagcccccatctgacgcgtaactgcc

SEQ ID NO: 4627 - DNA, 3061 bp, Homo sapiens
  source 1..3061: mol_type = unassigned DNA
agaggtgcgcgctgcgcgtgggatcagcccggcgccgacgggtggctccgaggagctcgctccttcctcgcccccgccccctcgccgcgcggggccagcccggccgctcctcccctgggtgggtccctgctccttttctggcagggtctatttgcatagaggaaactgcccaaagtggccgctgtggaggagctggctgcggcgaagggggcgtgcgcggcgatccgctgctacccggaggctaacccccgcgcccggcggacctcgtgcctcgggctgtcccgcctgctcctctcgcacccagcctctgccccagcagcaccgccccctcggagagtccacgcgcgacgaacgcgccatgggcccaggcgagcgcgccggtggcggcggcgacgcggggaagggcaatgcggcgggcggcggcggcggagggcgctcggcgacgacggccgggtcccgggcggtgagcgcgctgtgcctgctgctctccgtgggctcggcggctgcctgcctgctgctgggtgtccaggcggccgcgctgcagggccgggtggcggcgctcgaggaggagcgggagctgctgcggcgcgcggggccgccaggcgccctggacgcctgggccgagccgcacctggagcgcctgctgcgggagaagttggacggactagcgaagatccggactgctcgggaagctccatccgaatgtgtctgccccccagggccccctggacggcgcggcaagcctgggagaagaggcgaccctggtcctccagggcaatcaggacgagatggctacccgggacccctgggtttggatggcaagcccggacttccaggcccgaaaggggaaaagggtgcaccaggagactttggcccccggggagaccaaggacaagatggagctgctgggcctccggggccccctggacctcctggggcccggggccctcctggcgacactgggaaagatggccccaggggagcacaaggcccagcgggccccaaaggagagcccggacaagacggcgagatgggcccaaagggacccccagggcccaagggtgagcctggagtacctggaaagaagggcgacgatgggacaccaagccagcctggaccaccagggcccaagggcgagccagggagcatggggcctcggggagagaacggtgtggacggtgccccaggaccgaagggggagcctggccaccgaggcacggatggagctgcagggccccggggtgccccaggcctcaagggcgagcagggagacacagtggtgatcgactatgatggcaggatcttggatgccctcaaggggcctcccggaccacaggggcccccagggccaccagggatccctggagccaagggcgagcttggattgcccggtgccccaggaatcgatggagagaagggccccaaaggacagaaaggagacccaggagagcctgggccagcaggactcaaaggggaagcaggcgagatgggcttgtccggcctcccgggcgctgacggcctcaagggggagaagggggagtcggcgtctgacagcctacaggagagcctggctcagctcatagtggagccagggccccctggcccccctggccccccaggcccgatgggcctccagggaatccagggtcccaagggcttggatggagcaaagggagagaagggtgcgtcgggtgagagaggccccagcggcctgcctgggccagttggcccaccgggccttattgggctgccaggaaccaaaggagagaagggcagacccggggagccaggactagatggtttccctggaccccgaggagagaaaggtgatcggagcgagcgtggagagaagggagaacgaggggtccccggccggaaaggagtgaagggccagaagggcgagccgggaccaccaggcctggaccagccgtgtcccgtgggccccgacgggctgcctgtgcctggctgctggcataagtgacccacaggcccagctcacacctgtacagatccgtgtggacatttttaatttttgtaaaaacaaaacagtaatatattgatcttttttcatggaatgcgctacctgtggccttttaacattcaagagtatgcccacccagccccaaagccaccggcatgtgaagctgccggaaagtggacaggccagaccagggagatgtgtacctgaggggcacccttgggcctgggctttcccaggaaggagatgaaggtagaagcacctggctcgggcaaggctagaaagatgctacgttgggccttcagtcacctgatcagcagagagactctcagctgtggtactgccctgtaagaacctgcccccgcaaaactctggagtccctgggacacaccctatccaagaagacccaggggtggaacagcggctgctgttgctcctggcctcatcagcctccaaactcaaccacaaccagctgcctctgcagttggacaagacttggcccccggacaagactcgcccagcacttgcggctgggcccggggagcagtgagtggaaatcccccacgagggtctagctctaccacattcaggaggcctcaggaggccagcctgccatgagagcacatgtcctctggccaggagtagtggctgagctctgtgatcgctgtgatgtggacccagctccagggagcagagtgtcgaggatggaggggcccagcctggactgactgctacttcctgtctctgtttccattatcacccagagagggacaagataggacatggcctggaccagggaggcaggcctcccactcagagtctgggtctcactggccccaagtctcccacccagaactctggccaaaaatggctctctaggtgggctgtgcaggcaaagcaaagctcagggctggttcccagctggcctgagcagggggcctgccaccagacccacccacgctctgacgagaggcttttccacctccagcaagtgttcccagcaaccagctccatcctggctgcttgccttccatttccgtgtagatggagatcactgtgtgtaataaaccacaagtgcgtgtc

SEQ ID NO: 4628 - DNA, 568 bp, Homo sapiens
  source 1..568: mol_type = unassigned DNA
agcggcagcaacctgcgtgggtccctcaccttgtgggagctttgttcttttgctcttcacaataaatctccttgctgctcactctttgtgtcagtgtcatctttaagagctgtaacactcaccaggaaggatctgcttcgctctctgcgcctcttgttgcccgtctgtaaaatgaggctgaaatggcaggtggagtggaactgtgaagcgcctttccggtggctggaggtgccctggtgaagtctcccggtcctgggctgttccagtcagaggcagacagggcctggctgagaagttggacggactagcgaagatccggactgctcgggaagctccatccgaatgtgtctgccccccagagtgtgcaggtttacatatgctgttcggttggtgatggaaacacttacggccactgataaagcaataaatgaaaggaaatgacaggaaagcaccatcctcgagcttccatggacacagagatgaagatttccatctgtggctagacaggcgcagagctttggaggtgctcctggcccgtcggttcccagtgacgtgtcttcaactccag

SEQ ID NO: 4629 - DNA, 2329 bp, Homo sapiens
  source 1..2329: mol_type = unassigned DNA
tgttttcctgtctagggccccctggacggcgcggcaagcctgggagaagaggcgaccctggttttccagggacccctgggtttggatggcaagcccggacttccaggcccgaaaggggaaaagggtgcaccaggagactttggcccccggggagaccaaggacaagatggagctgctgggcctccggggccccctggacctcctggggcccggggccctcctggcgacactgggaaagatggccccaggggagcacaaggcccagcgggccccaaaggagagcccggacaagacggcgagatgggcccaaagggacccccagggcccaagggtgagcctggagtacctggaaagaagggcgacgatgggacaccaagccagcctggaccaccagggcccaagggcgagccagggagcatggggcctcggggagagaacggtgtggacggtgccccaggaccgaagggggagcctggccaccgaggcacggatggagctgcagggccccggggtgccccaggcctcaagggcgagcagggagacacagtggtgatcgactatgatggcaggatcttggatgccctcaaggggcctcccggaccacaggggcccccagggccaccagggatccctggagccaagggcgagcttggattgcccggtgccccaggaatcgatggagagaagggccccaaaggacagaaaggagacccaggagagcctgggccagcaggactcaaaggggaagcaggcgagatgggcttgtccggcctcccgggcgctgacggcctcaagggggagaagggggagtcggcgtctgacagcctacaggagagcctggctcagctcatagtggagccagggccccctggcccccctggccccccaggcccgatgggcctccagggaatccagggtcccaagggcttggatggagcaaagggagagaagggtgcgtcgggtgagagaggccccagcggcctgcctgggccagttggcccaccgggccttattgggctgccaggaaccaaaggagagaagggcagacccggggagccaggactagatggtttccctggaccccgaggagagaaaggtgatcggagcgagcgtggagagaagggagaacgaggggtccccggccggaaaggagtgaagggccagaagggcgagccgggaccaccaggcctggaccagccgtgtcccgtgggccccgacgggctgcctgtgcctggctgctggcataagtgacccacaggcccagctcacacctgtacagatccgtgtggacatttttaatttttgtaaaaacaaaacagtaatatattgatcttttttcatggaatgcgctacctgtggccttttaacattcaagagtatgcccacccagccccaaagccaccggcatgtgaagctgccggaaagtggacaggccagaccagggagatgtgtacctgaggggcacccttgggcctgggctttcccaggaaggagatgaaggtagaagcacctggctcgggcaaggctagaaagatgctacgttgggccttcagtcacctgatcagcagagagactctcagctgtggtactgccctgtaagaacctgcccccgcaaaactctggagtccctgggacacaccctatccaagaagacccaggggtggaacagcggctgctgttgctcctggcctcatcagcctccaaactcaaccacaaccagctgcctctgcagttggacaagacttggcccccggacaagactcgcccagcacttgcggctgggcccggggagcagtgagtggaaatcccccacgagggtctagctctaccacattcaggaggcctcaggaggccagcctgccatgagagcacatgtcctctggccaggagtagtggctgagctctgtgatcgctgtgatgtggacccagctccagggagcagagtgtcgaggatggaggggcccagcctggactgactgctacttcctgtctctgtttccattatcacccagagagggacaagataggacatggcctggaccagggaggcaggcctcccactcagagtctgggtctcactggccccaagtctcccacccagaactctggccaaaaatggctctctaggtgggctgtgcaggcaaagcaaagctcagggctggttcccagctggcctgagcagggggcctgccaccagacccacccacgctctgacgagaggcttttccacctccagcaagtgttcccagcaaccagctccatcctggctgcttgccttccatttccgtgtagatggagatcactgtgtgtaataaaccacaagtgcgtg

SEQ ID NO: 4630 - DNA, 4630 bp, Homo sapiens
  source 1..4630: mol_type = unassigned DNA
gagcggccactgttggggccctcgaaagaggtgtcggtcctctgggagtcggaagagctgtctgggattatttgaggtgtagagggtgggaagcgaagccgagacggccgaccccgccacgatgctgctgaagaagcacgcagggaaaggagggggccgggagcccagatccgaggacccgacccctgccgaacagcattgtgcccggaccatgcccccgtgtgccgtcctggcggccctcctgtcagtggtggccgtggtgtcttgcctgtacctgggtgtgaaaaccaacgacctccaggcgaggatcgccgctctcgaatccgccaaaggggccccttccattcatctgctgcctgataccctggatcacctcaagactatggtgcaagagaaagtggagcgacttctggctcagaaatcctatgaacatatggctaaaataagaatcgcaagagaagcaccttcagaatgtaactgcccagcaggccctccagggaaacgaggtaagagaggccgaagaggagaatctggtcctcctggacagcctggtcctcagggccctcctggtccaaaaggcgataagggagaacaaggtgatcagggacctaggggtcctctagggcctccgggacaaaagggttctattggagcacctggaattccagggatgaatgggcaaaagggtgagcccgggttgcctggagcagtaggacagaatggaataccaggacctaagggagaacctggagaacaaggtgaaaagggagacgctggagagaacggccccaagggtgacacaggcgaaaagggtgaccctggatcatctgctgcaggaattaagggagaacctggggaatctggtcgtccagggcaaaagggtgaaccagggcttcctgggcttcctggacttccggggataaagggagaaccaggtttcattggtcctcaaggagaaccaggcttaccaggtttaccaggaacaaaaggtgaacggggggaagcagggcctcctggaagaggtgagcgaggggaacctggagcccccggaccaaaggggaaacaaggtgaatcaggaactagaggcccaaaggggtcaaagggggatcgtggagaaaaaggggactctggagctcagggaccaaggggtccacctggtcaaaaaggggatcaaggagccactgagatcatagactacaacggcaacctccacgaagccttacagaggattaccaccttaactgtcacgggtccccctggacctcctggacctcaaggactacaagggccaaagggagagcagggatctccaggaatcccaggaatggatggagagcagggactcaaaggctcaaagggagacatgggggacccagggagccaatggaatgaaaggagaaaaaggagattctggaatgccgggtccacagggtccttctatcataggcccaccaggcccaccaggtccccatggcccacctggccccatgggacctcatggacttcctggaccaaagggagcatctggcttagacggaaagccaggatcccggggtacagatggtcctatgggaccccatggccctgcaggtcccaaaggagaaagaggtgaaaaaggagctatgggagagcctggaccaagagggccctatgggctgcctgggaaagatggagagcctggtcttgatggcttccctggtccacggggtgagaagggtgatctaggagaaaagggagaaaagggggaaaagggaaagaaaggcaaaaaggggcctaaaggggagaaaggagaacagggtgctcctggattagatgcaccctgcccgttggggccagatggcttacccatgcctggctgttggcaaaagtgatgaatctaacctttcaagcatgaagttgtgtatataagggtccatttttaatatttatagttgaaaactgaattgcagattttacaagtctgagatatgtttacatagggctgcttcttcctgctggcagtagtatacatgtccatttttactccacttacatctgaaattgggcaatttgtgaaaccagtgagaatcctgcaaaaaatatagatcagtatctccttatcttatgtgaagatacgtatttatatggacaaatcagtggtagagaatgattgattgtactagctattttccttcttttggcttgctaattgcatggacaaaaagtgccatgaaatagtttacatgaaatggtgaccaaatatggactcaaagctatgaaaatgtactatactgactgattttagagctgattatcacattcccattcacctttcatgtcggcgttgactcatacctacaccacccattgaaactaactaaaaaagcatgactgtgtgccaaacctgcttgctgtgcaacttcagatgctagcatgttgatcaggagtcctttgattacatctgaacctttattccttttgtcatctcaagggggttacaccatggcttattgccaaaaagagataaggtggcggagagcacacacacaatttgtcttgtattttgagggagttgcagtcctgactgcagatctacagcttccagtattgtgggctcatgtggccactttggttgaaatacgaaggggttgagcctgttgctgccaccagttttccttgggctgcccttggcagtgaagacatgggaagaggaccgattcagcctccagcactgcctctcatgtgaccaagtaggaaagaggtttacaaatgcaaacatgcagaaccacagactttaaaaatatgtataaataaactgaatttcagcaagtgttaatataggtgcttttaaaaatgacagaggcacagcacttcttttggaataggagattcttggaatgggagatcctgtccctgagggaaaagggatgtccatcccaccaaaacttgggttgctgaagaaataacatgttctgagaagggatcagccaaaatcgcctctcccgatgatataggagagcttactgggacaatctgtgccaaagttgttgtgagagctttccttcctcctacgatccaaccatgtcaaacatttcctacaaagtttgagaaacagaccaaatctaagatctcagaaagctgtgaaatatagttgccataaagaaaatatttttcatctacttgctcaaactttacctaaccatattagatggaacatttctttgcacagtaaagagttggtagcgtgttttgaaatggcttattctaagtggaagtgttacattgaaagaaacattatcaatgaggagtaggcaccctttcagcccattagagaatttaatttctctcctgactcaatgccatcttctgggaagatttctagtttcatgcataggtgtcaccaccagaagggaaattaactcatccttggcttatagttaagatataaccataagacaaggaacctaaaatcctcatgatctcatttatgttatgtaaccaaatgacagtcatacaaaatggcatcttcttttttttctattaaatttttaaggttgaaagatgtttaaactattagatcagtctaattggtaacatttctggtaacattccacacccctaagccagtttagcattttgaaaataatggaggacattttctaacaatttcttgtatggcatggtgttaggataacgtattgctcaatgtctgacacaatttgtcttaaatggtttggaaaaatgaactgaagtgggtggaactacattctcttcaggaaaacaaactacagtgtccagtggctatatttttttcccttctatctttttttctgctcctctagtagaaagaggtggattgaaatggatcactatttaaaacttgcacagcttcaggagacgatacctcaacatcaaaagaaaaacactttatgtataaaaaaattttttgaaatacagcccttcaaagaatactattctgtcctgtgtgtatattgagtttttgctctataactgatttgacaacatcaacttatttcatgattaaatgaggttgtaaactttcattacatttatttccttgggaaaaacaaagggatggaaatactcctccttgttcagtggaattgctaggtcttaaccatgatggataatctttaacttttggttactacaatgttttcaagcatccattttgtcatatagagaattcttaaataatttctaagtgaatgaaagaattgtgtttgttgatatgtgttgatagataatatactttccttaaagatttctttaatgtgtgttattggatagagggttgagaaaatatacatgaaagacacattggaaataaggcaaggtcagtttctatttctaataaaacattgaaggatagcaaattgatatgtgttttagatttaaaattgtttttcatttatgttggttggtgctaatgtatctcttttcctttttctctatggacaatacaactactatggataattttatttccctgtttaatagcattcctaaatcattagtgtgttattttatttttaaagttcatgaatttgctataattatggtccaatgaccaggctttcttaatgtaaaacaaaacagtgtaccaatagatgatgtgtgtttactcgga

SEQ ID NO: 4631 - DNA, 316 bp, Homo sapiens
  source 1..316: mol_type = unassigned DNA
tggtccacggggtgagaagggtgatctaggagaaaagggagaaaaggggccagatggcttacccatgcctggctgttggcaaaagtgatgaatctaacctttcaagcatgaagttgtgtatataagggtccatttttaatatttatagttgaaaactgaattgcagattttacaagtctgagatatgtttacatagggctgcttcttcctgctggcagtagtatacatgtccatttttactccacttacatctgaaattgggcaatttgtgaaaccagtgagaatcctgcaaaaaatatagatcagtatctcctta

SEQ ID NO: 4632 - DNA, 2724 bp, Homo sapiens
  source 1..2724: mol_type = unassigned DNA
ccgcgacttcggcttcgcgagtagcattggttccttgggtttatttcgttttcctctctcttctccaccttagtcgcccctttcgcgctgcgctgtagcgtgctctcacagcctttttgccttgaactgaatgcaggtgggaaacaggtcggcgtgccgaaagacaccgagtaggtagaaataaggcaaactcacagaggcgcaacaggtccggtcctccgtggccagggcgagccgcggccccgcgtggcgcctcggccgttgccctcggaccctgagcggccactgttggggccctcgaaagaggtgtcggtcctctgggagtcggaagagctgtctgggtgggtttcgtcttgctttttaccccaccgccacccagtccccggacggagggtgcttttcacttccagctgggaggagagaagaaagcggggatggtgcacgcctgcgggtctggacgctgagcaaggcaggggattatttgaggtgtagagggtgggaagcgaagccgagacggccgaccccgccacgatgctgctgaagaagcacgcagggaaaggagggggccgggagcccagatccgaggacccgacccctgccgaacagcattgtgcccggaccatgcccccgtgtgccgtcctggcggccctcctgtcagtggtggccgtggtgtcttgcctgtacctgggtgtgaaaaccaacgacctccaggcgaggatcgccgctctcgaatccgccaaaggggccccttccattcatctgctgcctgataccctggatcacctcaagactatggtgcaagagaaagtggagcgacttctggctcagaaatcctatgaacatatggctaaaataagaatcgcaagagaagcaccttcagaatgtaactgcccagcaggccctccagggaaacgaggtaagagaggccgaagaggagaatctggtcctcctggacagcctggtcctcagggccctcctggtccaaaaggcgataagggagaacaaggtgatcagggacctaggatggtgtttcctaaaatcaatcatgggtttctctctgctgatcagcagctcattaaacgccgcctgattaagggtgaccaaggacaggcagggcctccaggaccccctggccctccaggcccaagagggccacctggggacacagggaaagatggcccccgtggaatgccaggagtacccggtgaaccaggaaagccaggagaacaaggcttgatgggtcctctagggcctccgggacaaaagggttctattggagcacctggaattccagggatgaatgggcaaaagggtgagcccgggttgcctggagcagtaggacagaatggaataccaggacctaagggagaacctggagaacaaggtgaaaagggagacgctggagagaacggccccaagggtgacacaggcgaaaagggtgaccctggatcatctgctgcaggaattaagggagaacctggggaatctggtcgtccagggcaaaagggtgaaccagggcttcctgggcttcctggacttccggggataaagggagaaccaggtttcattggtcctcaaggagaaccaggcttaccaggtttaccaggaacaaaaggtgaacggggggaagcagggcctcctggaagaggtgagcgaggggaacctggagcccccggaccaaaggggaaacaaggtgaatcaggaactagaggcccaaaggggtcaaagggggatcgtggagaaaaaggggactctggagctcagggaccaaggggtccacctggtcaaaaaggggatcaaggagccactgagatcatagactacaacggcaacctccacgaagccttacagaggattaccaccttaactgtcacgggtccccctggacctcctggacctcaaggactacaagggccaaagggagagcagggatctccaggaatcccaggaatggatggagagcagggactcaaaggctcaaagggagacatgggggacccaggtatgacaggtgaaaaaggaggaattggacttcctggattaccgggagccaatggaatgaaaggagaaaaaggagattctggaatgccgggtccacagggtccttctatcataggcccaccaggcccaccaggtccccatggcccacctggccccatgggacctcatggacttcctggaccaaagggtacagatggtcctatgggaccccatggccctgcaggtcccaaaggagaaagaggtgaaaaaggagctatgggagagcctggaccaagagggccctatgggctgcctgggaaagatggagagcctggtcttgatggcttccctggtccacggggtgagaagggtgatctaggagaaaagggagaaaagggattccgtggcgttaagggggaaaaaggggagccaggccagcctggcctggatgggctggatgccccttgccaattggggccagatggcttacccatgcctggctgttggcaaaagtgatgaatctaacctttcaagcatgaagttgtgtatataagggtccatttttaatatttatagttgaaaactgaattgcagattttacaagtctgagatatgtttacatagggctgcttcttcctgctggcagtagtatacatgtccatttttactccacttacatctgaaattgggcaatttgtgaaaccagtgagaatcctgcaaaaaatatagatcagtatctcctta

SEQ ID NO: 4633 - DNA, 2500 bp, Homo sapiens
  source 1..2500: mol_type = unassigned DNA
gagcggccactgttggggccctcgaaagaggtgtcggtcctctgggagtcggaagagctgtctgggtgggtttcgtcttgctttttaccccaccgccacccagtccccggacggagggtgcttttcacttccagctgggaggagagaagaaagcggggatggtgcacgcctgcgggtctggacgctgagcaaggcaggggtccgtatccgctcgtgggcttgactccaccaactagttgtgcagccacagggactgaactttggaggaatcgacctttttctttccttttaggattatttgaggtgtagagggtgggaagcgaagccgagacggccgaccccgccacgatgctgctgaagaagcacgcagggaaaggagggggccgggagcccagatccgaggacccgacccctgccgaacagcattgtgcccggaccatgcccccgtgtgccgtcctggcggccctcctgtcagtggtggccgtggtgtcttgcctgtacctgggtgtgaaaaccaacgacctccaggcgaggatcgccgctctcgaatccgccaaaggggccccttccattcatctgctgcctgataccctggatcacctcaagactatggtgcaagagaaagtggagcgacttctggctcagaaatcctatgaacatatggctaaaataagaatcgcaagagaagcaccttcagaatgtaactgcccagcaggccctccagggaaacgaggtaagagaggccgaagaggagaatctggtcctcctggacagcctggtcctcagggccctcctggtccaaaaggcgataagggagaacaaggtgatcagggacctaggggcctgccaggcttccccacagttgctgccctgcacagtaatcagatcctcaccgtcaagggtgaccaaggacaggcagggcctccaggaccccctggccctccaggcccaagagggccacctggggacacagggaaagatggcccccgtggaatgccaggagtacccggtgaaccaggaaagccaggagaacaaggcttgatgggtcctctagggcctccgggacaaaagggttctattggagcacctggaattccagggatgaatgggcaaaagggtgagcccgggttgcctggagcagtaggacagaatggaataccaggacctaagggagaacctggagaacaaggtgaaaagggagacgctggagagaacggccccaagggtgacacaggcgaaaagggtgaccctggatcatctgctgcaggaattaagggagaacctggggaatctggtcgtccagggcaaaagggtgaaccagggcttcctgggcttcctggacttccggggataaagggagaaccaggtttcattggtcctcaaggagaaccaggcttaccaggtttaccaggaacaaaaggtgaacggggggaagcagggcctcctggaagaggtgagcgaggggaacctggagcccccggaccaaagggggatcgtggagaaaaaggggactctggagctcagggaccaaggggtccacctggtcaaaaaggggatcaaggagccactgagatcatagactacaacggcaacctccacgaagccttacagggtccccctggacctcctggacctcaaggactacaagggccaaagggagagcagggatctccaggaatcccaggaatggatggagagcagggactcaaaggctcaaagggagacatgggggacccaggtatgacaggtgaaaaaggaggaattggacttcctggattaccgggagccaatggaatgaaaggagaaaaaggagattctggaatgccgggtccacagggtccttctatcataggcccaccaggcccaccaggtccccatggcccacctggccccatgggacctcatggacttcctggaccaaagggtgaaccagggttaaatggtgttaaaggattgaagggtgaaccaggtcaaaagggtgacagaggaccccttggtcttccaggagcatctggcttagacggaaagccaggatcccggggtacagatggtcctatgggaccccatggccctgcaggtcccaaaggagaaagaggtgaaaaaggagctatgggagagcctggaccaagagggccctatgggctgcctggcttccctggtccacggggtgagaagggtgatctaggagaaaagggagaaaaggtgacctctccatcccagcatgtaccttgtttgattcttctcctgctgtctgctttgctgttcagcttgtgtgattccatttgacacttaatctttctccatcctgtgctccaaaaacatactgatgcctgatttaaggaatcaggtcttcagagaggaatgaagaaggctgtactgccagatataagggcactgcctggcatagaagaaaaaattattatcaccagatattctagctacagtttttcaaccacctgacaccaatttatggaaaaataaaggatttttgaaaaaaaaa

SEQ ID NO: 4634 - DNA, 2674 bp, Homo sapiens
  source 1..2674: mol_type = unassigned DNA
ccgcgacttcggcttcgcgagtagcattggttccttgggtttatttcgttttcctctctcttctccaccttagtcgcccctttcgcgctgcgctgtagcgtgctctcacagcctttttgccttgaactgaatgcaggtgggaaacaggtcggcgtgccgaaagacaccgagtaggtagaaataaggcaaactcacagaggcgcaacaggtccggtcctccgtggccagggcgagccgcggccccgcgtggcgcctcggccgttgccctcggaccctgagcggccactgttggggccctcgaaagaggtgtcggtcctctgggagtcggaagagctgtctgggtgggtttcgtcttgctttttaccccaccgccacccagtccccggacggagggtgcttttcacttccagctgggaggagagaagaaagcggggatggtgcacgcctgcgggtctggacgctgagcaaggcaggggattatttgaggtgtagagggtgggaagcgaagccgagacggccgaccccgccacgatgctgctgaagaagcacgcagggaaaggagggggccgggagcccagatccgaggacccgacccctgccgaacagcattgtgcccggaccatgcccccgtgtgccgtcctggcggccctcctgtcagtggtggccgtggtgtcttgcctgtacctgggtgtgaaaaccaacgacctccaggcgaggatcgccgctctcgaatccgccaaaggggccccttccattcatctgctgcctgataccctggatcacctcaagactatggtgcaagagaaagtggagcgacttctggctcagaaatcctatgaacatatggctaaaataagaatcgcaagagaagcaccttcagaatgtaactgcccagcaggccctccagggaaacgaggtaagagaggccgaagaggagaatctggtcctcctggacagcctggtcctcagggccctcctggtccaaaaggcgataagggagaacaaggtgatcagggacctaggatggtgtttcctaaaatcaatcatgggtttctctctgctgatcagcagctcattaaacgccgcctgattaagggtgaccaaggacaggcagggcctccaggaccccctggccctccaggcccaagagggccacctggggacacagggaaagatggcccccgtggaatgccaggagtacccggtgaaccaggaaagccaggagaacaaggcttgatgggtcctctagggcctccgggacaaaagggttctattggagcacctggaattccagggatgaatgggcaaaagggtgagcccgggttgcctggagcagtaggacagaatggaataccaggacctaagggagaacctggagaacaaggtgaaaagggagacgctggagagaacggccccaagggtgacacaggcgaaaagggtgaccctggatcatctgctgcaggaattaagggagaacctggggaatctggtcgtccagggcaaaagggtgaaccagggcttcctgggcttcctggacttccggggataaagggagaaccaggtttcattggtcctcaaggagaaccaggcttaccaggtttaccaggaacaaaaggtgaacggggggaagcagggcctcctggaagaggtgagcgaggggaacctggagcccccggaccaaaggggaaacaaggtgaatcaggaactagaggcccaaaggggtcaaagggggatcgtggagaaaaaggggactctggagctcagggaccaaggggtccacctggtcaaaaaggggatcaaggagccactgagatcatagactacaacggcaacctccacgaagccttacagaggattaccaccttaactgtcacgggtccccctggacctcctggacctcaaggactacaagggccaaagggagagcagggatctccaggaatcccaggaatggatggagagcagggactcaaaggctcaaagggagacatgggggacccaggtatgacaggtgaaaaaggaggaattggacttcctggattaccgggagccaatggaatgaaaggagaaaaaggagattctggaatgccgggtccacagggtccttctatcataggcccaccaggcccaccaggtccccatggcccacctggccccatgggacctcatggacttcctggaccaaagggtacagatggtcctatgggaccccatggccctgcaggtcccaaaggagaaagaggtgaaaaaggagctatgggagagcctggaccaagagggccctatgggctgcctgggaaagatggagagcctggtcttgatggcttccctggtccacggggtgagaagggtgatctaggagaaaagggagaaaaggtgacctctccatcccagcatgtaccttgtttgattcttctcctgctgtctgctttgctgttcagcttgtgtgattccatttgacacttaatctttctccatcctgtgctccaaaaacatactgatgcctgatttaaggaatcaggtcttcagagaggaatgaagaaggctgtactgccagatataagggcactgcctggcatagaagaaaaaattattatcaccagatattctagctacagtttttcaaccacctgacaccaatttatggaaaaataaaggatttttgaaaaaaaaa

SEQ ID NO: 4635 - DNA, 448 bp, Homo sapiens
  source 1..448: mol_type = unassigned DNA
ggaaaaagatataattaaatatgatatgcagcttttcgtgtgtgcctttcattgaaacatgcagttatatacttcatcctttttgcatgagtttcttgaaaaccgctggcctgaaataatcaagcataaagcactttgaaaggagatgagttgtcttactgatattcttaggcaccattcacctaggaaaaatccaggataaattataactgctattcttgcagcccttgtgatatatctcatattatcttttttttagggtacagatggtcctatgggaccccatggccctgcaggtcccaaaggagaaagaggtgaaaaaggagctatgggagagcctggaccaagagggccctatgggctgcctgggaaagatggagagcctggtcttgatggcttccctggtccacggggtgagaagggtgatctaggagaaaagggagaaaag

SEQ ID NO: 4636 - DNA, 428 bp, Homo sapiens
  source 1..428: mol_type = unassigned DNA
gatccttcgggcagccgcgacttcggcttcgcgagtagcattggttccttgggtttatttcgttttcctctctcttctccaccttagtcgcccctttcgcgctgcgctgtagcgtgctctcacagcctttttgccttgaactgaatgcaggtgggaaacaggattatttgaggtgtagagggtgggaagcgaagccgagacggccgaccccgccacgatgctgctgaagaagcacgcagggaaaggagggggccgggagcccagatccgaggacccgacccctgccgaacagcattgtgcccggaccatgcccccgtgtgccgtcctggcggccctcctgtcagtggtggccgtggtgtcttgcctgtacctgggtgtgaaaaccaacgacctccaggcgaggatcgccgctctcgaatccgccaaag

SEQ ID NO: 4637 - DNA, 4799 bp, Homo sapiens
  source 1..4799: mol_type = unassigned DNA
caggccctccagggaaacgaggtaagagaggccgaagaggagaatctggtaagtctggacagcctggtcctcagggccctcctggtccaaaaggcgataagggagaacaaggtgatcagggacctaggatggtgtttcctaaaatcaatcatgggtttctctctgctgatcagcagctcattaaacgccgcctgattaagggtgaccaaggacaggcagggcctccaggaccccctggccctccaggcccaagagggccacctggggacacagggaaagatggcccccgtggaatgccaggagtacccggtgaaccaggaaagccaggagaacaaggcttgatgggtcctctagggcctccgggacaaaagggttctattggagcacctggaattccagggatgaatgggcaaaagggtgagcccgggttgcctggagcagtaggacagaatggaataccaggacctaagggagaacctggagaacaaggtgaaaagggagacgctggagagaacggccccaagggtgacacaggcgaaaagggtgaccctggatcatctgctgcaggaattaagggagaacctggggaatctggtcgtccagggcaaaagggtgaaccagggcttcctgggcttcctggacttccggggataaagggagaaccaggtttcattggtcctcaaggagaaccaggcttaccaggtttaccaggaacaaaaggtgaacggggggaagcagggcctcctggaagaggtgagcgaggggaacctggagcccccggaccaaaggggaaacaaggtgaatcaggaactagaggcccaaaggggtcaaagggggatcgtggagaaaaaggggactctggagctcagggaccaaggggtccacctggtcaaaaaggggatcaaggagccactgagatcatagactacaacggcaacctccacgaagccttacagaggattaccaccttaactgtcacgggtccccctggacctcctggacctcaaggactacaagggccaaagggagagcagggatctccaggaatcccaggaatggatggagagcagggactcaaaggctcaaagggagacatgggggacccagggagccaatggaatgaaaggagaaaaaggagattctggaatgccgggtccacagggtccttctatcataggcccaccaggcccaccaggtccccatggcccacctggccccatgggacctcatggacttcctggaccaaagggagcatctggcttagacggaaagccaggatcccggggtacagatggtcctatgggaccccatggccctgcaggtcccaaaggagaaagaggtgaaaaaggagctatgggagagcctggaccaagagggccctatgggctgcctgggaaagatggagagcctggtcttgatggcttccctggtccacggggtgagaagggtgatctaggagaaaagggagaaaagggattccgtggcgttaagggggaaaaaggggagccaggccagcctggcctggatgggctggatgccccttgccaattggggccagatggcttacccatgcctggctgttggcaaaagtgatgaatctaacctttcaagcatgaagttgtgtatataagggtccatttttaatatttatagttgaaaactgaattgcagattttacaagtctgagatatgtttacatagggctgcttcttcctgctggcagtagtatacatgtccatttttactccacttacatctgaaattgggcaatttgtgaaaccagtgagaatcctgcaaaaaatatagatcagtatctccttatcttatgtgaagatacgtatttatatggacaaatcagtggtagagaatgattgattgtactagctattttccttcttttggcttgctaattgcatggacaaaaagtgccatgaaatagtttacatgaaatggtgaccaaatatggactcaaagctatgaaaatgtactatactgactgattttagagctgattatcacattcccattcacctttcatgtcggcgttgactcatacctacaccacccattgaaactaactaaaaaagcatgactgtgtgccaaacctgcttgctgtgcaacttcagatgctagcatgttgatcaggagtcctttgattacatctgaacctttattccttttgtcatctcaagggggttacaccatggcttattgccaaaaagagataaggtggcggagagcacacacacaatttgtcttgtattttgagggagttgcagtcctgactgcagatctacagcttccagtattgtgggctcatgtggccactttggttgaaatacgaaggggttgagcctgttgctgccaccagttttccttgggctgcccttggcagtgaagacatgggaagaggaccgattcagcctccagcactgcctctcatgtgaccaagtaggaaagaggtttacaaatgcaaacatgcagaaccacagactttaaaaatatgtataaataaactgaatttcagcaagtgttaatataggtgcttttaaaaatgacagaggcacagcacttcttttggaataggagattcttggaatgggagatcctgtccctgagggaaaagggatgtccatcccaccaaaacttgggttgctgaagaaataacatgttctgagaagggatcagccaaaatcgcctctcccgatgatataggagagcttactgggacaatctgtgccaaagttgttgtgagagctttccttcctcctacgatccaaccatgtcaaacatttcctacaaagtttgagaaacaggtatttttcattctttttaatgcttttttctttttctttctttagtcccaagaatattgaaaaaatattagtttcagtttttgtcacatatgttttgaacaatttttttaagaagtcttcaaatcataataatttggctccagtagtcaaaatgaccttttactaacttctctcttgttttggataattggatagaatataaaagaagctccactttcagtctaatcattgtaaagcatgaaagttatgcatttttaagtagttttgactttttttacatgatgaatgtaacgtacatggagattatcagttaatataaagccaagattttgtcacatttggtaatattaactaatttctatttttatggttttaagttttgtctatatttagatttctttctctttttaacatttctaaatgtttgtctcatcctcatatccacagaccaaatctaagatctcagaaagctgtgaaatatagttgccataaagaaaatatttttcatctacttgctcaaactttacctaaccatattagatggaacatttctttgcacagtaaagagttggtagcgtgttttgaaatggcttattctaagtggaagtgttacattgaaagaaacattatcaatgaggagtaggcaccctttcagcccattagagaatttaatttctctcctgactcaatgccatcttctgggaagatttctagtttcatgcataggtgtcaccaccagaagggaaattaactcatccttggcttatagttaagatataaccataagacaaggaacctaaaatcctcatgatctcatttatgttatgtaaccaaatgacagtcatacaaaatggcatcttcttttttttctattaaatttttaaggttgaaagatgtttaaactattagatcagtctaattggtaacatttctggtaacattccacacccctaagccagtttagcattttgaaaataatggaggacattttctaacaatttcttgtatggcatggtgttaggataacgtattgctcaatgtctgacacaatttgtcttaaatggtttggaaaaatgaactgaagtgggtggaactacattctcttcaggaaaacaaactacagtgtccagtggctatatttttttcccttctatctttttttctgctcctctagtagaaagaggtggattgaaatggatcactatttaaaacttgcacagcttcaggagacgatacctcaacatcaaaagaaaaacactttatgtataaaaaaattttttgaaatacagcccttcaaagaatactattctgtcctgtgtgtatattgagtttttgctctataactgatttgacaacatcaacttatttcatgattaaatgaggttgtaaactttcattacatttatttccttgggaaaaacaaagggatggaaatactcctccttgttcagtggaattgctaggtcttaaccatgatggataatctttaacttttggttactacaatgttttcaagcatccattttgtcatatagagaattcttaaataatttctaagtgaatgaaagaattgtgtttgttgatatgtgttgatagataatatactttccttaaagatttctttaatgtgtgttattggatagagggttgagaaaatatacatgaaagacacattggaaataaggcaaggtcagtttctatttctaataaaacattgaaggatagcaaattgatatgtgttttagatttaaaattgtttttcatttatgttggttggtgctaatgtatctcttttcctttttctctatggacaatacaactactatggataattttatttccctgtttaatagcattcctaaatcattagtgtgttattttatttttaaagttcatgaatttgctataattatggtccaatgaccaggctttcttaatgtaaaacaaaacagtgtaccaatagatgatgtgtgtttactcgga

SEQ ID NO: 4638 - DNA, 4819 bp, Homo sapiens
  source 1..4819: mol_type = unassigned DNA
caggccctccagggaaacgaggtaagagaggccgaagaggagaatctggtaagtctggacagcctggtcctcagggccctcctggtccaaaaggcgataagggagaacaaggtgatcagggacctaggatggtgtttcctaaaatcaatcatgggtttctctctgctgatcagcagctcattaaacgccgcctgattaagggtgaccaaggacaggcagggcctccaggaccccctggccctccaggcccaagagggccacctggggacacagggaaagatggcccccgtggaatgccaggagtacccggtgaaccaggaaagccaggagaacaaggcttgatggcaaaaggtcctctagggcctccgggacaaaagggttctattggagcacctggaattccagggatgaatgggcaaaagggtgagcccgggttgcctggagcagtaggacagaatggaataccaggacctaagggagaacctggagaacaaggtgaaaagggagacgctggagagaacggccccaagggtgacacaggcgaaaagggtgaccctggatcatctgctgcaggaattaagggagaacctggggaatctggtcgtccagggcaaaagggtgaaccagggcttcctgggcttcctggacttccggggataaagggagaaccaggtttcattggtcctcaaggagaaccaggcttaccaggtttaccaggaacaaaaggtgaacggggggaagcagggcctcctggaagaggtgagcgaggggaacctggagcccccggaccaaaggggaaacaaggtgaatcaggaactagaggcccaaaggggtcaaagggggatcgtggagaaaaaggggactctggagctcagggaccaaggggtccacctggtcaaaaaggggatcaaggagccactgagatcatagactacaacggcaacctccacgaagccttacaggcaagtaggattaccaccttaactgtcacgggtccccctggacctcctggacctcaaggactacaagggccaaagggagagcagggatctccaggaatcccaggaatggatggagagcagggactcaaaggctcaaagggagacatgggggacccaggtatgacaggtgaaaaaggaggaattggacttcctggattaccgggagccaatggaatgaaaggagaaaaaggagattctggaatgccgggtccacagggtccttctatcataggcccaccaggcccaccaggtccccatggcccacctggccccatgggacctcatggacttcctggaccaaagggtacagatggtcctatgggaccccatggccctgcaggtcccaaaggagaaagaggtgaaaaaggagctatgggagagcctggaccaagagggccctatgggctgcctgggaaagatggagagcctggtcttgatggcttccctggtccacggggtgagaagggtgatctaggagaaaagggagaaaagggattccgtggcgttaagggggaaaaaggggagccaggccagcctggcctggatgggctggatgccccttgccaattggggccagatggcttacccatgcctggctgttggcaaaagtgatgaatctaacctttcaagcatgaagttgtgtatataagggtccatttttaatatttatagttgaaaactgaattgcagattttacaagtctgagatatgtttacatagggctgcttcttcctgctggcagtagtatacatgtccatttttactccacttacatctgaaattgggcaatttgtgaaaccagtgagaatcctgcaaaaaatatagatcagtatctccttatcttatgtgaagatacgtatttatatggacaaatcagtggtagagaatgattgattgtactagctattttccttcttttggcttgctaattgcatggacaaaaagtgccatgaaatagtttacatgaaatggtgaccaaatatggactcaaagctatgaaaatgtactatactgactgattttagagctgattatcacattcccattcacctttcatgtcggcgttgactcatacctacaccacccattgaaactaactaaaaaagcatgactgtgtgccaaacctgcttgctgtgcaacttcagatgctagcatgttgatcaggagtcctttgattacatctgaacctttattccttttgtcatctcaagggggttacaccatggcttattgccaaaaagagataaggtggcggagagcacacacacaatttgtcttgtattttgagggagttgcagtcctgactgcagatctacagcttccagtattgtgggctcatgtggccactttggttgaaatacgaaggggttgagcctgttgctgccaccagttttccttgggctgcccttggcagtgaagacatgggaagaggaccgattcagcctccagcactgcctctcatgtgaccaagtaggaaagaggtttacaaatgcaaacatgcagaaccacagactttaaaaatatgtataaataaactgaatttcagcaagtgttaatataggtgcttttaaaaatgacagaggcacagcacttcttttggaataggagattcttggaatgggagatcctgtccctgagggaaaagggatgtccatcccaccaaaacttgggttgctgaagaaataacatgttctgagaagggatcagccaaaatcgcctctcccgatgatataggagagcttactgggacaatctgtgccaaagttgttgtgagagctttccttcctcctacgatccaaccatgtcaaacatttcctacaaagtttgagaaacaggtatttttcattctttttaatgcttttttctttttctttctttagtcccaagaatattgaaaaaatattagtttcagtttttgtcacatatgttttgaacaatttttttaagaagtcttcaaatcataataatttggctccagtagtcaaaatgaccttttactaacttctctcttgttttggataattggatagaatataaaagaagctccactttcagtctaatcattgtaaagcatgaaagttatgcatttttaagtagttttgactttttttacatgatgaatgtaacgtacatggagattatcagttaatataaagccaagattttgtcacatttggtaatattaactaatttctatttttatggttttaagttttgtctatatttagatttctttctctttttaacatttctaaatgtttgtctcatcctcatatccacagaccaaatctaagatctcagaaagctgtgaaatatagttgccataaagaaaatatttttcatctacttgctcaaactttacctaaccatattagatggaacatttctttgcacagtaaagagttggtagcgtgttttgaaatggcttattctaagtggaagtgttacattgaaagaaacattatcaatgaggagtaggcaccctttcagcccattagagaatttaatttctctcctgactcaatgccatcttctgggaagatttctagtttcatgcataggtgtcaccaccagaagggaaattaactcatccttggcttatagttaagatataaccataagacaaggaacctaaaatcctcatgatctcatttatgttatgtaaccaaatgacagtcatacaaaatggcatcttcttttttttctattaaatttttaaggttgaaagatgtttaaactattagatcagtctaattggtaacatttctggtaacattccacacccctaagccagtttagcattttgaaaataatggaggacattttctaacaatttcttgtatggcatggtgttaggataacgtattgctcaatgtctgacacaatttgtcttaaatggtttggaaaaatgaactgaagtgggtggaactacattctcttcaggaaaacaaactacagtgtccagtggctatatttttttcccttctatctttttttctgctcctctagtagaaagaggtggattgaaatggatcactatttaaaacttgcacagcttcaggagacgatacctcaacatcaaaagaaaaacactttatgtataaaaaaattttttgaaatacagcccttcaaagaatactattctgtcctgtgtgtatattgagtttttgctctataactgatttgacaacatcaacttatttcatgattaaatgaggttgtaaactttcattacatttatttccttgggaaaaacaaagggatggaaatactcctccttgttcagtggaattgctaggtcttaaccatgatggataatctttaacttttggttactacaatgttttcaagcatccattttgtcatatagagaattcttaaataatttctaagtgaatgaaagaattgtgtttgttgatatgtgttgatagataatatactttccttaaagatttctttaatgtgtgttattggatagagggttgagaaaatatacatgaaagacacattggaaataaggcaaggtcagtttctatttctaataaaacattgaaggatagcaaattgatatgtgttttagatttaaaattgtttttcatttatgttggttggtgctaatgtatctcttttcctttttctctatggacaatacaactactatggataattttatttccctgtttaatagcattcctaaatcattagtgtgttattttatttttaaagttcatgaatttgctataattatggtccaatgaccaggctttcttaatgtaaaacaaaacagtgtaccaatagatgatgtgtgtttactcgga

SEQ ID NO: 4639 - DNA, 6532 bp, Homo sapiens
  source 1..6532: mol_type = unassigned DNA
gcttggagccgccgcacccgggacggtgcgtagcgctggaagtccggccttccgagagctagctgtccgccgcggcccccgcacgccgggcagccgtccctcgccgcctcgggcgcgccaccatggggccccggctcagcgtctggctgctgctgctgcccgccgcccttctgctccacgaggagcacagccgggccgctgcgaagggtggctgtgctggctctggctgtggcaaatgtgactgccatggagtgaagggacaaaagggtgaaagaggcctcccggggttacaaggtgtcattgggtttcctggaatgcaaggacctgaggggccacagggaccaccaggacaaaagggtgatactggagaaccaggactacctggaacaaaagggacaagaggacctccgggagcatctggctaccctggaaacccaggacttcccggaattcctggccaagacggcccgccaggccccccaggtattccaggatgcaatggcacaaagggggagagagggccgctcgggcctcctggcttgcctggtttcgctggaaatcccggaccaccaggcttaccagggatgaagggtgatccaggtgagatacttggccatgtgcccgggatgctgttgaaaggtgaaagaggatttcccggaatcccagggactccaggcccaccaggactgccagggcttcaaggtcctgttgggcctccaggatttaccggaccaccaggtcccccaggccctcccggccctccaggtgaaaagggacaaatgggcttaagttttcaaggaccaaaaggtgacaagggtgaccaaggggtcagtgggcctccaggagtaccaggacaagctcaagttcaagaaaaaggagacttcgccaccaagggagaaaagggccaaaaaggtgaacctggatttcaggggatgccaggggtcggagagaaaggtgaacccggaaaaccaggacccagaggcaaacccggaaaagatggtgacaaaggggaaaaagggagtcccggttttcctggtgaacccgggtacccaggactcataggccgccagggcccgcagggagaaaagggtgaagcaggtcctcctggcccacctggaattgttataggcacaggacctttgggagaaaaaggagagaggggctaccctggaactccggggccaagaggagagccaggcccaaaaggtttcccaggactaccaggccaacccggacctccaggcctccctgtacctgggcaggctggtgcccctggcttccctggtgaaagaggagaaaaaggtgaccgaggatttcctggtacatctctgccaggaccaagtggaagagatgggctcccgggtcctcctggttcccctgggccccctgggcagcctggctacacaaatggaattgtggaatgtcagcccggacctccaggtgaccagggtcctcctggaattccagggcagccaggatttataggcgaaattggagagaaaggtcaaaaaggagagagttgcctcatctgtgatatagacggatatcgggggcctcccgggccacagggacccccgggagaaataggtttcccagggcagccaggggccaagggcgacagaggtttgcctggcagagatggtgttgcaggagtgccaggccctcaaggtacaccagggctgataggccagccaggagccaagggggagcctggtgagttttatttcgacttgcggctcaaaggtgacaaaggagacccaggctttccaggacagcccggcatgccagggagagcgggttctcctggaagagatggccatccgggtcttcctggccccaagggctcgccgggttctgtaggattgaaaggagagcgtggcccccctggaggagttggattcccaggcagtcgtggtgacaccggcccccctgggcctccaggatatggtcctgctggtcccattggtgacaaaggacaagcaggctttcctggaggccctggatccccaggcctgccaggtccaaagggtgaaccaggaaaaattgttcctttaccaggcccccctggagcagaaggactgccggggtccccaggcttcccaggtccccaaggagaccgaggctttcccggaaccccaggaaggccaggcctgccaggagagaagggcgctgtgggccagccaggcattggatttccagggccccccggccccaaaggtgttgacggcttacctggagacatggggccaccggggactccaggtcgcccgggatttaatggcttacctgggaacccaggtgtgcagggccagaagggagagcctggagttggtctaccgggactcaaaggtttgccaggtcttcccggcattcctggcacacccggggagaaggggagcattggggtaccaggcgttcctggagaacatggagcgatcggaccccctgggcttcaggggatcagaggtgaaccgggacctcctggattgccaggctccgtggggtctccaggagttccaggaataggcccccctggagctaggggtccccctggaggacagggaccaccggggttgtcaggccctcctggaataaaaggagagaagggtttccccggattccctggactggacatgccgggccctaaaggagataaaggggctcaaggactccctggcataacgggacagtcggggctccctggccttcctggacagcagggggctcctgggattcctgggtttccaggttccaagggagaaatgggcgtcatggggacccccgggcagccgggctcaccaggaccagtgggtgctcctggattaccgggtgaaaaaggggaccatggctttccgggctcctcaggacccaggggagaccctggcttgaaaggtgataagggggatgtcggtctccctggcaagcctggctccatggataaggtggacatgggcagcatgaagggccagaaaggagaccaaggagagaaaggacaaattggaccaattggtgagaagggatcccgaggagaccctgggaccccaggagtgcctggaaaggacgggcaggcaggacagcctgggcagccaggacctaaaggtgatccaggtataagtggaaccccaggtgctccaggacttccgggaccaaaaggatctgttggtggaatgggcttgccaggaacacctggagagaaaggtgtgcctggcatccctggcccacaaggttcacctggcttacctggagacaaaggtgcaaaaggagagaaagggcaggcaggcccacctggcataggcatcccagggctgcgaggtgaaaagggagatcaagggatagcgggtttcccaggaagccctggagagaagggagaaaaaggaagcattgggatcccaggaatgccagggtccccaggccttaaagggtctcccgggagtgttggctatccaggaagtcctgggctacctggagaaaaaggtgacaaaggcctcccaggattggatggcatccctggtgtcaaaggagaagcaggtcttcctgggactcctggccccacaggcccagctggccagaaaggggagccaggcagtgatggaatcccggggtcagcaggagagaagggtgaaccaggtctaccaggaagaggattcccagggtttccaggggccaaaggagacaaaggttcaaagggtgaggtgggtttcccaggattagccgggagcccaggaattcctggatccaaaggagagcaaggattcatgggtcctccggggccccagggacagccggggttaccgggatccccaggccatgccacggaggggcccaaaggagaccgcggacctcagggccagcctggcctgccaggacttccgggacccatggggcctccagggcttcctgggattgatggagttaaaggtgacaaaggaaatccaggctggccaggagcacccggtgtcccagggcccaagggagaccctggattccagggcatgcctggtattggtggctctccaggaatcacaggctctaagggtgatatggggcctccaggagttccaggatttcaaggtccaaaaggtcttcctggcctccagggaattaaaggtgatcaaggcgatcaaggcgtcccgggagctaaaggtctcccgggtcctcctggccccccaggtccttacgacatcatcaaaggggagcccgggctccctggtcctgagggccccccagggctgaaagggcttcagggactgccaggcccgaaaggccagcaaggtgttacaggattggtgggtatacctggacctccaggtattcctgggtttgacggtgcccctggccagaaaggagagatgggacctgccgggcctactggtccaagaggatttccaggtccaccaggccccgatgggttgccaggatccatggggcccccaggcaccccatctgttgatcacggcttccttgtgaccaggcatagtcaaacaatagatgacccacagtgtccttctgggaccaaaattctttaccacgggtactctttgctctacgtgcaaggcaatgaacgggcccatggccaggacttgggcacggccggcagctgcctgcgcaagttcagcacaatgcccttcctgttctgcaatattaacaacgtgtgcaactttgcatcacgaaatgactactcgtactggctgtccacccctgagcccatgcccatgtcaatggcacccatcacgggggaaaacataagaccatttattagtaggtgtgctgtgtgtgaggcgcctgccatggtgatggccgtgcacagccagaccattcagatcccaccgtgccccagcgggtggtcctcgctgtggatcggctactcttttgtgatgcacaccagcgctggtgcagaaggctctggccaagccctggcgtcccccggctcctgcctggaggagtttagaagtgcgccattcatcgagtgtcacggccgtgggacctgcaattactacgcaaacgcttacagcttttggctcgccaccatagagaggagcgagatgttcaagaagcctacgccgtccaccttgaaggcaggggagctgcgcacgcacgtcagccgctgccaagtctgtatgagaagaacataatgaagcctgactcagctaatgtcacaacatggtgctacttcttcttctttttgttaacagcaacgaaccctagaaatatatcctgtgtacctcactgtccaatatgaaaaccgtaaagtgccttataggaatttgcgtaactaacacaccctgcttcattgacctctacttgctgaaggagaaaaagacagcgataagctttcaatagtggcataccaaatggcacttttgatgaaataaaatatcaatattttctgcaatccaatgcactgatgtgtgaagtgagaactccatcagaaaaccaaagggtgctaggaggtgtgggtgccttccatactgtttgcccattttcattcttgtattataattaattttctacccccagagataaatgtttgtttatatcactgtctagctgtttcaaaatttaggtcccttggtctgtacaaataatagcaatgtaaaaatggttttttgaacctccaaatggaattacagactcagtagccatatcttccaaccccccagtataaatttctgtctttctgctatgtgtggtactttgcagctgcttttgcagaaatcacaattttcctgtggaataaagatggtccaaaaatagtcaaaaattaaatatatatatatattagtaatttatatagatgtcagcaattaggcagatcaaggtttagtttaacttccactgttaaaataaagcttacatagttttcttcctttgaaagactgtgctgtcctttaacataggtttttaaagactaggatattgaatgtgaaacatccgttttcattgttcacttctaaaccaaaaattatgtgttgccaaaaccaaacccaggttcatgaatatggtgtctattatagtgaaacatgtactttgagcttattgtttttattctgtattaaatattttcagggttttaaacactaatcacaaactgaatgacttgacttcaaaagcaacaaccttaaaggccgtcatttcattagtattcctcattctgcatcctggcttgaaaaacagctctgttgaatcacagtatcagtattttcacacgtaagcacattcgggccatttccgtggtttctcatgagctgtgttcacagacctcagcagggcatcgcatggaccgcaggagggcagattcggaccactaggcctgaaatgacatttcactaaaagtctccaaaacatttctaagactactaaggccttttatgtaatttctttaaatgtgtatttcttaagaattcaaatttgtaataaaactatttgtataaaaattaagcttttattaatttgttgctagtattgccacagacgcattaaaagaaacttactgcacaagctgctaataaatttgtaagctttgcatacctta

SEQ ID NO: 4640 - DNA, 593 bp, Homo sapiens
  source 1..593: mol_type = unassigned DNA
ggagagatgggacctgccgggcctactggtccaagaggatttccaggtccaccaggccccgatgggttgccaggatccatggggcccccaggcaccccatctgttgatcacggcttccttgtgaccaggcatagtcaaacaatagatgacccacagtgtccttctgggaccaaaattctttaccacgggtactctttgctctacgtgcaaggcaatgaacgggcccatggccaggacttgggcacggccggcagctgcctgcgcaagttcagcacaatgcccttcctgttctgcaatattaacaacgtgtgcaactttgcatcacgaaatgactactcgtactggctgtccacccctgagcccatgcccatgtcaatggcacccatcacgggggaaaacataagaccatttattagtaggtgagtcgagcatctgtaggaacaaatgcaaaattgaagaggaaaagtctctagtctggacaagcatatgttttctatttttctccaaaacgttgaatccattgccatttagcttattatttgtgatattcgagttttgtaatggaaatctaccataaaaattatttgacataa

SEQ ID NO: 4641 - DNA, 581 bp, Homo sapiens
  source 1..581: mol_type = unassigned DNA
ttacaggattggtgggtatacctggacctccaggtattcctgggtttgacggtgcccctggccagaaaggagagatgggacctgccgggcctactggtccaagaggatttccaggtccaccaggccccgatgggttgccaggatccatggggcccccaggcaccccatctgttgatcacggcttccttgtgaccaggcatagtcaaacaatagatgacccacagtgtccttctgggaccaaaattctttaccacgggtactctttgctctacgtgcaaggcaatgaacgggcccatggccaggacttgggtaagaagcctgcagatccatgcattcattcagtgtaggtgtgttgagtgccttcggtgtgcagtgctggactcgcctctgctgctgcagtgagggcagtagcgagtgaaacactgcgccatgagggcggtagccagtgaaaaagcagcccggccccatttccctccattgattacaaataatcggttcaacagctgctgtattactaatggcaagccaagaaatgtggagactgaatcttcgaaaatctttaaattaataaaactttagat

SEQ ID NO: 4642 - DNA, 2547 bp, Homo sapiens
  source 1..2547: mol_type = unassigned DNA
cgggacggtgcgtagcgctggaagtccggccttccgagagctagctgtccgccgcggcccccgcacgccgggcagccgtccctcgccgcctcgggcgcgccaccatggggccccggctcagcgtctggctgctgctgctgcccgccgcccttctgctccacgaggagcacagccgggccgctgcgaagggtggctgtgctggctctggctgtggcaaatgtgactgccatggagtgaagggacaaaagggtgaaagaggcctcccggggttacaaggtgtcattgggtttcctggaatgcaaggacctgaggggccacagggaccaccaggacaaaagggtgatactggagaaccaggactacctggaacaaaagggacaagaggacctccgggagcatctggctaccctggaaacccaggacttcccggaattcctggccaagacggcccgccaggccccccaggtattccaggatgcaatggcacaaagggggagagagggccgctcgggcctcctggcttgcctggtttcgctggaaatcccggaccaccaggcttaccagggatgaagggtgatccaggtgagatacttggccatgtgcccgggatgctgttgaaaggtgaaagaggatttcccggaatcccagggactccaggcccaccaggactgccagggcttcaaggtcctgttgggcctccaggatttaccggaccaccaggtcccccaggccctcccggccctccaggtgaaaagggacaaatgggcttaagttttcaaggaccaaaaggtgacaagggtgaccaaggggtcagtgggcctccaggagtaccaggacaagctcaagttcaagaaaaaggagacttcgccaccaagggagaaaagggccaaaaaggtgaacctggatttcaggggatgccaggggtcggagagaaaggtgaacccggaaaaccaggacccagaggcaaacccggaaaagatggtgacaaaggggaaaaagggagtcccggttttcctggtgaacccgggtacccaggactcataggccgccagggcccgcagggagaaaagggtgaagcaggtcctcctggcccacctggaattgttataggcacaggacctttgggagaaaaaggagagaggggctaccctggaactccggggccaagaggagagccaggcccaaaaggtttcccaggactaccaggccaacccggacctccaggcctccctgtacctgggcaggctggtgcccctggcttccctggtgaaagaggagaaaaaggtgaccgaggatttcctggtacatctctgccaggaccaagtggaagagatgggctcccgggtcctcctggttcccctgggccccctgggcagcctggctacacaaatggaattgtggaatgtcagcccggacctccaggtgaccagggtcctcctggaattccagggcagccaggatttataggcgaaattggagagaaaggtcaaaaaggagagagttgcctcatctgtgatatagacggatatcgggggcctcccgggccacagggacccccgggagaaataggtttcccagggcagccaggggccaagggcgacagaggtttgcctggcagagatggtgttgcaggagtgccattgctttttcaaatccataaatgaaatatccggatcacattgacatgaaacctttcaatggaacaaaataccagcttcttagcttttgtagtttgttttaaaagaatccactaaatagaagagcataataataatcttgaattttgaaggacattattttcttgcatataatgacttctgtttctgaagttttgaaatctcaaggcattgttcctctcgtattttctttgttcttctgagctttgcgagcatggactggtttccacaattcctttcattcctttttttctttttgtaagatattgaaagtcaaatttcagaattattcatttctgatgtagcccttcaaattttttaatttttaaagatattgctggaagcttctacaaaagaaaaccagggcaaaagcgagttgaaatagcaatgacccagctggaattcagcaatcattttctgcttttgaagttagatcttgggcttttgctctccagaacttccctggtgcctggggagctgagttagaagttgcaattgtttaagatatatctaaataaattagaagttcaaataactgggtagccctgactgtagtggggatcaaagacagaagaactttgaaggaagcagaaaaggacgtttttaacctctatgcaccgcttcatctcctgggctttcctggtggacttcctgcctcaactctggctgaaactcagtctagacatatctaataaaagacggaaaaagaggaaagaggtgagaaagaaggaatattgaggaaagatcataatatagaagaaaagaaagaaaacatacaaccccaattctactccttatgccttcatcaggagctcctttctttccggagttggaaaaagtctctaaaaataaatttatgggtaaataattc

SEQ ID NO: 4643 - DNA, 1077 bp, Homo sapiens
  source 1..1077: mol_type = unassigned DNA
tctcccctcttcgggagcctggcgtgggtgtctcagaactgatctgctttcagtctgagttttgccatcctctgcggcgagcctgcgagcttgcacacttgggcaggatgcgctcagcgccctagctcagaggccgacccagggcagagccagtcagcgggcgctgggacgcaggactctgaacatgggtcctctgcctccctcccacctcctccaggcccggccactcggcttcctggtgaggaattcttaacgaccgccaaatccggtttctagagataaaagacggttgaagggtggctgtgctggctctggctgtggcaaatgtgactgccatggagtgaagggacaaaaggtgaggtgaaagaggcctcccggggttacaaggtgtcattgggtttcctggaatgcaaggacctgaggggccacagggaccaccaggacaaaagggtgatactggagaaccaggactacctggaacaaaagggacaagaggacctccgggagcatctggctaccctggaaacccaggacttcccggaattcctggccaagacggcccgccaggccccccaggtattccaggatgcaatggcacaaagggggagagagggccgctcgggcctcctggcttgcctggtttcgctggaaatcccggaccaccaggcttaccagggatgaagggtgatccaggtgagatacttggccatgtgcccgggatgctgttgaaaggtgaaagaggatttcccggaatcccagggactccaggcccaccaggactgccagggcttcaaggtcctgttgggcctccaggatttaccggaccaccaggtcccccaggccctcccggccctccaggtgaaaagggacaaatgggcttaagttttcaaggaccaaaaggtgacaagggtgaccaaggggtcagtgggcctccaggagtaccaggacaagctcaagttcaagaaaaaggagacttcgccaccaagggagaaaagggccaaaaaggtgaacctggatttcaggggatgccaggggtcggagagaaaggtgaacccggaaaaccaggacccagagtaa

SEQ ID NO: 4644 - DNA, 564 bp, Homo sapiens
  source 1..564: mol_type = unassigned DNA
gtaggaattgagtgaagaaaaagtttgcaagtctggacagaagggaaaagttctcctgagagaccggctttggggaggggaggggggaaggaagagtagctccttcttcttcttcttttttttttcttccactcttaaaaagcttctttctcttcacccaagcctcactgtccctctccggctctagctctctccatataaaccctcaagattatgtcaattggttagagccagccgggaatttcgtgcgggtgctgaaggagctgcgggagccggagaagaatgaaactgcgtggagtcagcctggctgccggcttgttcttactggccctgagtctttgggggcagcctgcagaggctgcgatgagaaaactacaaattacagacgttgaatacattcccagaaatccagtcatgtaggcagtaacttgtgaagctggaaaatttgaatccaggcagtttgactctagaatctttgcccttaatgactgtcctatactgcctactttgtatgtggtctatagagatttactggtgtgtaaagtatttggatctctgccactt

SEQ ID NO: 4645 - DNA, 6483 bp, Homo sapiens
  source 1..6483: mol_type = unassigned DNA
agaagggaaaagttctcctgagagaccggctttggggaggggaggggggaaggaagagtagctccttcttcttcttcttttttttttcttccactcttaaaaagcttctttctcttcacccaagcctcactgtccctctccggctctagctctctccatataaaccctcaagattatgtcaattggttagagccagccgggaatttcgtgcgggtgctgaaggagctgcgggagccggagaagaatgaaactgcgtggagtcagcctggctgccggcttgttcttactggccctgagtctttgggggcagcctgcagaggctgcggcttgctatgggtgttctccaggatcaaagtgtgactgcagtggcataaaaggggaaaagggagagagagggtttccaggtttggaaggacacccaggattgcctggatttccaggtccagaagggcctccggggcctcggggacaaaagggtgatgatggaattccagggccaccaggaccaaaaggaatcagaggtcctcctggacttcctggatttccagggacaccaggtcttcctggaatgccaggccacgatggggccccaggacctcaaggtattcccggatgcaatggaaccaagggagaacgtggatttccaggcagtcccggttttcctggtttacagggtcctccaggaccccctgggatcccaggtatgaagggtgaaccaggtagtataattatgtcatcactgccaggaccaaagggtaatccaggatatccaggtcctcctggaatacaaggcctacctggtcccactggtataccagggccaattggtcccccaggaccaccaggtttgatgggccctcctggtccaccaggacttccaggacctaaggggaatatgggcttaaatttccagggacccaaaggtgaaaaaggtgagcaaggtcttcagggcccacctgggccacctgggcagatcagtgaacagaaaagaccaattgatgtagagtttcagaaaggagatcagggacttcctggtgaccgagggcctcctggacctccagggatacgtggtcctccaggtcccccaggtggtgagaaaggtgagaagggtgagcaaggagagccaggcaaaagaggtaaaccaggcaaagatggagaaaatggccaaccaggaattcctggtttgcctggtgatcctggttaccctggtgaacccggaagggatggtgaaaagggccaaaaaggtgacactggcccacctggacctcctggacttgtaattcctagacctgggactggtataactataggagaaaaaggaaacattgggttgcctgggttgcctggagaaaaaggagagcgaggatttcctggaatacagggtccacctggccttcctggacctccaggggctgcagttatgggtcctcctggccctcctggatttcctggagaaaggggtcagaaaggtgatgaaggaccacctggaatttccattcctggacctcctggacttgacggacagcctggggctcctgggcttccagggcctcctggccctgctggccctcacattcctcctagtgatgagatatgtgaaccaggccctccaggccccccaggatctccaggtgataaaggactccaaggagaacaaggagtgaaaggtgacaaaggtgacacttgcttcaactgcattggaactggtatttcagggcctccaggtcaacctggtttgccaggtctcccaggtcctccaggatctcttggtttccctggacagaaaggggaaaaaggacaagctggtgcaactggtcccaaaggattaccaggcattccaggagctccaggtgctccaggctttcctggatctaaaggtgaacctggtgatatcctcacttttccaggaatgaagggtgacaaaggagagttgggttcccctggagctccagggcttcctggtttacctggcactcctggacaggatggattgccagggcttcctggcccgaaaggagagcctggtggaattacttttaagggtgaaagaggtccccctgggaacccaggtttaccaggcctcccagggaatatagggcctatgggtccccctggtttcggccctccaggcccagtaggtgaaaaaggcatacaaggtgtggcaggaaatccaggccagccaggaataccaggtcctaaaggggatccaggtcagactataacccagccggggaagcctggcttgcctggtaacccaggcagagatggtgatgtaggtcttccaggtgaccctggacttccagggcaaccaggcttgccagggatacctggtagcaaaggagaaccaggtatccctggaattgggcttcctggaccacctggtcccaaaggctttcctggaattccaggacctccaggagcacctgggacacctggaagaattggtctagaaggccctcctgggccacccggctttccaggaccaaagggtgaaccaggatttgcattacctgggccacctgggccaccaggacttccaggtttcaaaggagcacttggtccaaaaggtgatcgtggtttcccaggacctccgggtcctccaggacgcactggcttagatgggctccctggaccaaaaggtgatgttggaccaaatggacaacctggaccaatgggacctcctgggctgccaggaataggtgttcagggaccaccaggaccaccagggattcctgggccaataggtcaacctggtttacatggaataccaggagagaagggggatccaggacctcctggacttgatgttccaggacccccaggtgaaagaggcagtccagggatccccggagcacctggtcctataggacctccaggatcaccagggcttccaggaaaagcaggtgcctctggatttccaggtaccaaaggtgaaatgggtatgatgggacctccaggcccaccaggacctttgggaattcctggcaggagtggtgtacctggtcttaaaggtgatgatggcttgcagggtcagccaggacttcctggccctacaggagaaaaaggtagtaaaggagagcctggccttccaggccctcctggaccaatggatccaaatcttctgggctcaaaaggagagaagggggaacctggcttaccaggtatacctggagtttcagggccaaaaggttatcagggtttgcctggagacccagggcaacctggactgagtggacaacctggattaccaggaccaccaggtcccaaaggtaaccctggtctccctggacagccaggtcttataggacctcctggacttaaaggaaccatcggtgatatgggttttccagggcctcagggtgtggaagggcctcctggaccttctggagttcctggacaacctggctccccaggattacctggacagaaaggcgacaaaggtgatcctggtatttcaagcattggtcttccaggtcttcctggtccaaagggtgagcctggtctgcctggatacccagggaaccctggtatcaaaggttctgtgggagatcctggtttgcccggattaccaggaacccctggagcaaaaggacaaccaggccttcctggattcccaggaaccccaggccctcctggaccaaaaggtattagtggccctcctgggaaccccggccttccaggagaacctggtcctgtaggtggtggaggtcatcctgggcaaccagggcctccaggcgaaaaaggcaaacccggtcaagatggtattcctggaccagctggacagaagggtgaaccaggtcaaccaggctttggaaacccaggaccccctggacttccaggactttctggccaaaagggtgatggaggattacctgggattccaggaaatcctggccttccaggtccaaagggcgaaccaggctttcacggtttccctggtgtgcagggtcccccaggccctcctggttctccgggtccagctctggaaggacctaaaggcaaccctgggccccaaggtcctcctgggagaccaggtcctacaggttttcaaggtctaccaggtccagaaggtcctccaggtctccctggaaatggaggtattaaaggagagaagggaaatccaggccaacctgggctacctggcttgcctggtttgaaaggagatcaaggaccaccaggactccagggtaatcctggccggccgggtctcaatggaatgaaaggagatcctggtctccctggtgttccaggattcccaggcatgaaaggacccagtggagtacctggatcagctggccctgagggggaaccgggacttattggtcctccaggtcctcctggattacctggtccttcaggacagagtatcataattaaaggagatgctggtcctccaggaatccctggccagcctgggctaaagggtctaccaggaccccaaggacctcaaggcttaccaggtccaactggccctccaggagatcctggacgcaatggactccctggctttgatggtgcaggagggcgcaaaggagacccaggtctgccaggacagccaggtacccgtggtttggatggtccccctggtccagatggattgcaaggtcccccaggtccccctggaacctcctctgttgcacatggatttcttattacacgccacagccagacaacggatgcaccacaatgcccacagggaacacttcaggtctatgaaggcttttctctcctgtatgtacaaggaaataaaagagcccacggtcaagacttggggacggctggcagctgccttcgtcgctttagtaccatgcctttcatgttctgcaacatcaataatgtttgcaactttgcttcaagaaatgactattcttactggctctctaccccagagcccatgccaatgagcatgcaacccctaaagggccagagcatccagccattcattagtcgatgtgcagtatgtgaagctccagctgtggtgatcgcagttcacagtcagacgatccagattccccattgtcctcagggatgggattctctgtggattggttattccttcatgatgcatacaagtgcaggggcagaaggctcaggtcaagccctagcctcccctggttcctgcttggaagagtttcgttcagctcccttcatcgaatgtcatgggaggggtacctgtaactactatgccaactcctacagcttttggctggcaactgtagatgtgtcagacatgttcagtaaacctcagtcagaaacgctgaaagcaggagacttgaggacacgaattagccgatgtcaagtgtgcatgaagaggacataacattttgaagaattccttttgtgttttaaaatgtgatatatatatatataaaattcctaggatgcagtgtctcattgtccccaactttactactgctgccgtcaatggtgctactatatatgatcaagataacatgctgactagtaaccatgaagattcagatgtacctcagcaatgcgccagagcaaagtctctattatttttctactaaagaaataaggaagtgaatttactttttgggtccagaatgactttctccaagaattataagatgaaaattatatattttgcccagttactaaaatggtacattaaaaattcaattaagagaagagtcacattgagtaaaataaaagactgcagtttgtgggaagaattatttttcacggtgctactaatcctgctgtatcccgggtttttaatataaaggtgttaagcttattttgctttgtaagtaaagaatgtgtatattgtgaacagccttttagctcaaaatgttgagtcatttacatatgacatagcatgaatcactctttacagaaaatgtaggaaaccctagaatacagacagcaatattttatattcatgtttatcaaagtgagaggacttatattcctacatcaagttactactgagagtaaatttattttgagttttatcccgtaagttctgttttgattttttttaaaaaacaaacccttttagtcactttaatcagaattttaaatgttcatgttacataccaaattataatatctaatggagcaatttgtcttttgctatattctccaagattatctcttaagaccatatgccccctgttttaatgtttcttacatcttgtttttactcatttctgactggacaaagttcttccaaacaattctgagaaacaaaaacacacacgcagaattaacaattcttttccctgtgcttcttatgtaagaatcctcctgtggcctctgcttgtacagaactgggaaacaacacttggttagtctcttttaagttacaaaaagccaattgatgtttcttattctttttaaattttaaatattttgttataaatactcacaggataccttatttccctagctatcatctcctgacttaatgttttttaaacccaccaatataaatttaattaaagatatatgttgtaa

SEQ ID NO: 4646 - DNA, 6469 bp, Homo sapiens
  source 1..6469: mol_type = unassigned DNA
agaagggaaaagttctcctgagagaccggctttggggaggggaggggggaaggaagagtagctccttcttcttcttcttttttttttcttccactcttaaaaagcttctttctcttcacccaagcctcactgtccctctccggctctagctctctccatataaaccctcaagattatgtcaattggttagagccagccgggaatttcgtgcgggtgctgaaggagctgcgggagccggagaagaatgaaactgcgtggagtcagcctggctgccggcttgttcttactggccctgagtctttgggggcagcctgcagaggctgcggcttgctatgggtgttctccaggatcaaagtgtgactgcagtggcataaaaggggaaaagggagagagagggtttccaggtttggaaggacacccaggattgcctggatttccaggtccagaagggcctccggggcctcggggacaaaagggtgatgatggaattccagggccaccaggaccaaaaggaatcagaggtcctcctggacttcctggatttccagggacaccaggtcttcctggaatgccaggccacgatggggccccaggacctcaaggtattcccggatgcaatggaaccaagggagaacgtggatttccaggcagtcccggttttcctggtttacagggtcctccaggaccccctgggatcccaggtatgaagggtgaaccaggtagtataattatgtcatcactgccaggaccaaagggtaatccaggatatccaggtcctcctggaatacaaggcctacctggtcccactggtataccagggccaattggtcccccaggaccaccaggtttgatgggccctcctggtccaccaggacttccaggacctaaggggaatatgggcttaaatttccagggacccaaaggtgaaaaaggtgagcaaggtcttcagggcccacctgggccacctgggcagatcagtgaacagaaaagaccaattgatgtagagtttcagaaaggagatcagggacttcctggtgaccgagggcctcctggacctccagggatacgtggtcctccaggtcccccaggtggtgagaaaggtgagaagggtgagcaaggagagccaggcaaaagaggtaaaccaggcaaagatggagaaaatggccaaccaggaattcctggtttgcctggtgatcctggttaccctggtgaacccggaagggatggtgaaaagggccaaaaaggtgacactggcccacctggacctcctggacttgtaattcctagacctgggactggtataactataggagaaaaaggaaacattgggttgcctgggttgcctggagaaaaaggagagcgaggatttcctggaatacagggtccacctggccttcctggacctccaggggctgcagttatgggtcctcctggccctcctggatttcctggagaaaggggtcagaaaggtgatgaaggaccacctggaatttccattcctggacctcctggacttgacggacagcctggggctcctgggcttccagggcctcctggccctgctggccctcacattcctcctagtgatgagatatgtgaaccaggccctccaggccccccaggatctccaggtgataaaggactccaaggagaacaaggagtgaaaggtgacaaaggtgacacttgcttcaactgcattggaactggtatttcagggcctccaggtcaacctggtttgccaggtctcccaggtcctccaggatctcttggtttccctggacagaaaggggaaaaaggacaagctggtgcaactggtcccaaaggattaccaggcattccaggagctccaggtgctccaggctttcctggatctaaaggtgaacctggtgatatcctcacttttccaggaatgaagggtgacaaaggagagttgggttcccctggagctccagggcttcctggtttacctggcactcctggacaggatggattgccagggcttcctggcccgaaaggagagcctggtggaattacttttaagggtgaaagaggtccccctgggaacccaggtttaccaggcctcccagggaatatagggcctatgggtccccctggtttcggccctccaggcccagtaggtgaaaaaggcatacaaggtgtggcaggaaatccaggccagccaggaataccaggtcctaaaggggatccaggtcagactataacccagccggggaagcctggcttgcctggtaacccaggcagagatggtgatgtaggtcttccaggtgaccctggacttccagggcaaccaggcttgccagggatacctggtagcaaaggagaaccaggtatccctggaattgggcttcctggaccacctggtcccaaaggctttcctggaattccaggacctccaggagcacctgggacacctggaagaattggtctagaaggccctcctgggccacccggctttccaggaccaaagggtgaaccaggatttgcattacctgggccacctgggccaccaggacttccaggtttcaaaggagcacttggtccaaaaggtgatcgtggtttcccaggacctccgggtcctccaggacgcactggcttagatgggctccctggaccaaaaggtgatgttggaccaaatggacaacctggaccaatgggacctcctgggctgccaggaataggtgttcagggaccaccaggaccaccagggattcctgggccaataggtcaacctggtttacatggaataccaggagagaagggggatccaggacctcctggacttgatgttccaggacccccaggtgaaagaggcagtccagggatccccggagcacctggtcctataggacctccaggatcaccagggcttccaggaaaagcaggtgcctctggatttccaggtaccaaaggtgaaatgggtatgatgggacctccaggcccaccaggacctttgggaattcctggcaggagtggtgtacctggtcttaaaggtgatgatggcttgcagggtcagccaggacttcctggccctacaggagaaaaaggtagtaaaggagagcctggccttccaggccctcctggaccaatggatccaaatcttctgggctcaaaaggagagaagggggaacctggcttaccaggtatacctggagtttcagggccaaaaggttatcagggtttgcctggagacccagggcaacctggactgagtggacaacctggattaccaggaccaccaggtcccaaaggtaaccctggtctccctggacagccaggtcttataggacctcctggacttaaaggaaccatcggtgatatgggttttccagggcctcagggtgtggaagggcctcctggaccttctggagttcctggacaacctggctccccaggattacctggacagaaaggcgacaaaggtgatcctggtatttcaagcattggtcttccaggtcttcctggtccaaagggtgagcctggtctgcctggatacccagggaaccctggtatcaaaggttctgtgggagatcctggtttgcccggattaccaggaacccctggagcaaaaggacaaccaggccttcctggattcccaggaaccccaggccctcctggaccaaaaggtattagtggccctcctgggaaccccggccttccaggagaacctggtcctgtaggtggtggaggtcatcctgggcaaccagggcctccaggcgaaaaaggcaaacccggtcaagatggtattcctggaccagctggacagaagggtgaaccaggtcaaccaggctttggaaacccaggaccccctggacttccaggactttctggccaaaagggtgatggaggattacctgggattccaggaaatcctggccttccaggtccaaagggcgaaccaggctttcacggtttccctggtgtgcagggtcccccaggccctcctggttctccgggtccagctctggaaggacctaaaggcaaccctgggccccaaggtcctcctgggagaccaggtctaccaggtccagaaggtcctccaggtctccctggaaatggaggtattaaaggagagaagggaaatccaggccaacctgggctacctggcttgcctggtttgaaaggagatcaaggaccaccaggactccagggtaatcctggccggccgggtctcaatggaatgaaaggagatcctggtctccctggtgttccaggattcccaggcatgaaaggacccagtggagtacctggatcagctggccctgagggggaaccgggacttattggtcctccaggtcctcctggattacctggtccttcaggacagagtatcataattaaaggagatgctggtcctccaggaatccctggccagcctgggctaaagggtctaccaggaccccaaggacctcaaggcttaccaggtccaactggccctccaggagatcctggacgcaatggactccctggctttgatggtgcaggagggcgcaaaggagacccaggtctgccaggacagccaggtacccgtggtttggatggtccccctggtccagatggattgcaaggtcccccaggtccccctggaacctcctctgttgcacatggatttcttattacacgccacagccagacaacggatgcaccacaatgcccacagggaacacttcaggtctatgaaggcttttctctcctgtatgtacaaggaaataaaagagcccacggtcaagacttggggacggctggcagctgccttcgtcgctttagtaccatgcctttcatgttctgcaacatcaataatgtttgcaactttgcttcaagaaatgactattcttactggctctctaccccagagcccatgccaatgagcatgcaacccctaaagggccagagcatccagccattcattagtcgatgtgcagtatgtgaagctccagctgtggtgatcgcagttcacagtcagacgatccagattccccattgtcctcagggatgggattctctgtggattggttattccttcatgatgcatacaagtgcaggggcagaaggctcaggtcaagccctagcctcccctggttcctgcttggaagagtttcgttcagctcccttcatcgaatgtcatgggaggggtacctgtaactactatgccaactcctacagcttttggctggcaactgtagatgtgtcagacatgttcagtaaacctcagtcagaaacgctgaaagcaggagacttgaggacacgaattagccgatgtcaagtgtgcatgaagaggacataacattttgaagaattccttttgtgttttaaaatgtgatatatatatatataaaattcctaggatgcagtgtctcattgtccccaactttactactgctgccgtcaatggtgctactatatatgatcaagataacatgctgactagtaaccatgaagattcagatgtacctcagcaatgcgccagagcaaagtctctattatttttctactaaagaaataaggaagtgaatttactttttgggtccagaatgactttctccaagaattataagatgaaaattatatattttgcccagttactaaaatggtacattaaaaattcaattaagagaagagtcacattgagtaaaataaaagactgcagtttgtgggaagaattatttttcacggtgctactaatcctgctgtatcccgggtttttaatataaaggtgttaagcttattttgctttgtaagtaaagaatgtgtatattgtgaacagccttttagctcaaaatgttgagtcatttacatatgacatagcatgaatcactctttacagaaaatgtaggaaaccctagaatacagacagcaatattttatattcatgtttatcaaagtgagaggacttatattcctacatcaagttactactgagagtaaatttattttgagttttatcccgtaagttctgttttgattttttttaaaaaacaaacccttttagtcactttaatcagaattttaaatgttcatgttacataccaaattataatatctaatggagcaatttgtcttttgctatattctccaagattatctcttaagaccatatgccccctgttttaatgtttcttacatcttgtttttactcatttctgactggacaaagttcttccaaacaattctgagaaacaaaaacacacacgcagaattaacaattcttttccctgtgcttcttatgtaagaatcctcctgtggcctctgcttgtacagaactgggaaacaacacttggttagtctcttttaagttacaaaaagccaattgatgtttcttattctttttaaattttaaatattttgttataaatactcacaggataccttatttccctagctatcatctcctgacttaatgttttttaaacccaccaatataaatttaattaaagatatatgttgtaaggat

SEQ ID NO: 4647 - DNA, 782 bp, Homo sapiens
  source 1..782: mol_type = unassigned DNA
gctccttcttcttcttcttttttttttcttccactcttaaaaagcttctttctcttcacccaagcctcactgtccctctccggctctagctctctccatataaaccctcaagattatgtcaattggttagagccagccgggaatttcgtgcgggtgctgaaggagctgcgggagccggagaagaatgaaactgcgtggagtcagcctggctgccggcttgttcttactggccctgagtctttgggggcagcctgcagaggctgcggcttgctatgggtgttctccaggatcaaagtgtgactgcagtggcataaaaggggaaaagggagagagagggtttccaggtttggaaggacacccaggattgcctggatttccaggtccagaagggcctccggggcctcggggacaaaagggtgatgatggaattccagggccaccaggaccaaaaggaatcagaggtcctcctggacttcctggatttccagggacaccaggtcttcctggaatgccaggccacgatggggccccaggacctcaaggtattcccggatgcaatggaaccaaggtgagatccatccatttaatcttgggtagtatacttgacaataattaacttaaaaacctaaagaaatcaatatgaagaatgtagaagaagggatatagtgtcttcaggtcttggctattacataaagtatgctctgactataattttctatatattgaactatcaataatttcattaaacatgtataattagctgggatattgcattgggttaa

SEQ ID NO: 4648 - DNA, 3622 bp, Homo sapiens
  source 1..3622: mol_type = unassigned DNA
tctttcctctccaattgctgctaggctgctggttttcaccttgattgtgaggagaggtggtgtgaatagagcaagttaaaatgccacaaagctctgagaggtggtgggaatagagcaagttaaaatgccataaatctctgagaggtggtaggaatagagcaagttaaaatgccacaaagctctgagttctcaccaagattcagctttttttttttttttttttctgagaaaacactccttgaattgctgcaagctttggttaagttctgaaagttaattctgactgaccatttttgccagtattctcattgcttctatggagaagacaatctttggagatttcctaacaccatcatttgtgctgatgtcaccctatcctctatgttttaaagggtttgcctggtgatcctggttaccctggtgaacccggaagggatggtgaaaagggccaaaaaggtgacactggcccacctggacctcctggacttgtaattcctagacctgggactggtataactataggagaaaaaggaaacattgggttgcctgggttgcctggagaaaaaggagagcgaggatttcctggaatacagggtccacctggccttcctggacctccaggggctgcagttatgggtcctcctggccctcctggatttcctggagaaaggggtcagaaaggtgatgaaggaccacctggaatttccattcctggacctcctggacttgacggacagcctggggctcctgggcttccagggcctcctggccctgctggccctcacattcctcctagtgatgagatatgtgaaccaggccctccaggccccccaggatctccaggtgataaaggactccaaggagaacaaggagtgaaaggtgacaaaggtgacacttgcttcaactgcattggaactggtatttcagggcctccaggtcaacctggtttgccaggtctcccaggtcctccaggatctcttggtttccctggacagaaaggggaaaaaggacaagctggtgcaactggtcccaaaggattaccaggcattccaggagctccaggtgctccaggctttcctggatctaaaggtgaacctggtgatatcctcacttttccaggaatgaagggtgacaaaggagagttgggttcccctggagctccagggcttcctggtttacctggcactcctggacaggatggattgccagggcttcctggcccgaaaggagagcctggtggaattacttttaagggtgaaagaggtccccctgggaacccaggtttaccaggcctcccagggaatatagggcctatgggtccccctggtttcggccctccaggcccagtaggtgaaaaaggcatacaaggtgtggcaggaaatccaggccagccaggaataccaggtcctaaaggggatccaggtcagactataacccagccggggaagcctggcttgcctggtaacccaggcagagatggtgatgtaggtcttccaggtgaccctggacttccagggcaaccaggcttgccagggatacctggtagcaaaggagaaccaggtatccctggaattgggcttcctggaccacctggtcccaaaggctttcctggaattccaggacctccaggagcacctgggacacctggaagaattggtctagaaggccctcctgggccacccggctttccaggaccaaagggtgaaccaggatttgcattacctgggccacctgggccaccaggacttccaggtttcaaaggagcacttggtccaaaaggtgatcgtggtttcccaggacctccgggtcctccaggacgcactggcttagatgggctccctggaccaaaaggtgatgttggaccaaatggacaacctggaccaatgggacctcctgggctgccaggaataggtgttcagggaccaccaggaccaccagggattcctgggccaataggtcaacctggtttacatggaataccaggagagaagggggatccaggacctcctggacttgatgttccaggacccccaggtgaaagaggcagtccagggatccccggagcacctggtcctataggacctccaggatcaccagggcttccaggaaaagcaggtgcctctggatttccaggtaccaaaggtgaaatgggtatgatgggacctccaggcccaccaggacctttgggaattcctggcaggagtggtgtacctggtcttaaaggtgatgatggcttgcagggtcagccaggacttcctggccctacaggagaaaaaggtagtaaaggagagcctggccttccaggccctcctggaccaatggatccaaatcttctgggctcaaaaggagagaagggggaacctggcttaccaggtatacctggagtttcagggccaaaaggttatcagggtttgcctggagacccagggcaacctggactgagtggacaacctggattaccaggaccaccaggtcccaaaggtaaccctggtctccctggacagccaggtcttataggacctcctggacttaaaggaaccatcggtgatatgggttttccagggcctcagggtgtggaagggcctcctggaccttctggagttcctggacaacctggctccccaggattacctggacagaaaggcgacaaaggtgatcctggtatttcaagcattggtcttccaggtcttcctggtccaaaggtaatctttggcatatagttttaggcacatacttgagcagatatgaaattttttaatactatgctcattcctaagttttcattaaacaaactatagaatgacatagtatattctggataagagatttattccttttcttttctcttagatgataagaagatatgttttagggtttgtggccagtccaaaataaaaagggaaaactttctggtttctttgtttttcttctatcttaatttctggatatacttcaataatctcaatgcctagatttttctggtcttgttagtccatccctttttagtgatggagttgttggcctttgtcctaatgttattattaactaatttgaaaagacttataaacaaagtgacagttaatgctaatgtagtagtattcttaactgcgtgtctgagatagtcctctgaatacagttttacaattccctctacttctctcttcaatgtgaaaactttggtggtgtttctcaagtaatcaaatttagaatttgtttcagaatcattggactcaacaggaatttatttgacaattgtttagttccatgtcaaaaagtagtaactccttaatcatgtagtcagaccacagacctaaaaagtattagaaaaggaattttggtactcagttttcatggaaatagtgaaagttcccagtgatataagaatttattgaattgtatgtaaggataatttttcttttaatattatataaaaatactttattttgatcatctaattgatcaatgtcttataaagagataatcaagagaagtttctgtatgttcattccagtttaacaatgtaaagtttcttgaagtgaattttaattttctctgttatatttatattttaccagtgacattgaatatatgattttattaaaaaataatatagacatattaa

SEQ ID NO: 4649 - DNA, 537 bp, Homo sapiens
  source 1..537: mol_type = unassigned DNA
gtgatgatggcttgcagggtcagccaggacttcctggccctacaggagaaaaaggtagtaaaggagagcctggccttccaggccctcctggaccaatggatccaaatcttctgggctcaaaaggagagaagggggaacctggcttaccaggtatacctggagtttcagggccaaaaggttatcagggtttgcctggagacccagggcaacctggactgagtggacaacctggattaccaggaccaccaggtcccaaaggtaaccctggtctccctggacagccaggtcttataggacctcctggacttaaaggaaccatcggtgatatgggttttccagggcctcagggtgtggaagggcctcctggaccttctggagttcctggacaacctggctccccaggattacctggacagaaaggcgacaaaggtgatcctggtatttcaagcattggtcttccaggtcttcctggtccaaagatgataagaagatatgttttagggtttgtggccagtccaaaataaaaagggaaaactt

SEQ ID NO: 4650 - DNA, 737 bp, Homo sapiens
  source 1..737: mol_type = unassigned DNA
aagtggtgataatttggtttatatacagatgcatggatatgaactttcagagtattcttttattgaaatgaattttaacttgaaagtatttagtgtaatgctttttagtttcttgatatttctaacagttttgatatttttcctttttgttaatgatgacattgggccttggtgaactttgatccctatccaggtcctacaggttttcaaggtctaccaggtccagaaggtcctccaggtctccctggaaatggaggtattaaaggagagaagggaaatccaggccaacctgggctacctggcttgcctggtttgaaaggagatcaaggaccaccaggactccagggtaatcctggccggccgggtctcaatggaatgaaaggagatcctggtctccctggtgttccaggattcccaggcatgaaaggacccagtggagtacctggatcagctggccctgagggggaaccgggacttattggtcctccaggtcctcctggattacctggtccttcaggacagagtatcataattaaaggagatgctggtcctccaggaatccctggccagcctgggctaaagggtctaccaggaccccaaggacctcaaggcttaccaggtccaactggccctccaggagatcctggacgcaatggactccctggctttgatggtgcaggagggcgcaaaggagacccaggtctgccaggacagccaggtacccgtggtttggatgg

SEQ ID NO: 4651 - DNA, 382 bp, Homo sapiens
  source 1..382: mol_type = unassigned DNA
agtgttaacatgatgtcttcagtagagttttctattttctggattaacgaagaccaacagcttatcctttagaataagctctatttgaaaaagtttggctctctatacttctgtatggttctgtttgcatactgattatgctgtaagtataagaaatgctggcaaagaacattattgttttaacttgtactataatgtgaaccacttctaactcataatcttattttgtactgtgtgatgtctgatactgctaacatcgatctttgggctttggtgaactctgatcttcccaggttttcaaggtctaccaggtccagaaggtcctccaggtctccctggaaatggaggtattaaaggagagaagggaaatccaggccaacct

SEQ ID NO: 4652 - DNA, 790 bp, Homo sapiens
  source 1..790: mol_type = unassigned DNA
aaggcttaccaggtccaactggccctccaggagatcctggacgcaatggactccctggctttgatggtgcaggagggcgcaaaggagacccaggtctgccaggacagccaggtacccgtggtttggatggtccccctggtccagatggattgcaaggtcccccaggtccccctggaacctcctctgttgcacatggatttcttattacacgccacagccagacaacggatgcaccacaatgcccacagggaacacttcaggtctatgaaggcttttctctcctgtatgtacaaggaaataaaagagcccacggtcaagacttggtaaacctcagtcagaaacgctgaaagcaggagacttgaggacacgaattagccgatgtcaagtgtgcatgaagaggacataacattttgaagaattccttttgtgttttaaaatgtgatatatatatatataaaattcctaggatgcagtgtctcattgtccccaactttactactgctgccgtcaatggtgctactatatatgatcaagataacatgctgactagtaaccatgaagattcagatgtacctcagcaatgcgccagagcaaagtctctattatttttctactaaagaaataaggaagtgaatttactttttgggtccagaatgactttctccaagaattataagatgaaaattatatattttgcccagttactaaaatggtacattaaaaattcaattaagagaagagtcacattgagtaaaataaaagactgcagtttgtgggaagaattattttt

SEQ ID NO: 4653 - DNA, 859 bp, Homo sapiens
  source 1..859: mol_type = unassigned DNA
tttgcttcaagaaatgactattcttactggctctctaccccagagcccatgccaatgagcatgcaacccctaaagggccagagcatccagccattcattagtcgatgtgcagtatgtgaagctccagctgtggtgatcgcagttcacagtcagacgatccagattccccattgtcctcagggatgggattctctgtggattggttattccttcatgatgtaaacctcagtcagaaacgctgaaagcaggagacttgaggacacgaattagccgatgtcaagtgtgcatgaagaggacataacattttgaagaattccttttgtgttttaaaatgtgatatatatatatataaaattcctaggatgcagtgtctcattgtccccaactttactactgctgccgtcaatggtgctactatatatgatcaagataacatgctgactagtaaccatgaagattcagatgtacctcagcaatgcgccagagcaaagtctctattatttttctactaaagaaataaggaagtgaatttactttttgggtccagaatgactttctccaagaattataagatgaaaattatatattttgcccagttactaaaatggtacattaaaaattcaattaagagaagagtcacattgagtaaaataaaagactgcagtttgtgggaagaattatttttcacggtgctactaatcctgctgtatcccgggtttttaatataaaggtgttaagcttattttgctttgtaagtaaagaatgtgtatattgtgaacagccttttagctcaaaatgttgagtcatttacatatgacatagcatgaatcactctttacagaaaatgtaggaaacccta

SEQ ID NO: 4654 - DNA, 8471 bp, Homo sapiens
  source 1..8471: mol_type = unassigned DNA
ggaaaaaagtgctccgcgccgaaggcgaggtccgcactctccgtccccgcggctggcgcaggacctcactcgagcggagcgcccacggggagcgggtcgcggggcggcggcggcgaggaggaggcgagaaggagttggaggaggaggaggaggaggcgagggcgagctagcccagcggggtcccggccgccccgcgggccaaagtcgagccctcccgcccgtgggcgagcgcgccagccgccccttccagaacagccgccgccacaaagaagaacggggggtgccgaggtccccatgacctcctaaagtggtgcggtccctgctgagtgcgctgcccgggccgtgacccgcgcccctgtgcgtccccgcgcgcctccgagcgcccctgtgcgccccggcccgcgccccgccggcatggacgtccatacccgctggaaagcgcgcagcgcgctccgcccgggcgccccgctgctgcccccgctgctgctgctgctgctgtgggcgccgcctccgagccgcgcagctcagccagcagatctcctgaaggttctagattttcacaacttgcctgatggaataacaaagacaacaggcttttgcgccacgcggcgatcttccaaaggcccggatgtcgcttacagagtcaccaaagacgcgcagctcagcgcacccaccaagcagctgtaccctgcgtctgcatttcccgaggacttctccatcctaacaactgtgaaagccaagaaaggcagccaggccttcctggtctccatctacaacgagcagggtatccagcagattgggctggagctgggccgctctcccgtcttcctctacgaggaccacacggggaagcctggcccggaagactaccccctcttccggggcatcaacctgtcagatggcaagtggcacagaattgctctcagcgtccacaagaaaaatgtcaccttgatcctcgactgtaaaaagaagaccaccaaattcctcgaccgcagcgaccaccccatgatcgacatcaatggcatcatcgtgtttggcacccggatcctggatgaggaggtgtttgagggtgacatccagcagctgctctttgtctcggaccaccgggcagcttatgattactgtgagcactacagccctgactgtgacaccgcagtacctgacaccccacagtcgcaggaccccaatccagatgaatattacacggaaggagacggcgagggtgagacctattactacgaatacccctactacgaagaccccgaagacctagggaaggagcccacccccagcaagaagcccgtggaagctgccaaagaaaccacagaggtccccgaggagctgaccccgacccccacggaagctgctcccatgcctgaaaccagtgaaggggctgggaaggaagaggacgtcggcatcggggactatgactacgtgcccagtgaggactactacacgccctcaccgtatgatgacctcacctatggcgagggggaggagaaccccgaccagcccacagacccaggcgctggggccgaaattcccaccagcaccgccgacacctccaactcctccaatccagctccgcctccaggggaaggtgcggatgacttggagggggagttcactgaggaaacgatccggaaccttgacgagaactactacgacccctactacgaccccaccagctccccgtcggagatcgggccgggaatgccggcgaaccaggataccatctatgaagggattggaggacctcggggcgagaaaggccaaaagggagaaccagcgattatcgagccgggcatgctcatcgagggcccgcctggcccagaaggccccgcgggtcttcccggacctccaggaaccatgggtcccactggccaagtcggggaccctggagaaaggggcccccctggacgcccaggccttcctggggccgatggcctgcccggtcctccaggaaccatgctcatgctgcccttccggtttggaggtggcggcgatgcgggctccaaaggccccatggtctcagcccaggagtcccaggcgcaagccattctccagcaggccaggttggcactgaggggaccagctggcccgatgggtctcacagggagacctggccctgtgggtccccctgggagcggaggtttgaagggcgagccgggagacgtggggcctcagggtcctcgaggtgtgcaaggcccgcctggtccggccgggaagcccggaagacggggtcgggctgggagtgatggagccagaggaatgcctggacaaactggccccaagggtgaccggggtttcgacggcctggctgggttgccaggcgagaagggccacaggggtgaccctggtccttccggcccaccaggacctccgggagacgatggagaaaggggtgacgacggagaagttgggcccagggggctgcctggggagcccgggccacgtggtctgcttgggccgaaggggcccccaggtcctcccggacctcccggtgtcacgggtatggacggccagccggggccaaaaggaaatgtgggtccccagggagagcctggccccccaggacagcagggtaatccaggcgcccagggtcttccaggcccccagggtgcaattggtcctccaggagaaaagggtcccttggggaaaccaggccttccaggaatgcccggtgctgacggacccccgggacaccctggcaaagaaggccctccaggagagaaaggaggtcagggtccacctggcccccagggtccgattggctacccaggtcctcgaggagtcaagggggccgatggcatccgtggtctgaagggcacaaagggcgagaagggtgaagacggctttcctgggtttaaaggagacatgggcatcaagggtgatcggggggagatcggcccacccggtcccaggggagaagatggccctgaaggcccaaagggtcgcggaggtcccaatggtgaccccggtcctctgggaccccctggggagaagggaaaactcggagtcccagggttaccagggtatccaggaagacaaggaccaaagggctctattggattccctggatttcctggcgccaatggagagaagggcggcagggggacccctggaaagccaggaccgcgggggcagcgaggcccaacgggtccgaggggtgaaagaggcccccggggcatcactgggaagcctggccccaagggcaactccggaggtgacggcccagctggccctcctggtgaacggggacccaatggaccccaaggacccacaggatttcctggaccaaagggcccccctggccctccaggcaaggatggactcccaggacaccctggacagagaggcgagactggtttccaaggcaagaccggccctccaggcccccccggcgtggtcggccctcagggtcccacgggagaaacgggcccaatgggtgagcgtggccaccctgggccccctggaccccccggtgaacaggggcttccgggccttgctggaaaagaagggacgaagggtgacccaggccctgcaggcctccctgggaaagatggccctccaggattacgtggtttccctggggaccgagggcttcctggtccagtgggagctcttggactgaaaggcaatgaagggccccctggcccaccaggccctgcgggatctccaggggagagaggtccagctggagccgctgggcccatcggaattccagggagacctgggccccagggacccccagggccggcaggagagaaaggggctcctggcgagaaaggcccacaaggcccagctggccgagacggtctccaggggcctgtggggctcccgggtccagctggccctgtgggtccccctggagaagacggagataagggagagatcggggagccggggcagaaaggaagcaagggggacaaaggagaacagggtcctcctgggcctacaggtcctcaaggccccatcggacagccaggcccctctggagctgacggcgagccggggcctcggggccagcagggccttttcgggcagaaaggtgatgaaggtcccagaggctttcctggaccccctgggccagtggggctgcagggtttgccaggacctccaggcgagaagggtgagacaggagacgtgggccagatgggccccccgggtccccctggcccccgaggaccctccggagctccaggtgctgatggcccacaaggtcccccaggtggaataggaaaccctggtgcagtgggagagaagggcgagcctggcgaagcaggtgagcctggccttccgggagaaggcggccccccgggacccaaaggagaaaggggagagaagggcgagtcaggcccttcaggtgctgccggaccccctggacccaaaggccctcccggagatgatggtcccaaaggcagccctggcccagtgggttttcctggagatcctggcccccccggagagcctggccccgcgggtcaagatggtccccctggtgacaaaggagatgatggtgaacccgggcagacgggatcccccggccctactggtgaaccaggtccatcggggcctccaggaaaaaggggtcccccaggccccgcaggccccgaaggcagacagggagagaaaggggccaagggagaagccggcttggaaggccctcctgggaagactggccccatcggcccccagggggcccctgggaagcccggaccggatggccttcgagggatccctggccctgtgggagaacaaggtctcccaggatccccaggcccggacggtccccccggccccatgggtcccccaggacttcccggcctcaaaggagattctggtcccaaaggtgaaaagggtcatccaggcctgatcgggctcatcggtcctccgggtgaacagggtgagaagggcgaccgtggtctccctggcccccagggctcctccggtcctaagggagaacagggtatcactggtccttctggcccgattgggcctcctgggccccctggcctgccgggtccgcctggtccaaaaggtgctaagggctcctcgggtccaactggcccgaagggtgaggcaggccacccaggacccccaggccccccgggccccccgggagaggtcatccagcccctgccaatccaggcatccaggacgcggcggaacatcgacgccagccagctgctggacgacgggaatggcgagaactacgtggactacgcggacggcatggaagagatcttcggctctctcaactctctgaagctggagattgagcagatgaaacggcccctgggcacgcagcagaaccccgcccgcacctgcaaggacctgcagctctgccaccccgacttcccagatggtgaatactgggtcgatcctaaccaaggatgctccagggattccttcaaggtttactgcaacttcacagccggggggtcgacatgcgtcttccctgacaagaagtccgaaggggccagaatcacttcttggcccaaagaaaacccgggctcctggttcagtgaattcaagcgtgggaaactgctctcctatgtggacgccgagggcaaccctgtgggtgtggtacagatgaccttcctgcggctgctgagcgcctctgcccaccagaacgtcacctaccactgctaccagtcagtggcctggcaggacgcagccacgggcagctacgacaaggccctccgcttcctgggctccaacgacgaggagatgtcctatgacaacaacccctacatccgcgccctggtggacggctgtgctaccaagaaaggctaccagaagacggttctggagatcgacacccccaaagtggagcaggtgcccatcgtggacatcatgttcaatgacttcggtgaagcgtcacagaaatttggatttgaagtggggccggcttgcttcatgggctaggagccgccgagcccgggctcccgagagcaacctcgtgacctcagcatgccattcgttcgtgagtgtcccgtgcacgtcctgaccctggacagtgaaggcttctccctcccctcccacctgacttcatctacgcctcggcaccacggggtgtgggaccccagcccggagagaacagagggaaggagccgcgcccccacctggagctgaatcacatgacctagctgcaccccagcgcctgggcccgccccacgctctgtccacacccacgcgccccgggagcggggccatgcctccagccccccagctcgcccgacccatcctgttcgtgaataggtctcaggggttgggggagggactgccagatttggacactatatttttttctaaattcaacttgaagatgtgtatttcccctgaccttcaaaaaatgttccaaggtaagcctcgtaaaggtcatcccaccatcaccaaagcctccgtttttaacaacctccaacacgatccatttagaggccaaatgtcattctgcaggtgccttcccgatggattaaaggtgcttatgtttttgtgagttttaagtaaatatttgtattgtattgttataaatgttaagtgtgcctggctttcaatcatgcacggaaacccagtctcagtcccacggacagaatgggcgaggcatggattctgggttgcagtaccgttctgattagaaataggaagtctccccacccccgccctggccaagaacgtgcaataaattggaagtttgccccggggcagcaagaatttatgctgccattgaaaagcaggtaccagtgccccttttcagacagtttttgattcgctctagactttttttttttttaatagggaaaaaatttgataattttcttttttctacatgcacttaagactaaaacacaggtttggattaattttatttgcttcctttttccgcttttcttcccgcagagcctgatgggagaatgtccagggcagggaaaccacattttttgtaggtgataactcaatgaaaattggtgcttattttttacacttctctcttgtggctctcttgtggtgctatctatctgttttaaggtctccttgaaggcgcactggggaccctggccatgcctcgttctccctgctttctttatcctgttattgcctccacagtctgttgccaaggactctaagatcaatgcacgtcactttcctttccactgggcaggatagccaagcacactccctcctgcgctctcccgccccggtgcgtccactcccgagggctgttatgaggactgggttgtgcctacttgatttgaaaacacacacaagcaataaaaagcctcttcctgcattgtctgtggtgtgaccatagcagattatatttggttcctgaatgtttgtggtgctaatttctgtgtttgttccaagccgttcagtcatgccatgcgctgcctcggtagatggagtaatgtacaatgaactccatgagtctctccagggctgcctgcagcacgtcttttccaagtagcctatttggattcccatctcaaatgtcctggatgcgagcgtcagcggctccagagctcggggcgggtgaggtcccctttggggaaccctttcctggccatcgaggtcggggggctgccgtctgtgggcaggaggacccgaggggcagccaggaaaggcgatctcttcactgtgaaaagttgcccgggtgcagcgccttttccttctaccatgggaaatgcaggctgggcccttggggtgagcctgcggggctctggtgctgtccccgacccccaccaccaccagaatgcagttccagcttaggaagccacaaacaagccacccaggaggaacaaaacaccgccagcgtggattttccaaatttccctggaaagtaagtctcgctcttgccaaagaaaagtctggcttggagagtctctggagcccaggatgccagcatgtgccaatgactgtcaccttcatctcttcaaaagaaaagccatagccgaggactgtcccgcgacccccgtggactgcgtctaggtcatgtgattctgttttcatttctcatcccatccaatttgtccttttctcctgtcattttcttcctctgtggtcccttcaaagttgttataatttgtactgaacttcaaaatgtgtcccgttctccccagaccactctagccacagtatattgcaataaaattacttcttatatttgcagaaattcttttggtgtaattttattttttcctctcaatatatataattggacaaacgctggcaaaaagaaaaaaatggtaagcaaaaaacccaagataaagtttcgaggacatcaggccttttgaaatacaatgtcaaatgacacattgtacggtttcaaaaaatccgctagacatgtcataagttttaactgtaatgcccaggaaaggatatcttaaaatattctaaacttgtgtaacaaaggaataattaactgtaatagtttttcaataaatcgagttgggtgtttccaccgtaaa

SEQ ID NO: 4655 - DNA, 1830 bp, Homo sapiens
  source 1..1830: mol_type = unassigned DNA
actcactcatctccaaagcaaagaccccactatccggcaggtcttagggagcagggagaccctgggggtgggggtgagcttccagagaaggggtttcccatgggtttggccatgagattctgctgttgttgatgttcttattatgggaaggctcagacacagcgcagcaaaggtcgtgttctgcctggggccacagggaccagcccacagccaaccccgttccagccagaggccagcccacgcccccgcacccggtgattttgaagccagtccctgacatcagctgcgttcttcgctcagccagcagatctcctgaaggttctagattttcacaacttgcctgatggaataacaaagacaacaggcttttgcgccacgcggcgatcttccaaaggcccggatgtcgcttacagagtcaccaaagacgcgcagctcagcgcacccaccaagcagctgtaccctggcccggagcgggaagcagcattagctctaagatacagcatccaagttgtccctgtcacccagtcgtggggcggcacctgccacagttaattaaaccctctgggcttatctggacgtgattaacgagctgttgatggagaacctcatcgccttgacccagccacttgctcatggcctggactaaaatgagctcctctttctgattcagatgagaaagggacgggggatgtagggcagcgtctgcatttcccgaggacttctccatcctaacaactgtgaaagccaagaaaggcagccaggccttcctggtctccatctacaacgagcagggtatccagcagattgggctggagctgggccgctctcccgtcttcctctacgaggaccacacggggaagcctggcccggaagactaccccctcttccggggcatcaacctgtcagatggcaagtggcacagaattgctctcagcgtccacaagaaaaatgtcaccttgatcctcgactgtaaaaagaagaccaccaaattcctcgaccgcagcgaccaccccatgatcgacatcaatggcatcatcgtgtttggcacccggatcctggatgaggaggtgtttgaggtcctcggtccaagacccgcatctacccagccctgctgtctccttagcatccactggtgctttctgtaggatccacctccgctgtctcaggccacctgtgtggcagcccagaccccaccctggcagtgctgaggcagcccctggcagcggaacaccagcaggtgaagggcagaggccccttgtcgtgtcttcagctctgcctgctttgctgagacctcctcttgcccctggaagggacaaggacattgcactctgcatgatctcctgggactgctgcaaccaactgtcacagcccggtggcaaacagcagagatttatcctctcccagctctgggccagaattccaagatcgaggtgtgggcggggccgtgctccctctgaagcttccagcgggggactctgcctgccgcttccagccccgggtggccccagacactccttggcttgtggccacgtcgccccagcttctgcctccgtctttacacagcctctctcttccccctgtgtctctctgtgtgacccacaaggacatttgtcgttggatttagggcccatcctaatctaggatgttcccatttccagatccttcattccatctgcagtgatcttatttctggacaaggtcacctgtggatctagattctgggagttccgacctggacccatccctcggggccatgattcagccacttccctacaccagcgtggaaaaggggtttttcgtctcttaaattgccacagagcacgtgtgctt

SEQ ID NO: 4656 - DNA, 670 bp, Homo sapiens
  source 1..670: mol_type = unassigned DNA
acgaccccaccagctccccgtcggagatcgggccgggaatgccggcgaaccaggataccatctatgaagggattggaggacctcggggcgagaaaggccaaaagggagaaccagcgattatcgagccggtgaggacattttctcattccctccctgcgccggggtgtccgctgctcggggtcacagcggggtgtgtagggtgtgaacaggtccgtgggcccctgcacctgcgcgcactgggtcacttcgagcaaccacctggtctcgtggagtccacgcaccacttgtccccaggacttgtgaagaatccccttgggtaggggatgttctggactgtgatggagggggcgggataggtgctgatcaaagccggtcctgcacccaagctctgggcatctcagtgctggtcagtttcacctgggatgaaaagcagctcagagctatcgaggcggaggcggagtcccctttgaggggtggaggagaggatgtaaatggcccattccgtgtaaaagatgcgcgcggcagtggtagggaatagttaacacgtggtcgtacctctctgcgtctgttatgcaaccgtttggagtaagtttacagaagctgttgaaacatggaatactgtttatgaaactttatcaagggaatgaaataaaacagcactgtgctgaaa

SEQ ID NO: 4657 - DNA, 533 bp, Homo sapiens
  source 1..533: mol_type = unassigned DNA
agtgtggattaattgaagcgatgcaccagaagttcatggtccaggggcgggctcagagtcggccctcagtggccctggctgaaatccattaggactgtggggacggtcaccctcaccaactcccacttcctgccagcggatccctctcttgggtaatgagctggtggggggatgttcccaggttggagccacgtttgacctgagatcttctgtattctctagggcgagaaaggcccacaaggcccagctggccgagacggtctccaggggcctgtggggctcccgggtccagctggccctgtgggtccccctggagaagacggagataagggagagatcggggagccggggcagaaaggaagcaagggggacaaaggagaacaggtaagtattggcacgggggcgcgcggcagcccccaggtcccggggggcctcgtcgcaggctgtaggccgtgtgccatgcacgttctcttccaacgttgctgatgactagcgggacatgctgtgaaaatctcccgtgcatgtgtgttccc

SEQ ID NO: 4658 - DNA, 913 bp, Homo sapiens
  source 1..913: mol_type = unassigned DNA
ctgggcaggacatggagcacggtggggctggagctgagacccggcttgctgacgttctgccctcctctctctgcagggtccgcctggtccaaaaggtgctaagggctcctcgggtccaactggcccgaagggtgaggcaggccacccaggacccccaggccccccgggccccccgggagaggtcatccagcccctgccaatccaggcatccaggacgcggcggaacatcgacgccagccagctgctggacgacgggaatggcgagaactacgtggactacgcggacggcatggaagagatcttcggctctctcaactctctgaagctggagattgagcagatgaaacggcccctgggcacgcagcagaaccccgcccgcacctgcaaggacctgcagctctgccaccccgacttcccagatggtgaatactgggtcgatcctaaccaaggatgctccagggattccttcaaggtttactgcaacttcacagccggggggtcgacatgcgtcttccctgacaagaagtccgaaggggccagaatcacttcttggcccaaagaaaacccgggctcctggttcagtgaattcaagcgtgggaaactggtaaggtggcctctggcgtctttgcggttgtcactttaaacccgcccatctcgtatcttacagagtaaaatggcccgctggcccaaagagcagccttccacctggtatagtcagtacaagcgggggtccctggtaagtggccacctcggcccggccacctcggcactgcctgcttgcggcacggctggctcgcggctctgcatggcacccatcgctgccatgtgtgccacaccgctcttgccaaaccgctccacatcacgtgacagcaagactcagctaggtgtggagtcctctccccagcccccgcca

SEQ ID NO: 4659 - DNA, 628 bp, Homo sapiens
  source 1..628: mol_type = unassigned DNA
caggacgcggcggaacatcgacgccagccagctgctggacgacgggaatggcgagaactacgtggactacgcggacggcatggaagagatcttcggctctctcaactctctgaagctggagattgagcagatgaaacggcccctgggcacgcagcagaaccccgcccgcacctgcaaggacctgcagctctgccaccccgacttcccagatggtgaatactgggtcgatcctaaccaaggatgctccagggattccttcaaggtttactgcaacttcacagccggggggtcgacatgcgtcttccctgacaagaagtccgaagggagtaaaatggcccgctggcccaaagagcagccttccacctggtatagtcagtacaagcgggggtccctgctctcctatgtggacgccgagggcaaccctgtgggtgtggtacagatgaccttcctgcggctgctgagcgcctctgcccaccagaacgtcacctaccactgctaccagtcagtggcctggcaggacgcagccacgggcagctacgacaaggccctccgcttcctgggctccaacgacgaggagatgtcctatgacaacaacccctacatccgcgccctggtggacggctgtgct

SEQ ID NO: 4660 - DNA, 583 bp, Homo sapiens
  source 1..583: mol_type = unassigned DNA
catggaagagatcttcggctctctcaactctctgaagctggagattgagcagatgaaacggcccctgggcacgcagcagaaccccgcccgcacctgcaaggacctgcagctctgccaccccgacttcccagatggtgaatactgggtcgatcctaaccaaggatgctccagggattccttcaaggtttactgcaacttcacagccggggggtcgacatgcgtcttccctgacaagaagtccgaaggggccagaatcacttcttggcccaaagaaaacccgggctcctggttcagtgaattcaagcgtgggaaactggtaaggtggcctctggcgtctttgcggttgtcactttaaacccgcccatctcgtatcttacagagtaaaatggcccgctggcccaaagagcagccttccacctggtatagtcagtacaagcgggggtccctggtttgcccgtaaggttctcgtggctgcgtctgaaagcgtggagttcgccgatagccctgggactgcagcgtgttccctcgcccctgggaaggcccaggccccaggccagctgctcactttgggctttttctagtg

SEQ ID NO: 4661 - DNA, 8437 bp, Homo sapiens
  source 1..8437: mol_type = unassigned DNA
ccgcactctccgtccccgcggctggcgcaggacctcactcgagcggagcgcccacggggagcgggtcgcggggcggcggcggcgaggaggaggcgagaaggagttggaggaggaggaggaggaggcgagggcgagctagcccagcggggtcccggccgccccgcgggccaaagtcgagccctcccgcccgtgggcgagcgcgccagccgccccttccagaacagccgccgccacaaagaagaacggggggtgccgaggtccccatgacctcctaaagtggtgcggtccctgctgagtgcgctgcccgggccgtgacccgcgcccctgtgcgtccccgcgcgcctccgagcgcccctgtgcgccccggcccgcgccccgccggcatggacgtccatacccgctggaaagcgcgcagcgcgctccgcccgggcgccccgctgctgcccccgctgctgctgctgctgctgtgggcgccgcctccgagccgcgcagctcagccagcagatctcctgaaggttctagattttcacaacttgcctgatggaataacaaagacaacaggcttttgcgccacgcggcgatcttccaaaggcccggatgtcgcttacagagtcaccaaagacgcgcagctcagcgcacccaccaagcagctgtaccctgcgtctgcatttcccgaggacttctccatcctaacaactgtgaaagccaagaaaggcagccaggccttcctggtctccatctacaacgagcagggtatccagcagattgggctggagctgggccgctctcccgtcttcctctacgaggaccacacggggaagcctggcccggaagactaccccctcttccggggcatcaacctgtcagatggcaagtggcacagaattgctctcagcgtccacaagaaaaatgtcaccttgatcctcgactgtaaaaagaagaccaccaaattcctcgaccgcagcgaccaccccatgatcgacatcaatggcatcatcgtgtttggcacccggatcctggatgaggaggtgtttgagggtgacatccagcagctgctctttgtctcggaccaccgggcagcttatgattactgtgagcactacagccctgactgtgacaccgcagtacctgacaccccacagtcgcaggaccccaatccagatgaatattacacggaaggagacggcgagggtgagacctattactacgaatacccctactacgaagaccccgaagacctagggaaggagcccacccccagcaagaagcccgtggaagctgccaaagaaaccacagaggtccccgaggagctgaccccgacccccacggaagctgctcccatgcctgaaaccagtgaaggggctgggaaggaagaggacgtcggcatcggggactatgactacgtgcccagtgaggactactacacgccctcaccgtatgatgacctcacctatggcgagggggaggagaaccccgaccagcccacagacccaggcgctggggccgaaattcccaccagcaccgccgacacctccaactcctccaatccagctccgcctccaggggaaggtgcggatgacttggagggggagttcactgaggaaacgatccggaaccttgacgagaactactacgacccctactacgaccccaccagctccccgtcggagatcgggccgggaatgccggcgaaccaggataccatctatgaagggattggaggacctcggggcgagaaaggccaaaagggagaaccagcgattatcgagccgggcatgctcatcgagggcccgcctggcccagaaggccccgcgggtcttcccggacctccaggaaccatgggtcccactggccaagtcggggaccctggagaaaggggcccccctggacgcccaggccttcctggggccgatggcctgcccggtcctccaggaaccatgctcatgctgcccttccggtttggaggtggcggcgatgcgggctccaaaggccccatggtctcagcccaggagtcccaggcgcaagccattctccagcaggccaggttggcactgaggggaccagctggcccgatgggtctcacagggagacctggccctgtgggtccccctgggagcggaggtttgaagggcgagccgggagacgtggggcctcagggtcctcgaggtgtgcaaggcccgcctggtccggccgggaagcccggaagacggggtcgggctgggagtgatggagccagaggaatgcctggacaaactggccccaagggtgaccggggtttcgacggcctggctgggttgccaggcgagaagggccacaggggtgaccctggtccttccggcccaccaggacctccgggagacgatggagaaaggggtgacgacggagaagttgggcccagggggctgcctggggagcccgggccacgtggtctgcttgggccgaaggggcccccaggtcctcccggacctcccggtgtcacgggtatggacggccagccggggccaaaaggaaatgtgggtccccagggagagcctggccccccaggacagcagggtaatccaggcgcccagggtcttccaggcccccagggtgcaattggtcctccaggagaaaagggtcccttggggaaaccaggccttccaggaatgcccggtgctgacggacccccgggacaccctggcaaagaaggccctccaggagagaaaggaggtcagggtccacctggcccccagggtccgattggctacccaggtcctcgaggagtcaagggggccgatggcatccgtggtctgaagggcacaaagggcgagaagggtgaagacggctttcctgggtttaaaggagacatgggcatcaagggtgatcggggggagatcggcccacccggtcccaggggagaagatggccctgaaggcccaaagggtcgcggaggtcccaatggtgaccccggtcctctgggaccccctggggagaagggaaaactcggagtcccagggttaccagggtatccaggaagacaaggaccaaagggctctattggattccctggatttcctggcgccaatggagagaagggcggcagggggacccctggaaagccaggaccgcgggggcagcgaggcccaacgggtccgaggggtgaaagaggcccccggggcatcactgggaagcctggccccaagggcaactccggaggtgacggcccagctggccctcctggtgaacggggacccaatggaccccaaggacccacaggatttcctggaccaaagggcccccctggccctccaggcaaggatggactcccaggacaccctggacagagaggcgagactggtttccaaggcaagaccggccctccaggcccccccggcgtggtcggccctcagggtcccacgggagaaacgggcccaatgggtgagcgtggccaccctgggccccctggaccccccggtgaacaggggcttccgggccttgctggaaaagaagggacgaagggtgacccaggccctgcaggcctccctgggaaagatggccctccaggattacgtggtttccctggggaccgagggcttcctggtccagtgggagctcttggactgaaaggcaatgaagggccccctggcccaccaggccctgcgggatctccaggggagagaggtccagctggagccgctgggcccatcggaattccagggagacctgggccccagggacccccagggccggcaggagagaaaggggctcctggcgagaaaggcccacaaggcccagctggccgagacggtctccaggggcctgtggggctcccgggtccagctggccctgtgggtccccctggagaagacggagataagggagagatcggggagccggggcagaaaggaagcaagggggacaaaggagaacagggtcctcctgggcctacaggtcctcaaggccccatcggacagccaggcccctctggagctgacggcgagccggggcctcggggccagcagggccttttcgggcagaaaggtgatgaaggtcccagaggctttcctggaccccctgggccagtggggctgcagggtttgccaggacctccaggcgagaagggtgagacaggagacgtgggccagatgggccccccgggtccccctggcccccgaggaccctccggagctccaggtgctgatggcccacaaggtcccccaggtggaataggaaaccctggtgcagtgggagagaagggcgagcctggcgaagcaggtgagcctggccttccgggagaaggcggccccccgggacccaaaggagaaaggggagagaagggcgagtcaggcccttcaggtgctgccggaccccctggacccaaaggccctcccggagatgatggtcccaaaggcagccctggcccagtgggttttcctggagatcctggcccccccggagagcctggccccgcgggtcaagatggtccccctggtgacaaaggagatgatggtgaacccgggcagacgggatcccccggccctactggtgaaccaggtccatcggggcctccaggaaaaaggggtcccccaggccccgcaggccccgaaggcagacagggagagaaaggggccaagggagaagccggcttggaaggccctcctgggaagactggccccatcggcccccagggggcccctgggaagcccggaccggatggccttcgagggatccctggccctgtgggagaacaaggtctcccaggatccccaggcccggacggtccccccggccccatgggtcccccaggacttcccggcctcaaaggagattctggtcccaaaggtgaaaagggtcatccaggcctgatcgggctcatcggtcctccgggtgaacagggtgagaagggcgaccgtggtctccctggcccccagggctcctccggtcctaagggagaacagggtatcactggtccttctggcccgattgggcctcctgggccccctggcctgccgggtccgcctggtccaaaaggtgctaagggctcctcgggtccaactggcccgaagggtgaggcaggccacccaggacccccaggccccccgggccccccgggagaggtcatccagcccctgccaatccaggcatccaggacgcggcggaacatcgacgccagccagctgctggacgacgggaatggcgagaactacgtggactacgcggacggcatggaagagatcttcggctctctcaactctctgaagctggagattgagcagatgaaacggcccctgggcacgcagcagaaccccgcccgcacctgcaaggacctgcagctctgccaccccgacttcccagatggtgaatactgggtcgatcctaaccaaggatgctccagggattccttcaaggtttactgcaacttcacagccggggggtcgacatgcgtcttccctgacaagaagtccgaagggagtaaaatggcccgctggcccaaagagcagccttccacctggtatagtcagtacaagcgggggtccctgctctcctatgtggacgccgagggcaaccctgtgggtgtggtacagatgaccttcctgcggctgctgagcgcctctgcccaccagaacgtcacctaccactgctaccagtcagtggcctggcaggacgcagccacgggcagctacgacaaggccctccgcttcctgggctccaacgacgaggagatgtcctatgacaacaacccctacatccgcgccctggtggacggctgtgctaccaagaaaggctaccagaagacggttctggagatcgacacccccaaagtggagcaggtgcccatcgtggacatcatgttcaatgacttcggtgaagcgtcacagaaatttggatttgaagtggggccggcttgcttcatgggctaggagccgccgagcccgggctcccgagagcaacctcgtgacctcagcatgccattcgttcgtgagtgtcccgtgcacgtcctgaccctggacagtgaaggcttctccctcccctcccacctgacttcatctacgcctcggcaccacggggtgtgggaccccagcccggagagaacagagggaaggagccgcgcccccacctggagctgaatcacatgacctagctgcaccccagcgcctgggcccgccccacgctctgtccacacccacgcgccccgggagcggggccatgcctccagccccccagctcgcccgacccatcctgttcgtgaataggtctcaggggttgggggagggactgccagatttggacactatatttttttctaaattcaacttgaagatgtgtatttcccctgaccttcaaaaaatgttccaaggtaagcctcgtaaaggtcatcccaccatcaccaaagcctccgtttttaacaacctccaacacgatccatttagaggccaaatgtcattctgcaggtgccttcccgatggattaaaggtgcttatgtttttgtgagttttaagtaaatatttgtattgtattgttataaatgttaagtgtgcctggctttcaatcatgcacggaaacccagtctcagtcccacggacagaatgggcgaggcatggattctgggttgcagtaccgttctgattagaaataggaagtctccccacccccgccctggccaagaacgtgcaataaattggaagtttgccccggggcagcaagaatttatgctgccattgaaaagcaggtaccagtgccccttttcagacagtttttgattcgctctagactttttttttttttaatagggaaaaaatttgataattttcttttttctacatgcacttaagactaaaacacaggtttggattaattttatttgcttcctttttccgcttttcttcccgcagagcctgatgggagaatgtccagggcagggaaaccacattttttgtaggtgataactcaatgaaaattggtgcttattttttacacttctctcttgtggctctcttgtggtgctatctatctgttttaaggtctccttgaaggcgcactggggaccctggccatgcctcgttctccctgctttctttatcctgttattgcctccacagtctgttgccaaggactctaagatcaatgcacgtcactttcctttccactgggcaggatagccaagcacactccctcctgcgctctcccgccccggtgcgtccactcccgagggctgttatgaggactgggttgtgcctacttgatttgaaaacacacacaagcaataaaaagcctcttcctgcattgtctgtggtgtgaccatagcagattatatttggttcctgaatgtttgtggtgctaatttctgtgtttgttccaagccgttcagtcatgccatgcgctgcctcggtagatggagtaatgtacaatgaactccatgagtctctccagggctgcctgcagcacgtcttttccaagtagcctatttggattcccatctcaaatgtcctggatgcgagcgtcagcggctccagagctcggggcgggtgaggtcccctttggggaaccctttcctggccatcgaggtcggggggctgccgtctgtgggcaggaggacccgaggggcagccaggaaaggcgatctcttcactgtgaaaagttgcccgggtgcagcgccttttccttctaccatgggaaatgcaggctgggcccttggggtgagcctgcggggctctggtgctgtccccgacccccaccaccaccagaatgcagttccagcttaggaagccacaaacaagccacccaggaggaacaaaacaccgccagcgtggattttccaaatttccctggaaagtaagtctcgctcttgccaaagaaaagtctggcttggagagtctctggagcccaggatgccagcatgtgccaatgactgtcaccttcatctcttcaaaagaaaagccatagccgaggactgtcccgcgacccccgtggactgcgtctaggtcatgtgattctgttttcatttctcatcccatccaatttgtccttttctcctgtcattttcttcctctgtggtcccttcaaagttgttataatttgtactgaacttcaaaatgtgtcccgttctccccagaccactctagccacagtatattgcaataaaattacttcttatatttgcagaaattcttttggtgtaattttattttttcctctcaatatatataattggacaaacgctggcaaaaagaaaaaaatggtaagcaaaaaacccaagataaagtttcgaggacatcaggccttttgaaatacaatgtcaaatgacacattgtacggtttcaaaaaatccgctagacatgtcataagttttaactgtaatgcccaggaaaggatatcttaaaatattctaaacttgtgtaacaaaggaataattaactgtaatagtttttcaataaatcgagttgggtgtttccaccgt

SEQ ID NO: 4662 - DNA, 6174 bp, Homo sapiens
  source 1..6174: mol_type = unassigned DNA; mol_type = unassigned DNA
gcgagtgactgcaccgagcccgagaagtcgccgcgccccgcagccgccccgactggttccccgccttgcccgtgggccccgccgggatggggaaccgccgggacctgggccagccgcgggccggtctctgcctgctcctggccgcgctgcagcttctgccggggacgcaggccgatcctgtggatgtcctgaaggccctgggtgtgcagggaggccaggctggggtccccgaggggcctggcttctgtccccagaggactccagagggtgaccgggcattcagaattggccaggccagcacgctcggcatccccacgtgggaactctttccagaaggccactttcctgagaacttctccttgctgatcaccttgcggggacagccagccaatcagtctgtcctgctgtccatttatgatgaaaggggtgcccggcagttgggcctggcactggggccagcgctgggtctcctaggtgaccccttccgccccctcccccagcaggtcaacctcacagatggcaggtggcaccgtgtggccgtcagcatagatggtgagatggtgaccctggtagctgactgtgaagctcagccccctgttttgggccatggcccccgcttcatcagcatagctggactcactgtgctggggacccaggaccttggggaaaagactttcgagggagacattcaggagctgctgataagcccagatcctcaggctgccttccaggcttgtgagcggtacctccccgactgtgacaacctggcaccggcagccacagtggctccccagggtgaaccagaaacccctcgtcctcggcggaaggggaagggaaaagggaggaagaaagggcgaggtcgcaaggggaagggcaggaaaaagaacaaggaaatttggacctcaagtccacctcctgactccgcagagaaccagacctccactgacatccccaagacagagactccagctccaaatctgcctccgacccccacgcctttggtcgtcacctccactgtgactactggactcaatgccacgatcctagagaggagcttggaccctgacagtggaaccgagctggggaccctggagaccaaggcagccagggaggatgaagaaggagatgattccaccatgggccctgacttccgggcagcagaatatccatctcggactcagttccagatctttcctggtgctggagagaaaggagcaaaaggagagcccgcagtgattgaaaaggggcagcagtttgagggacctccaggagccccaggaccccaaggggtggttggcccctcaggccctcccggccccccaggattccctggcgaccctggtccaccgggccctgctggcctcccaggaatccccggcattgatgggatccgaggcccaccgggcactgtgatcatgatgccgttccagtttgcaggcggctcctttaaaggccccccagtctcattccagcaggcccaggctcaggcagttctgcagcagactcagctctctatgaaaggcccccctggtccagtggggctcactgggcgcccaggccctgtgggtctccccgggcatccaggtctgaaaggagaggagggagcagaagggccacagggtccccgaggcctgcagggacctcatggaccccctggccgagtgggcaagatgggccgccctggagcagatggagctcggggcctcccaggggacactggacctaagggtgatcgtggcttcgatggcctccctgggctgcctggtgagaagggccaaaggggtgactttggccatgtggggcaacccggtcccccaggagaggatggtgagaggggagcagagggacctccagggcccactggccaggctggggagccgggtccacgaggactgcttggccccagaggctctcctggccccacgggtcgcccgggtgtgactggaattgatggtgctcctggtgccaaaggcaatgtgggtcctccaggagaaccaggccctccgggacagcagggaaaccatgggtcccagggactccccggtccccagggactcattggcactcctggggagaagggtccccctggaaacccaggaattccaggcctcccaggatccgatggccctctgggtcacccaggacatgagggccccacgggagagaaaggggctcagggtccaccagggtcggcaggccctccgggctatcctggacctcggggagtgaagggcacttcaggcaaccggggcctccagggggagaaaggcgagaagggagaggacggcttcccaggcttcaagggcgatgtggggctcaaaggtgatcaggggaaacccggagctccaggtccccggggagaggatggtcctgaggggccgaaggggcaggcggggcaggctggcgaggaggggcccccaggctcagctggggagaagggcaagcttggggtgccaggcctcccaggttatccaggacgccctggacctaagggatctattggatttcccggtcccctgggacccataggagagaaagggaagtcgggaaagacagggcagccaggcctggaaggagagcggggaccaccaggttcccgtggagagagggggcaaccgggtgccacagggcaaccaggccccaagggcgatgtgggccaggatggagcccctgggatccctggagaaaagggcctccctggtctgcaaggccctccaggattccctgggccaaagggcccccctggtcaccaaggtaaagatgggcgaccagggcaccctggacagagaggagaactgggcttccaaggtcagacaggcccgcctggaccagctggtgtcttaggccctcagggaaagacaggagaagtgggacctctaggtgaaagggggcctccaggcccccctggacctcctggtgaacaaggtcttcctggcctggaaggcagagagggggccaagggggaactgggaccaccaggaccccttgggaaagaagggccagctggactcaggggctttcccggccccaaagggggccctggggacccgggacctactggcttaaagggtgataagggccccccagggcccgtgggggccaatggctcccctggtgagcgcggtcctttgggcccagcaggaggcattggacttcctggccaaagtggcagcgaaggccccgttggccctgcaggcaagaaggggtcccggggagaacgtggcccccctggccccactggcaaagatgggatcccagggcccctggggcctctgggaccccctggagctgctgggccttctggcgaggaaggggacaagggggatgtgggtgcccccggacacaaggggagtaaaggcgataaaggagacgcgggcccacctggacaaccagggatacggggtcctgcaggacacccaggtcccccgggagcagacggggctcaggggcgccggggacccccaggcctctttgggcagaaaggagatgacggagtcagaggctttgtgggggtgattggccctcctggactgcaggggctgccaggccctccgggagagaaaggggaggtcggagacgtcgggtccatgggtccccatggagctccaggtcctcggggtccccaaggccccactggatcagagggcactccagggctgcctggaggagttggtcagccaggcgccgtgggtgagaagggtgagcgaggggacgctggagacccagggcctccaggagccccaggcatcccggggcccaagggagacattggtgaaaagggggactcaggcccatctggagctgctggacccccaggcaagaaaggtccccctggagaggatggagccaaagggagcgtgggccccacggggctgcccggagatctagggcccccaggagaccctggagtttcaggcatagatggttccccaggggagaagggagaccctggtgatgttgggggaccgggtccgcctggagcttctggggagcccggcgcccccgggccccccggcaagaggggtccttcaggccacatgggtcgagaaggcagagaaggggagaaaggtgccaagggggagccaggtcctgatgggcccccagggaggacgggtccaatgggggctagagggccccctggacgtgtggggcctgagggtcttcgagggatccctggccctgtgggtgaaccaggcctcctgggagcccctggacagatgggccctcctggccccctggggccctctggcctcccagggctgaagggagacactggccccaagggggaaaagggccacattggattgatcggtctcattggccccccgggagaagctggtgagaaaggagatcaggggttgccaggcgtgcagggaccccctggtcccaagggagaccctggtccccctggtcccattggctctctgggccaccctgggcccccaggtgtggcgggccctctaggacagaaaggctcaaaagggtctccggggtccatgggcccccgtggagacactggacctgcaggcccaccaggccccccgggtgcccctgccgagctgcatgggctgcgcaggcgccggcgcttcgtcccagtcccgcttccagtcgtggagggcggcctggaggaggtgctggcctcgctcacatcgctgagcttggagctggagcagctgcggcgtcctcccggcactgcggagcgcccgggcctcgtgtgccacgagctgcaccgcaaccacccgcacctgcctgatggggaatactggattgaccccaaccagggctgcgcgcgggactcgttcagggttttttgcaacttcacggcgggaggagagacctgcctctatcccgacaagaagtttgagatcgtgaaattggcctcctggtccaaggaaaagcctggaggctggtatagcacattccgtcgagggaagaagttctcctacgtggacgccgacgggtccccagtgaatgtcgtgcagctgaacttcctgaaactgctgagtgccacagctcgccagaacttcacctactcctgccagaatgcagctgcctggctggacgaagccacgggtgactacagccactccgcccgcttccttggcaccaatggagaggagctgtctttcaaccagacgacagcagccactgtcagcgtcccccaggatggctgccggctccggaaaggacagacgaagacccttttcgaattcagctcttctcgagcgggatttctgcccctgtgggatgtggcggccactgactttggccagacgaaccaaaagtttgggtttgaactgggccccgtctgcttcagcagctgagagtgtccggggtgggagggaccatgagggagccccagaatggggtgcatttggtgctgaggctttgaagccaccgtatttttcgttacctgtgactatggagccaatgggatgtgacttcgctcatcacggacagtcattccttctcctttccagggtgctgggggctggggttccctggcccaagggtccagcctcctctcaccccattccaggtggcatactgcagtctggctctttctcccctccctccccacccaagcctcacctccccaccccttgaacccccatgcaatgagcttctaactcagagctgatgaacaaaagcccccccacccccaatgcctgcctcctcactcctccgtcgctgcccttcacaccttttggtgctacccctccccagagttaagcactggatgtctcctgatcccaggctgggacccctacccccaccccctttgatcctttctacttccacggtgaaaggactgaggtcggactacagagggaagagggacttcccttgactgggttgtgtttcttttcctgcctcagcccagctctgcaaatcccctccccctgccccccacctccccaggctcaccttgccatgccaggtggtttggggaccaagatgttgggggggtgaatcaggatcctaatggtgctgccctatttatacctgggtctgtattaaaagggaaagtcccccctgttgtagatttcatctgcttcctccttagggaaggctgggatatgatgagagattccagcccaagcctggccccccaccgccaggccatagggcataatttgcatctcaaatctgagaataaactgatgaactgtg

SEQ ID NO: 4663 - DNA, 828 bp, Homo sapiens
  source 1..828: mol_type = unassigned DNA
atcccaccttggtggcctactctgaccatcccttgacctcatccctggtaattcccatttgaaatctgcataatttcccatttgaccatcccctaaccacccacacagacctcgagttcacatttgagaatccctaactgacccttgctcttctcccaggggccctctggcctcccagggctgaagggagacactggccccaagggggaaaagggccacattggattgatcggtctcattggccccccgggagaagctggtgagaaaggagatcaggggttgccaggcgtgcagggaccccctggtcccaagggagaccctggtccccctggtcccattggctctctgggccaccctgggcccccaggtgtggcggtgagtatgcagggaatcttttgtgggatgaggtcactgtggtggtccaggccaggacctcagctctccctgtctgtaccctacagggccctctaggacagaaaggctcaaaagggtctccggtgagtacaccctgcttccgtgggcttacacatcccagctccccacccccttcactgcaccagaaccctccacgtctctgccttcatttatttatttattcatgcaatcgtgcgttcgacaaatatttattcaacacctacggttgtatttcatcagatccaaaatgccatcaattataagatgtaccattattttacaaactgctaggaaagaaaacagttctgccaagtaaactatgacttgccaaagatgttaagaagctgatttcagagacattaaaacatgaaaagaaaatttgtgtctgatgcctaatgctgaaaactgcatgtc

SEQ ID NO: 4664 - DNA, 4238 bp, Homo sapiens
  source 1..4238: mol_type = unassigned DNA; mol_type = unassigned DNA
tccttgccctccgctctcactctggctgggagcagaaggcagcctcggtctctgggcggcggcggcggcccactctgccctggccgcgctgtgtggtgaccgcaggccccagacatgagggcggcccgtgctctgctgcccctgctgctgcaggcctgctggacagccgcgcaggatgagccggagaccccgagggccgtggccttccaggactgccccgtggacctgttctttgtgctggacacctctgagagcgtggccctgaggctgaagccctacggggccctcgtggacaaagtcaagtccttcaccaagcgcttcatcgacaacctgagggacaggtactaccgctgtgaccgaaacctggtgtggaacgcaggcgcgctgcactacagtgacgaggtggagatcatccaaggcctcacgcgcatgcctggcggccgcgacgcactcaaaagcagcgtggacgcggtcaagtactttgggaagggcacctacaccgactgcgctatcaagaaggggctggagcagctcctcgtggggggctcccacctgaaggagaataagtacctgattgtggtgaccgacgggcaccccctggagggctacaaggaaccctgtggggggctggaggatgctgtgaacgaggccaagcacctgggcgtcaaagtcttctcggtggccatcacacccgaccacctggagccgcgtctgagcatcatcgccacggaccacacgtaccggcgcaacttcacggcggctgactggggccagagccgcgacgcagaggaggccatcagccagaccatcgacaccatcgtggacatgatcaaaaataacgtggagcaagtgtgctgctccttcgaatgccagcctgcaagaggacctccggggctccggggcgaccccggctttgagggagaacgaggcaagccggggctcccaggagagaagggagaagccggagatcctggaagacccggggacctcggacctgttgggtaccagggaatgaagggagaaaaagggagccgtggggagaagggctccaggggacccaagggctacaagggagagaagggcaagcgtggcatcgacggggtggacggcgtgaagggggagatggggtacccaggcctgccaggctgcaagggctcgcccgggtttgacggcattcaaggaccccctggccccaagggagaccccggtgcctttggactgaaaggagaaaagggcgagcctggagctgacggggaggcggggagaccagggagctcgggaccatctggagacgagggccagccgggagagcctgggccccccggagagaaaggagaggcgggcgacgaggggaacccaggacctgacggtgcccccggggagcggggtggccctggagagagaggaccacgggggaccccaggcacgcggggaccaagaggagaccctggtgaagctggcccgcagggtgatcagggaagagaaggccccgttggtgtccctggagacccgggcgaggctggccctatcggacctaaaggctaccgaggcgatgagggtcccccagggtccgagggtgccagaggagccccaggacctgccggaccccctggagacccggggctgatgggtgaaaggggagaagacggccccgctggaaatggcaccgagggcttccccggcttccccgggtatccgggcaacaggggcgctcccgggataaacggcacgaagggctaccccggcctcaagggggacgagggagaagccggggaccccggagacgataacaacgacattgcaccccgaggagtcaaaggagcaaaggggtaccggggtcccgagggcccccagggacccccaggacaccaaggaccgcctgggccggacgaatgcgagattttggacatcatcatgaaaatgtgctcttgctgtgaatgcaagtgcggccccatcgacctcctgttcgtgctggacagctcagagagcattggcctgcagaacttcgagattgccaaggacttcgtcgtcaaggtcatcgaccggctgagccgggacgagctggtcaagttcgagccagggcagtcgtacgcgggtgtggtgcagtacagccacagccagatgcaggagcacgtgagcctgcgcagccccagcatccggaacgtgcaggagctcaaggaagccatcaagagcctgcagtggatggcgggcggcaccttcacgggggaggccctgcagtacacgcgggaccagctgctgccgcccagcccgaacaaccgcatcgccctggtcatcactgacgggcgctcagacactcagagggacaccacaccgctcaacgtgctctgcagccccggcatccaggtggtctccgtgggcatcaaagacgtgtttgacttcatcccaggctcagaccagctcaatgtcatttcttgccaaggcctggcaccatcccagggccggcccggcctctcgctggtcaaggagaactatgcagagctgctggaggatgccttcctgaagaatgtcaccgcccagatctgcatagacaagaagtgtccagattacacctgccccatcacgttctcctccccggctgacatcaccatcctgctggacggctccgccagcgtgggcagccacaactttgacaccaccaagcgcttcgccaagcgcctggccgagcgcttcctcacagcgggcaggacggaccccgcccacgacgtgcgggtggcggtggtgcagtacagcggcacgggccagcagcgcccagagcgggcgtcgctgcagttcctgcagaactacacggccctggccagtgccgtcgatgccatggactttatcaacgacgccaccgacgtcaacgatgccctgggctatgtgacccgcttctaccgcgaggcctcgtccggcgctgccaagaagaggctgctgctcttctcagatggcaactcgcagggcgccacgcccgctgccatcgagaaggccgtgcaggaagcccagcgggcaggcatcgagatcttcgtggtggtcgtgggccgccaggtgaatgagccccacatccgcgtcctggtcaccggcaagacggccgagtacgacgtggcctacggcgagagccacctgttccgtgtccccagctaccaggccctgctccgcggtgtcttccaccagacagtctccaggaaggtggcgctgggctagcccaccctgcacgccggcaccaaaccctgtcctcccacccctccccactcatcactaaacagagtaaaatgtgatgcgaattttcccgaccaacctgattcgctagattttttttaaggaaaagcttggaaagccaggacacaacgctgctgcctgctttgtgcagggtcctccggggctcagccctgagttggcatcacctgcgcagggccctctggggctcagccctgagctagtgtcacctgcacagggccctctgaggctcagccctgagctggcgtcacctgtgcagggccctctggggctcagccctgagctggcctcacctgggttccccaccccgggctctcctgccctgccctcctgcccgccctccctcctgcctgcgcagctccttccctaggcacctctgtgctgcatcccaccagcctgagcaagacgccctctcggggcctgtgccgcactagcctccctctcctctgtccccatagctggtttttcccaccaatcctcacctaacagttactttacaattaaactcaaagcaagctcttctcctcagcttggggcagccattggcctctgtctcgttttgggaaaccaaggtcaggaggccgttgcagacataaatctcggcgactcggccccgtctcctgagggtcctgctggtgaccggcctggaccttggccctacagccctggaggccgctgctgaccagcactgaccccgacctcagagagtactcgcaggggcgctggctgcactcaagaccctcgagattaacggtgctaaccccgtctgctcctccctcccgcagagactggggcctggactggacatgagagccccttggtgccacagagggctgtgtcttactagaaacaacgcaaacctctccttcctcagaatagtgatgtgttcgacgttttatcaaaggccccctttctatgttcatgttagttttgctccttctgtgtttttttctgaaccatatccatgttgctgacttttccaaataaaggttttcactcctctc

SEQ ID NO: 4665 - DNA, 435 bp, Homo sapiens
  source 1..435: mol_type = unassigned DNA; mol_type = unassigned DNA
cggccgcaggtggaaagtaattctgcgtttccatttctctttccagaaaaataacgtggagcaagtggtaagagccctccccaccacccccagccgtgagtctgcacacgtccacccacacgtccacctgtgtgttcaggacgcatgtccctatgcatatccgcccatgtgcccgggacacatgtcccctgcgtgtctgcccgtgtgcccgggatgtgtgtccccctgcgtgtccacctgtgtgtctgcccatgtgcctgggacatgtgtccgcctgtgcgtccatccgtgtgtccgtctgcccatgtgcctgggtcgcatgtcaccctgtgtcccagccgtatgtccgtggctttcccactgactcgtctccatgctttccccccacagtgctgctccttcgaatgccagcctgcaagaggacctccggggctc

SEQ ID NO: 4666 - DNA, 500 bp, Homo sapiens
  source 1..500: mol_type = unassigned DNA; mol_type = unassigned DNA
gggcagcagagccgagcccagggacacagcgggtcctcagggtggggcccacctgggatggccgcctggaccaccagtgtgcgaagccccagctgccctcacagcaccgtcactggaggacgaggggctgggtagggagggaccgggcaggggtgggcttgatgaggggcagggccctgggggtgggggctgtctcagctcaggaagcacagtgggctcctcaccctcagagctcctctactccgtttctcggacagggacccccaggacaccaaggaccgcctgggccggacgaatgcgagattttggacatcatcatgaaaatgtgctcttgctgtggtgagacccaggctctagctcctgagagaatggatcccgggggtcggggagcgaggcctgggtcccacacatgtcacaggacagcacatggcactctggtccccgcccgcagctccctgcacctgcccgccccctctggggcctgctccaagccagcaggg

SEQ ID NO: 4667 - DNA, 863 bp, Homo sapiens
  source 1..863: mol_type = unassigned DNA; mol_type = unassigned DNA
cccgggtgttgggctgggccccgccctctttcacccataactgaaataaccaggagcaggcttgggggggtccctgctccatcattctggcccacaggccccaccctagcctggctgagcaacgccagccctgaccagccgccggacagagcagcctttacggggccatgggagggggtgggcttttctggggctgagacggggggaccccaacgtgtcagaatgcaagtgcggccccatcgacctcctgttcgtgctggacagctcagagagcattggcctgcagaacttcgagattgccaaggacttcgtcgtcaaggtcatcgaccggctgagccgggacgagctggtcaagttcgagccagggcagtcgtacgcgggtgtggtgcagtacagccacagccagatgcaggagcacgtgagcctgcgcagccccagcatccggaacgtgcaggagctcaaggaagccatcaagagcctgcagtggatggcgggcggcaccttcacgggggaggccctgcagtacacgcgggaccagctgctgccgcccagcccgaacaaccgcatcgccctggtcatcactgacgggcgctcagacactcagagggacaccacaccgctcaacgtgctctgcagccccggcatccaggtggtctccgtgggcatcaaagacgtgtttgacttcatcccaggctcagaccagctcaatgtcatttcttgccaaggcctggcaccatcccagggccggcccggcctctcgctggtcaaggagaactatgcagagctgctggaggatgccttcctgaagaatgtcaccgcccagatctgcatagacaagaagtgtccagattacacctgcccca

SEQ ID NO: 4668 - DNA, 2358 bp, Homo sapiens
  source 1..2358: mol_type = unassigned DNA; mol_type = unassigned DNA
gggccagggcactggaggggaggggcgtgctctgctgacaccgcccccgcctgcagaatgcaagtgcggccccatcgacctcctgttcgtgctggacagctcagagagcattggcctgcagaacttcgagattgccaaggacttcgtcgtcaaggtcatcgaccggctgagccgggacgagctggtcaagttcgagccagggcagtcgtacgcgggtgtggtgcagtacagccacagccagatgcaggagcacgtgagcctgcgcagccccagcatccggaacgtgcaggagctcaaggaagccatcaagagcctgcagtggatggcgggcggcaccttcacgggggaggccctgcagtacacgcgggaccagctgctgccgcccagcccgaacaaccgcatcgccctggtcatcactgacgggcgctcagacactcagagggacaccacaccgctcaacgtgctctgcagccccggcatccaggtggtctccgtgggcatcaaagacgtgtttgacttcatcccaggctcagaccagctcaatgtcatttcttgccaaggcctggcaccatcccagggccggcccggcctctcgctggtcaaggagaactatgcagagctgctggaggatgccttcctgaagaatgtcaccgcccagatctgcatagacaagaagtgtccagattacacctgccccatcacgttctcctccccggctgacatcaccatcctgctggacggctccgccagcgtgggcagccacaactttgacaccaccaagcgcttcgccaagcgcctggccgagcgcttcctcacagcgggcaggacggaccccgcccacgacgtgcgggtggcggtggtgcagtacagcggcacgggccagcagcgcccagagcgggcgtcgctgcagttcctgcagaactacacggccctggccagtgccgtcgatgccatggactttatcaacgacgccaccgacgtcaacgatgccctgggctatgtgacccgcttctaccgcgaggcctcgtccggcgctgccaagaagaggctgctgctcttctcagatggcaactcgcagggcgccacgcccgctgccatcgagaaggccgtgcaggaagcccagcgggcaggcatcgagatcttcgtggtggtcgtgggccgccaggtgaatgagccccacatccgcgtcctggtcaccggcaagacggccgagtacgacgtggcctacggcgagagccacctgttccgtgtccccagctaccaggccctgctccgcggtgtcttccaccagacagtctccaggaaggtggcgctgggctagcccaccctgcacgccggcaccaaaccctgtcctcccacccctccccactcatcactaaacagagtaaaatgtgatgcgaattttcccgaccaacctgattcgctagattttttttaaggaaaagcttggaaagccaggacacaacgctgctgcctgctttgtgcagggtcctccggggctcagccctgagttggcatcacctgcgcagggccctctggggctcagccctgagctagtgtcacctgcacagggccctctgaggctcagccctgagctggcgtcacctgtgcagggccctctggggctcagccctgagctggcctcacctgggttccccaccccgggctctcctgccctgccctcctgcccgccctccctcctgcctgcgcagctccttccctaggcacctctgtgctgcatcccaccagcctgagcaagacgccctctcggggcctgtgccgcactagcctccctctcctctgtccccatagctggtttttcccaccaatcctcacctaacagttactttacaattaaactcaaagcaagctcttctcctcagcttggggcagccattggcctctgtctcgttttgggaaaccaaggtcaggaggccgttgcagacataaatctcggcgactcggccccgtctcctgagggtcctgctggtgaccggcctggaccttggccctacagccctggaggccgctgctgaccagcactgaccccgacctcagagagtactcgcaggggcgctggctgcactcaagaccctcgagattaacggtgctaaccccgtctgctcctccctcccgcagagactggggcctggactggacatgagagccccttggtgccacagagggctgtgtcttactagaaacaacgcaaacctctccttcctcagaatagtgatgtgttcgacgttttatcaaaggccccctttctatgttcatgttagttttgctccttctgtgtttttttctgaaccatatccatgttgctgacttttccaaataaaggttttcactcctctc

SEQ ID NO: 4669 - DNA, 968 bp, Homo sapiens
  source 1..968: mol_type = unassigned DNA; mol_type = unassigned DNA
agcaggctgcgccacaccgatactgtctgtccccacaggtggtctccgtgggcatcaaagacgtgtttgacttcatcccaggctcagaccagctcaatgtcatttcttgccaaggcctggcaccatcccagggccggcccggcctctcgctggtcaaggagaactatgcagagctgctggaggatgccttcctgaagaatgtcaccgcccagatctgcatagacaagaagtgtccagattacacctgccccatcacgttctcctccccggctgacatcaccatcctgctggacggctccgccagcgtgggcagccacaactttgacaccaccaagcgcttcgccaagcgcctggccgagcgcttcctcacagcgggcaggacggaccccgcccacgacgtgcgggtggcggtggtgcagtacagcggcacgggccagcagcgcccagagcgggcgtcgctgcagttcctgcagaactacacggccctggccagtgccgtcgatgccatggactttatcaacgacgccaccgacgtcaacgatgccctgggctatgtgacccgcttctaccgcgaggcctcgtccggcgctgccaagaagaggctgctgctcttctcagatggcaactcgcagggcgccacgcccgctgccatcgagaaggccgtgcaggaagcccagcgggcaggcatcgagatcttcgtggtggtcgtgggccgccaggtgaatgagccccacatccgcgtcctggtcaccggcaagacggccgagtacgacgtggcctacggcgagagccacctgttccgtgtccccagctaccaggccctgctccgcggtgtcttccaccagacagtctccaggaaggtggcgctgggctagcccaccctgcacgccggcaccaaaccctgtcctcccacccctccccactcatcactaaacagagtaaaatgtgatgcgaattttcccgaccaa

SEQ ID NO: 4670 - DNA, 3251 bp, Homo sapiens
  source 1..3251: mol_type = unassigned DNA; mol_type = unassigned DNA
cagaaggcagcctcggtctctgggcggcggcggcggcccactctgccctggccgcgctgtgtggtgaccgcaggccccagacatgagggcggcccgtgctctgctgcccctgctgctgcaggcctgctggacagccgcgcaggatgagccggagaccccgagggccgtggccttccaggactgccccgtggacctgttctttgtgctggacacctctgagagcgtggccctgaggctgaagccctacggggccctcgtggacaaagtcaagtccttcaccaagcgcttcatcgacaacctgagggacaggtactaccgctgtgaccgaaacctggtgtggaacgcaggcgcgctgcactacagtgacgaggtggagatcatccaaggcctcacgcgcatgcctggcggccgcgacgcactcaaaagcagcgtggacgcggtcaagtactttgggaagggcacctacaccgactgcgctatcaagaaggggctggagcagctcctcgtggggggctcccacctgaaggagaataagtacctgattgtggtgaccgacgggcaccccctggagggctacaaggaaccctgtggggggctggaggatgctgtgaacgaggccaagcacctgggcgtcaaagtcttctcggtggccatcacacccgaccacctggagccgcgtctgagcatcatcgccacggaccacacgtaccggcgcaacttcacggcggctgactggggccagagccgcgacgcagaggaggccatcagccagaccatcgacaccatcgtggacatgatcaaaaataacgtggagcaagtgtgctgctccttcgaatgccagcctgcaagaggacctccggggctccggggcgaccccggctttgagggagaacgaggcaagccggggctcccaggagagaagggagaagccggagatcctggaagacccggggacctcggacctgttgggtaccagggaatgaagggagaaaaagggagccgtggggagaagggctccaggggacccaagggctacaagggagagaagggcaagcgtggcatcgacggggtggacggcgtgaagggggagatggggtacccaggcctgccaggctgcaagggctcgcccgggtttgacggcattcaaggaccccctggccccaagggagaccccggtgcctttggactgaaaggagaaaagggcgagcctggagctgacggggaggcggggagaccagggagctcgggaccatctggagacgagggccagccgggagagcctgggccccccggagagaaaggagaggcgggcgacgaggggaacccaggacctgacggtgcccccggggagcggggtggccctggagagagaggaccacgggggaccccaggcacgcggggaccaagaggagaccctggtgaagctggcccgcagggtgatcagggaagagaaggccccgttggtgtccctggagacccgggcgaggctggccctatcggacctaaaggctaccgaggcgatgagggtcccccagggtccgagggtgccagaggagccccaggacctgccggaccccctggagacccggggctgatgggtgaaaggggagaagacggccccgctggaaatggcaccgagggcttccccggcttccccgggtatccgggcaacaggggcgctcccgggataaacggcacgaagggctaccccggcctcaagggggacgagggagaagccggggaccccggagacgataacaacgacattgcaccccgaggagtcaaaggagcaaaggggtaccggggtcccgagggcccccagggacccccaggacaccaaggaccgcctgggccggacgaatgcgagattttggacatcatcatgaaaatgtgctgtgaatgcaagtgcggccccatcgacctcctgttcgtgctggacagctcagagagcattggcctgcagaacttcgagattgccaaggacttcgtcgtcaaggtcatcgaccggctgagccgggacgagctggtcaagttcgagccagggcagtcgtacgcgggtgtggtgcagtacagccacagccagatgcaggagcacgtgagcctgcgcagccccagcatccggaacgtgcaggagctcaaggaagccatcaagagcctgcagtggatggcgggcggcaccttcacgggggaggccctgcagtacacgcgggaccagctgctgccgcccagcccgaacaaccgcatcgccctggtcatcactgacgggcgctcagacactcagagggacaccacaccgctcaacgtgctctgcagccccggcatccaggtggtctccgtgggcatcaaagacgtgtttgacttcatcccaggctcagaccagctcaatgtcatttcttgccaaggcctggcaccatcccagggccggcccggcctctcgctggtcaaggagaactatgcagagctgctggaggatgccttcctgaagaatgtcaccgcccagatctgcatagacaagaagtgtccagattacacctgccccatcacgttctcctccccggctgacatcaccatcctgctggacggctccgccagcgtgggcagccacaactttgacaccaccaagcgcttcgccaagcgcctggccgagcgcttcctcacagcgggcaggacggaccccgcccacgacgtgcgggtggcggtggtgcagtacagcggcacgggccagcagcgcccagagcgggcgtcgctgcagttcctgcagaactacacggccctggccagtgccgtcgatgccatggactttatcaacgacgccaccgacgtcaacgatgccctgggctatgtgacccgcttctaccgcgaggcctcgtccggcgctgccaagaagaggctgctgctcttctcagatggcaactcgcagggcgccacgcccgctgccatcgagaaggccgtgcaggaagcccagcgggcaggcatcgagatcttcgtggtggtcgtgggccgccaggtgaatgagccccacatccgcgtcctggtcaccggcaagacggccgagtacgacgtggcctacggcgagagccacctgttccgtgtccccagctaccaggccctgctccgcggtgtcttccaccagacagtctccaggaaggtggcgctgggctagcccaccctgcacgccggcaccaaaccctgtcctcccacccctccccactcatcactaaacagagtaaaatgtgatgcgaattttcccg

SEQ ID NO: 4671 - DNA, 4761 bp, Homo sapiens
  source 1..4761: mol_type = unassigned DNA; mol_type = unassigned DNA
cctttgcttttagccctcaccgggggcaggagggaccaaggctgggcccagaacacatagtcctagggtaacagtgaaggggtcgtgaggggacagtgactcccttccaaccccttcttcatagggactgttggcaaacaaagaaaatcaactgggaaaatgaagacctgctggaaaattccagttttcttctttgtgtgcagtttcctggaaccctgggcatctgcagctgtcaagcgtcgccccagattccctgtcaattccaattctaatggtggaaatgaactctgtccaaagatcaggattggccaagatgacttaccagggtttgatctgatctctcagttccaggtagataaagcagcatctagaagagctatccagagagtagtgggatcagctacattgcaggtggcttacaagttgggaaataatgtagacttcaggattccaactaggaatttatatcccagtggactgcctgaagaatactccttcttgacgacgtttcgaatgactggaagcactctcaaaaagaactggaacatttggcagattcaggattcctctgggaaggagcaagttggcataaagattaatggccaaacacaatctgttgtattttcatacaagggactggatggaagtctccaaacagcagccttttcgaatttgtcctccttgtttgattcccagtggcataagatcatgattggcgtggagaggagtagtgctactctttttgttgactgcaacaggattgaatctttacctataaagccaagaggcccaattgacattgatggctttgctgtgctgggaaaacttgcagataatcctcaagtttctgttccatttgaacttcaatggatgctgatccattgtgaccccctgcggcccaggagagaaacttgccatgagctgccagccagaataacgcccagccagaccaccgacgagagaggtcccccgggtgagcagggtcctcccgggcctccgggcccccctggagttccaggcatcgatggcatcgacggtgaccgaggtcctaagggccccccgggccccccgggtcctgcaggtgaaccgggaaagccaggagctccaggcaagcctggcacacctggcgctgatggattaacaggacctgatggatcccctggctccattgggtcaaagggacaaaaaggagaacctggtgtgcctggatcgcgtggatttccaggccgtggtattcctggaccccctggtcctcctgggacagcaggactccctggagagcttggccgtgtaggacctgttggtgaccctgggagaagaggaccacctggcccccctggccccccaggacccagaggaacaattggctttcatgatggagatccattgtgtcccaatgcctgtccaccaggtcgctcaggatatccaggcctaccaggcatgaggggtcataaaggggctaaaggagaaattggtgaaccaggaagacaaggacacaagggtgaagaaggtgaccagggagaactcggagaagttggagctcaaggacctccaggagcccagggtttgcgaggcatcaccggcatagttggggacaaaggggaaaaaggtgctcggggcttagatggtgaacctgggcctcagggtcttcctggtgcacctggtgatcaaggacagcgaggacctccaggagaagcaggtcccaaaggagatagaggggctgaaggtgctagaggaattcctggtctccctgggcccaaaggagacacgggtttgccaggtgtggatggccgtgatgggatccctggaatgcctggaacaaagggtgaaccaggaaaacctgggcctcctggtgatgcaggattgcaggggttaccaggtgtacctggaattcctggtgcaaagggtgttgctggtgaaaagggtagcacaggtgctccagggaagcctggtcagatgggaaattcaggcaaaccgggccaacaggggcctccaggagaggtgggaccccgaggaccccaggggcttcctggcagtagaggagaattaggaccagtgggatccccaggcctaccaggtaaactgggttctctgggtagccctggcctccctggcttgcctgggccccctggacttcctggaatgaaaggtgacaggggtgtagtcggtgaaccgggtccaaagggtgaacagggtgcctctggtgaagaaggtgaagcaggagaaaggggggaacttggagatataggattacctggcccaaagggatctgcaggtaatcctggggaacctggcttgagagggcctgagggaagtcgggggcttcctggagtggaaggaccaagaggaccacctggaccccggggtgtgcagggagaacagggtgccaccggcctgcctggtgtccagggccctccgggtagagcaccgacagatcagcacattaagcaggtttgcatgagagtcatacaagaacattttgctgagatggctgccagtcttaagcgtccagactcaggtgccactgggcttcctggaaggcctggccctcctggtccccccggccctcctggagagaatggtttcccaggccagatgggaattcgtggccttccgggcattaaggggccccctggtgctcttggtttgaggggacctaaaggtgacttgggagaaaagggggagcgtggccctccaggaagaggtcccaacggtttgcctggagctataggtctcccaggtgacccaggccctgccagctatggcagaaatggccgagacggtgagcgaggccccccaggggtggcaggaattcctggagtgcctggacccccgggacctcctgggcttcccggtttctgtgagccagcctcctgcaccatgcaggctggtcagcgagcatttaacaaagggcctgacccttgaaaggcttactgctgcatggctgtctgcatgaaccacgcctggtgaaggagcctgggtgagaaacaccatccaaagctggggcaaagatgattaccttcagcatgattacaatgtattaccttcagtatgattacagaagtcctacttgacaatcacatatagaagaacggtgctattcagtaagttctctttcctttcccttggagggaagacagcagagtcatcagttaaaaaaaaaaaaagaaaaccaaacacctcccttgaataaatttatactcctgttcccaggatcttgagctttagtgtgctatacctatgtgtcttatcgtgggccactgtgccaataaacaaaaacaactgtttggtttacctcagttgcagtagttattttcatttagaagttgttctcagattattgtttcagttatatagaggattactagactagttatgaagaaaccccactacattcaatggaattggtgcttaaaatctcatcgatgtgctgtctctggagtgataagaaagggctacatctcccgaaatgatttctttacgtcatgtattggtttccttcttcaccttgaacttttgttgaactgtatgtactttaccccaaacctgttaatattttgagcgcttctatgtgaaagcaaagaaataattttaatactctggcattcataaattttattgatgagattatttattttaaaggtttgaggtaacatctctggttgtaccaaagaagaaataaatatggtttcttaatctcttgcatgttttcttataaataatcatgttcaatgaaaagaagttactgagcttatttagatacattaaacattacttaactactggttctataggtgtatgtttataatattagtgttttttctacataaagtaatttaaaaagctgttccacagagggtgttaccctgtgacagatgcgtatgtgtgtgtgtgtgtgtgtgtgtgtgttttagtgtgtatggagagagcttcatggaccttttcgaaatgttaattccctagaaagatgtgcagctgcatgcgcatctatatttttgtatagtatttcagagatttcgtggacttttttaagtctagccttgctttatttctaggttaagaaccactgccttcattccaatggcttgttagctccctcctactcagaactttattgtaaacatgatttatgtttcaccatttcttgtaaattttataaatgcagctcagctaaagcactgtattcttaacaagtatttcctgaccacttaagcactttattattatctgtgtaatcatattggcttgctgtttcattaacatctacttaactatccaacagacttaatatattcattttatatcacagagcctgtgagtaacctgtgctggggcataaaacaatagctcaacatagtatctttagttagtttatggaactaaattctgtcaagtcaaaggagagtgagccctaatataattttttatatatatttttctcgtgtgtacttttatacattttaaattctagtcctagttgtttggttaaatcaatcattatgtaatctgtatttggatttctttaaaactgcttacagcatctagttttatgcttctagcatgaattttgcttaagaagattccaactttgccatatagatcagtgctatttacatagactgaaagaatgttctttcccttttttcaaatatgacttttgaaaataaaggtctctgttatagctccctaaaacaatccttaaaaaaatggcaaactttttcaggagctgtgacacataattaaataaaggcatagaaatta

SEQ ID NO: 4672 - DNA, 3059 bp, Homo sapiens
  source 1..3059: mol_type = unassigned DNA; mol_type = unassigned DNA
cgcgcgcctcccgggcctggacgctttggcaaccgctactcccgggggtgctttttctgcagggacgaagtgccacctatgctagtggcgggtctggaagcctagaggggaaccaggctgcagagccgggccaagggattagcggcgggcggcgggcatggcctggactgcgcgggaccgcggggccctggggctgctgctgttggggctctgcttgtgcgcggctcaaagaggtcccccgggtgagcagggtcctcccgggcctccgggcccccctggagttccaggcatcgatggcatcgacggtgaccgaggtcctaagggccccccgggccccccgggtcctgcaggtgaaccgggaaagccaggagctccaggcaagcctggcacacctggcgctgatggattaacaggacctgatggatcccctggctccattgggtcaaagggacaaaaaggagaacctggtgtgcctggatcgcgtggatttccaggccgtggtattcctggaccccctggtcctcctgggacagcaggactccctggagagcttggccgtgtaggacctgttggtgaccctgggagaagaggaccacctggcccccctggccccccaggacccagaggaacaattggctttcatgatggagatccattgtgtcccaatgcctgtccaccaggtcgctcaggatatccaggcctaccaggcatgaggggtcataaaggggctaaaggagaaattggtgaaccaggaagacaaggacacaagggtgaagaaggtgaccagggagaactcggagaagttggagctcaaggacctccaggagcccagggtttgcgaggcatcaccggcatagttggggacaaaggggaaaaaggtgctcggggcttagatggtgaacctgggcctcagggtcttcctggtgcacctggtgatcaaggacagcgaggacctccaggagaagcaggtcccaaaggagatagaggggctgaaggtgctagaggaattcctggtctccctgggcccaaaggagacacgggtttgccaggtgtggatggccgtgatgggatccctggaatgcctggaacaaagggtgaaccaggaaaacctgggcctcctggtgatgcaggattgcaggggttaccaggtgtacctggaattcctggtgcaaagggtgttgctggtgaaaagggtagcacaggtgctccagggaagcctggtcagatgggaaattcaggcaaaccgggccaacaggggcctccaggagaggtgggaccccgaggaccccaggggcttcctggcagtagaggagaattaggaccagtgggatccccaggcctaccaggtaaactgggttctctgggtagccctggcctccctggcttgcctgggccccctggacttcctggaatgaaaggtgacaggggtgtagtcggtgaaccgggtccaaagggtgaacagggtgcctctggtgaagaaggtgaagcaggagaaaggggggaacttggagatataggattacctggcccaaagggatctgcaggtaatcctggggaacctggcttgagagggcctgagggaagtcgggggcttcctggagtggaaggaccaagaggaccacctggaccccggggtgtgcagggagaacagggtgccaccggcctgcctggtgtccagggccctccgggtagagcaccgacagatcagcacattaagcaggtttgcatgagagtcatacaagaacattttgctgagatggctgccagtcttaagcgtccagactcaggtgccactgggcttcctggaaggcctggccctcctggtccccccggccctcctggagagaatggtttcccaggccagatgggaattcgtggccttccgggcattaaggggccccctggtgctcttggtttgaggggacctaaaggtgacttgggagaaaagggggagcgtggccctccaggaagaggtcccaacggtttgcctggagctataggtctcccaggtgacccaggccctgccagctatggcagaaatggccgagacggtgagcgaggccccccaggggtggcaggaattcctggagtgcctggacccccgggacctcctgggcttcccggtttctgtgagccagcctcctgcaccatgcaggctggtcagcgagcatttaacaaagggcctgacccttgaaaggcttactgctgcatggctgtctgcatgaaccacgcctggtgaaggagcctgggtgagaaacaccatccaaagctggggcaaagatgattaccttcagcatgattacaatgtattaccttcagtatgattacagaagtcctacttgacaatcacatatagaagaacggtgctattcagtaagttctctttcctttcccttggagggaagacagcagagtcatcagttaaaaaaaaaaaaagaaaaccaaacacctcccttgaataaatttatactcctgttcccaggatcttgagctttagtgtgctatacctatgtgtcttatcgtgggccactgtgccaataaacaaaaacaactgtttggtttacctcagttgcagtagttattttcatttagaagttgttctcagattattgtttcagttatatagaggattactagactagttatgaagaaaccccactacattcaatggaattggtgcttaaaatctcatcgatgtgctgtctctggagtgataagaaagggctacatctcccgaaatgatttctttacgtcatgtattggtttccttcttcaccttgaacttttgttgaactgtatgtactttaccccaaacctgttaatattttgagcgcttctatgtgaaagcaaagaaataattttaatactctggcattcataaattttattgatgagattatttattttaaaggtttgaggtaacatctctggttgtaccaaagaagaaataaatatggtttcttaatctcttgcatgttttcttataaataatcatgttcaatgaaaagaagttactgagcttatttagatacattaaacattacttaactactggttct

SEQ ID NO: 4673 - DNA, 1844 bp, Homo sapiens
  source 1..1844: mol_type = unassigned DNA; mol_type = unassigned DNA
actgcaacctccatctcccagtttcaagaaattctcccccctcagcctcccgagtagttgggattacaggcgcccgccatgatgcctagctaatttttgtagagacaggggtttgaccatgttggccaggctggtcccaaactcttgacctcaggtgatccgtccgcatcagcctcttaaagtgctgggattataaggcatgagcccctgcgcctagccctgaatggcttcttaaaaagagatgagttggcagatgtgtctcaatttgttggggacgtatgtggcagcacagagcatccaagagaaatgtacagcctttggttatggttcatcattatttttggtttttgggatggagtctaacttttttgcctaggctggggtgcagtggcgcgatcttgggtcactgcaacctccacctcccgggttcaagtgatgctcctgcctcagcctcctgagtagctgggagtacaggcacctgccaccacgccaagctaatttttgtatgtttagtagagacggggtttcaccatgttggtcgggctggtctcgaactcctgatctcaagtgatccacccacctcggcctcccaaagtgctgggattacaggtgtgaaccaccatgcgcggccaattcatcatttttaatgggcagtagaggagaattaggaccagtgggatccccaggcctaccaggtaaactgggtgtagtcggtgaaccgggtccaaagggtgaacagggtgcctctggtgaagaaggtgaagcaggagaaaggggggaacttggagatataggattacctggcccaaagggatctgcaggtaatcctggggaacctggcttgagagggcctgagggaagtcgggggcttcctggagtggaaggaccaagaggaccacctggaccccggggtgtgcagggagaacagggtgccaccggcctgcctggtgtccagggccctccgggtagagcaccgacagatcagcacattaagcaggtttgcatgagagtcatacaagaacattttgctgagatggctgccagtcttaagcgtccagactcaggtgccactgggcttcctggaaggcctggccctcctggtccccccggccctcctggagagaatggtttcccaggccagatgggaattcgtggccttccgggcattaaggggccccctggtgctcttggtttgaggggacctaaaggtgacttgggagaaaagggggagcgtggccctccaggaagaggtcccaacggtttgcctggagctataggtctcccaggtgacccaggccctgccagctatggcagaaatggccgagacggtgagcgaggccccccaggggtggcaggaattcctggagtgcctggacccccgggacctcctgggcttcccggtttctgtgagccagcctcctgcaccatgcaggctggtcagcgagcatttaacaaagggcctgacccttgaaaggcttactgctgcatggctgtctgcatgaaccacgcctggtgaaggagcctgggtgagaaacaccatccaaagctggggcaaagatgattaccttcagcatgattacaatgtattaccttcagtatgattacagaagtcctacttgacaatcacatatagaagaacggtgctattcagtaagttctctttcctttcccttggagggaagacagcagagtcatcagttaaaaaaaaaaaaagaaaaccaaacacctcccttgaataaatttatactcctgttcccaggatcttgagctttagtgtgctatacctatgtgtcttatcgtgggccactgtgccaataaacaaaaacaactgtttggtttacctc

SEQ ID NO: 4674 - DNA, 1940 bp, Homo sapiens
  source 1..1940: mol_type = unassigned DNA; mol_type = unassigned DNA
aatagattgtactggcttcggcttacctgctgtgagcccactggcaggctcctggaagctagccttcgcccttgctctttcaccggcactccctgcattaatttagaaaaagatcctgcagggattaacaggacctgatggatcccctggctccattgggtcaaagggacaaaaaggagaacctggtgtgcctggatcgcgtggatttccaggccgtggtattcctggaccccctggtcctcctgggacagcaggactccctggagagcttggccgtgtaggacctgttggaacaattggctttcatgatggagatccattgtgtcccaatgcctgtccaccaggtcgctcaggatatccaggcctaccaggcatgaggggtcataaaggggctaaaggagaaattggtgaaccaggaagacaaggacacaagggtgaagaaggtgaccagggagaactcggagaagttggagctcaaggacctccaggagcccagggtttgcgaggcatcaccggcatagttggggacaaaggggaaaaaggtgctcggggcttagatggtgaacctgggcctcagggtcttcctggtgcacctggtgatcaaggacagcgaggacctccaggagaagcaggtcccaaaggagatagaggggctgaaggtgctagaggaattcctggtctccctgggcccaaaggagacacgggtttgccaggtgtggatggccgtgatgggatccctggaatgcctggaacaaagggtgaaccaggaaaacctgggcctcctggtgatgcaggattgcaggggttaccaggtgtacctggaattcctggtgcaaagggtgttgctggtgaaaagggtagcacaggtgctccagggaagcctggtcagatgggaaattcaggcaaaccgggccaacaggggcctccaggagaggtgggaccccgaggaccccaggggcttcctggcagtagaggagaattaggaccagtgggatccccaggcctaccaggtaaactgggtgtagtcggtgaaccgggtccaaagggtgaacagggtgcctctggtgaagaaggtgaagcaggagaaaggggggaacttggagatataggattacctggcccaaagggatctgcaggtaatcctggggaacctggcttgagagggcctgagggaagtcgggggcttcctggagtggaaggaccaagaggaccacctggaccccggggtgtgcagggagaacagggtgccaccggcctgcctggtgtccagggccctccgggtagagcaccgacagatcagcacattaagcaggtttgcatgagagtcatacaagaacattttgctgagatggctgccagtcttaagcgtccagactcaggtgccactgggcttcctggaaggcctggccctcctggtccccccggccctcctggagagaatggtttcccaggccagatgggaattcgtggccttccgggcattaaggggccccctggtgctcttggtttgaggggacctaaaggtgacttgggagaaaagggggagcgtggccctccaggaagaggtcccaacggtttgcctggagctataggtctcccaggtgacccaggccctgccagctatggcagaaatggccgagacggtgagcgaggccccccaggggtggcaggaattcctggagtgcctggacccccgggacctcctgggcttcccggtttctgtgagccagcctcctgcaccatgcaggctggtcagcgagcatttaacaaagggcctgacccttgaaaggcttactgctgcatggctgtctgcatgaaccacgcctggtgaaggagcctgggtgagaaacaccatccaaagctggggcaaagatgattaccttcagcatgattacaatgtattaccttcagtatgattacagaagtcctacttgacaatc

SEQ ID NO: 4675 - DNA, 690 bp, Homo sapiens
  source 1..690: mol_type = unassigned DNA; mol_type = unassigned DNA
aattgccctgttgatgaaaggtgaaccaggaaaacctgggcctcctggtgatgcaggattgcaggggttaccaggtgtacctggaattcctggtgcaaagggtgttgctggtgaaaagcatgtgttttattttatatttggccctagggagaaataaaaagggtagcacaggtgctccagggaagcctggtcagatgggaaattcaggcaaaccgggccaacaggggcctccaggagaggtgggaccccgaggaccccaggggcttcctggcagtagaggagaattaggaccagtgggatccccaggcctaccaggtaaactgggttctctgggtagccctggcctccctggcttgcctgggccccctggacttcctggaatgaaaggtgacaggggtgtagtcggtgaaccgggtccaaagggtgaacagggtgcctctggtgaagaaggtgaagcaggagaaaggggggaacttggagatataggattacctggcccaaagggatctgcaggtaatcctggggaacctggcttgagagggcctgagggaagtcgggggcttcctggagtggaaggaccaagaggaccacctggaccccggggtgtgcagggagaacagggtgccaccggcctgcctggtgtccagggccctccgggtagagcaccgacagatcagcacattaagcagg

SEQ ID NO: 4676 - DNA, 1117 bp, Homo sapiens
  source 1..1117: mol_type = unassigned DNA; mol_type = unassigned DNA
atgtaaccaggttacatgccatgaaggaagtgggaatgatagtgtaagttctacatacaagttaaaaggtaagtcaaacatattatcacaatttctcttatgctggtatttactttttttgtcataagtgattttgtcaactccagttttgtgtaagacttcagaattttataaaaaggtttaccatcagaagaattctccttggactttctaaactagaaatgtttgtctatatatatatagttactatttcttggtattacctttggttatgataatatccattgtctagatcagcttttgtgatgagatttttaaaaatctttgcttcaactaaaataattcacttctctttttcacatttccagggagcccagggtttgcgaggcatcaccggcatagttggggacaaaggggaaaaaggtgctcggggcttagatggtgaacctgggcctcagggtcttcctggtgcacctggtgatcaaggacagcgaggacctccaggagaagcaggtcccaaaggagatagaggggctgaaggtgctagaggaattcctggtctccctgggcccaaaggagacacgggtttgccaggtgtggatggccgtgatgggatccctggaatgcctggaacaaagggtgaaccaggaaaacctgggcctcctggtgatgcaggattgcaggggttaccaggtgtacctggaattcctggtgcaaagggtgttgctggtgaaaagggtagcacaggtgctccagggaagcctggtcagatgggaaattcaggcaaaccgggccaacaggggcctccaggagaggtgggaccccgaggaccccaggggcttcctggcagtagaggagaattaggaccagtgggatccccaggcctaccaggtaaactgggttctctgggtagccctggcctccctggcttgcctgggccccctggacttcctggaatgaaaggtgacaggggtgtagtcggtgaaccgggtccaaagggtgaacagggtgcctctggtgaagaaggtgaagcaggagaaaggggggaacttggagatataggattacctggcccaaagggatctgcaggtaatcctggggaacctggcttgagagg

SEQ ID NO: 4677 - DNA, 699 bp, Homo sapiens
  source 1..699: mol_type = unassigned DNA; mol_type = unassigned DNA
cgtctataatgcaaaggctgggttctgctcttgtaatgcaaggtgaatgataaattcaaggtctttttcaggtcttcaaaatctcttcttctctgggtgctcggggcttagatggtgaacctgggcctcagggtcttcctggtgcacctggtgatcaaggacagcgaggacctccaggagaagcaggtcccaaaggagatagaggggctgaaggtgctagaggaattcctggtctccctgggcccaaaggagacacgggtttgccaggtgtggatggccgtgatgggatccctggaatgcctggaacaaagggtgaaccaggaaaacctgggcctcctggtgatgcaggattgcaggggttaccaggtgtacctggaattcctggtgcaaagggtgttgctggtgaaaagggtagcacaggtgctccagggaagcctggtcagatgggaaattcaggcaaaccgggccaacaggggcctccaggagaggtgggaccccgaggaccccaggggcttcctggcagtagaggagaattaggaccagtgggatccccaggcctaccaggtaaactgggttctctgggtagccctggcctccctggcttgcctgggccccctggacttcctggaatgaaaggtgacaggggtgtagtcggtgaaccgggtccaaagggtgaacagggtgcctctggtgaagaag

SEQ ID NO: 4678 - DNA, 243 bp, Homo sapiens
  source 1..243: mol_type = unassigned DNA; mol_type = unassigned DNA
aaacgtctgtgctcctccgtttcttaaaagaaatacagcagctcatacaggttcaatcatgtgataaaagctttttttgcagggtgaaccaggaaaacctgggcctcctggtgatgcaggattgcaggggttaccaggtgtacctggaattcctggtgcaaagggtgttgctggtgaaaagggtagcacaggtgctccagggaagcctggtcagatgggaaattcaggcaaaccgggccaaca

SEQ ID NO: 4679 - DNA, 531 bp, Homo sapiens
  source 1..531: mol_type = unassigned DNA; mol_type = unassigned DNA
gtatttttgtttcataaatgaagtaaaggaggtaaataaacctgagtaaatggcagaaccaagacccaccagtcttagctattacaacattgtaattgctatgttgcatttttttccaaagcagagacaaaaaacactgaattattgaaccctgtgataaacaatgcagttagcaggaagttaggagtatgatacaacttatcaagaagaaataatcacaacaggcagatcttctgttaatctttacttttgagtaagactatagtaaggtatttctttataaatatttgcatcatacttatgtaaccatcctgtagacaattaataaataaaatgaaagttttctacttagtggtttgcctaaggatgttatgatagttctaacatcattgtcttgctctattagggattaacaggacctgatggatcccctggctccattgggtcaaagggacaaaaaggagaacctggtgtgcctggatcgcgtggatttccagtaagtaaatgtaaagctacagaattgaaaatttc

SEQ ID NO: 4680 - DNA, 1372 bp, Homo sapiens
  source 1..1372: mol_type = unassigned DNA
ccctcaccgggggcaggagggaccaaggctgggcccagaacacatagtcctagggtaacagtgaaggggtcgtgaggggacagtgactcccttccaaccccttcttcatagggactgttggcaaacaaagaaaatcaactgggaaaatgaagacctgctggaaaattccagttttcttctttgtgtgcagtttcctggaaccctgggcatctgcagctgtcaagcgtcgccccagattccctgtcaattccaattctaatggtggaaatgaactctgtccaaagatcaggattggccaagatgacttaccagggtttgatctgatctctcagttccaggtagataaagcagcatctagaagagctatccagagagtagtgggatcagctacattgcaggtggcttacaagttgggaaataatgtagacttcaggattccaactaggaatttatatcccagtggactgcctgaagaatactccttcttgacgacgtttcgaatgactggaagcactctcaaaaagaactggaacatttggcagattcaggattcctctgggaaggagcaagttggcataaagattaatggccaaacacaatctgttgtattttcatacaagggactggatggaagtctccaaacagcagccttttcgaatttgtcctccttgtttgattcccagtggcataagatcatgattggcgtggagaggagtagtgctactctttttgttgactgcaacaggattgaatctttacctataaagccaagaggcccaattgacattgatggctttgctgtgctgggaaaacttgcagataatcctcaagtttctgttccatttgaacttcaatggatgctgatccattgtgaccccctgcggcccaggagagaaacttgccatgagctgccagccagaataacgcccagccagaccaccgacgagagaggtcccccgggtgagcagggtcctcccgggcctccgggcccccctggagttccaggcatcgatggcatcgacggtgaccgaggtcctaagggccccccgggccccccgggtcctgcaggtgaaccgggaaagccaggagctccaggcaagcctggcacacctggcgctgataccagtccttgattttgtccctggaatatgaagtgaagtaagaaatggcgtctgttcttagcataccatggtgcatcactcaagttactcttcaagttaccactttatgtgttttccaaaaactaaagacttttctaaatgaaagaaagcactcgaaaacctataattatgatttccaagaatttttgactacagtttaagacatatccttcattttgaaagaaaaataaataactggatttttactgtta

SEQ ID NO: 4681 - DNA, 492 bp, Homo sapiens
  source 1..492: mol_type = unassigned DNA; mol_type = unassigned DNA
ttttctttagaaggaagggcccttcttaatagcacactgaataaaatcaaatgaataatcacacattacaagatgcctcctatacgtctctatatttagctacttacataccaggtttcttttttgtttgtttttgtttttaagacagagtctcgctctgtcacccaggctggagtgcggtggcgcgatctcggctcactgcaatctctgcctcccaggttcaagcgactctcccgcctcagcctctgcagtagcttagggactacaggtgtgagccaccgtgcccggcctacacaccagctttctattcacctacacacaactgatgctcttttggagtggagagttttagtaaaatatgatggggtcttcaggcacctgagttgctacttactactatgagaagatagaaaatgttttttcctctaaacagcttttgaaagaatgaatgcacaacaaggcaaaaaataaaaactttcttttccttttcta

SEQ ID NO: 4682 - DNA, 5742 bp, Homo sapiens
  source 1..5742: mol_type = unassigned DNA; mol_type = unassigned DNA
cgcgcgcggcagccccgaggcagcagagcgcggagccgggagcgcggggagcgcgggccggcggcggcgagggaggacgggggcgcagacggccggcgcgcggcgcggctaccatgggcgtgcggtgagcagccgctcgggacgacttcctcggctgcgcggcgctcgcgcggagctccccggccggcggtgcgtccccacggtcaccatgaaagacgacttcgcagaggaggaggaggtgcaatccttcggttacaagcggtttggtattcaggaaggaacacaatgtaccaaatgtaaaaataactgggcactgaagttttctatcatattattatacattttgtgtgccttgctaacaatcacagtagccattttgggatataaagttgtagagaaaatggacaatgtcacaggtggcatggaaacatctcgccaaacctatgatgacaagctcacagcagtggaaagtgacctgaaaaaattaggtgaccaaactgggaagaaagctatcagcaccaactcagaactctccaccttcagatcagacattctagatctccgtcagcaacttcgtgagattacagaaaaaaccagcaagaacaaggatacgctggagaagttacaggcgagcggggatgctctggtggacaggcagagtcaattgaaagaaactttggagaataactctttcctcatcaccactgtaaacaaaaccctccaggcgtataatggctatgtcacgaatctgcagcaagataccagcgtgctccagggcaatctgcagaaccaaatgtattctcataatgtggtcatcatgaacctcaacaacctgaacctgacccaggtgcagcagaggaacctcatcacgaatctgcagcggtctgtggatgacacaagccaggctatccagcgaatcaagaacgactttcaaaatctgcagcaggtttttcttcaagccaagaaggacacggattggctgaaggagaaagtgcagagcttgcagacgctggctgccaacaactctgcgttggccaaagccaacaacgacaccctggaggatatgaacagccagctcaactcattcacaggtcagatggagaacatcaccactatctctcaagccaacgagcagaacctgaaagacctgcaggacttacacaaagatgcagagaatagaacagccatcaagttcaaccaactggaggaacgcttccagctctttgagacggatattgtgaacatcattagcaatatcagttacacagcccaccacctgcggacgctgaccagcaatctaaatgaagtcaggaccacttgcacagatacccttaccaaacacacagatgatctgacctccttgaataataccctggccaacatccgtttggattctgtttctctcaggatgcaacaagatttgatgaggtcgaggttagacactgaagtagccaacttatcagtgattatggaagaaatgaagctagtagactccaagcatggtcagctcatcaagaattttacaatactacaaggtccaccgggccccaggggtccaagaggtgacagaggatcccagggaccccctggcccaactggcaacaagggacagaaaggagagaagggggagcctggaccacctggccctgcgggtgagagaggcccaattggaccagctggtccccccggagagcgtggcggcaaaggatctaaaggctcccagggccccaaaggctcccgtggttcccctgggaagcccggccctcagggctccagtggggacccaggccccccgggcccaccaggcaaagagggactccccggccctcagggccctcctggcttccagggacttcagggcaccgttggggagcctggggtgcctggacctcggggactgccaggcttgcctggggtaccaggcatgccaggccccaagggcccccccggccctcctggcccatcaggagcggtggtgcccctggccctgcagaatgagccaaccccagcaccggaggacaatggctgcccgcctcactggaagaacttcacagacaaatgctactatttttcagttgagaaagaaatttttgaggatgcaaagcttttctgtgaagacaagtcttcacatcttgttttcataaacactagagaggaacagcaatggataaaaaaacagatggtagggagagagagccactggatcggcctcacagactcagagcgtgaaaatgaatggaagtggctggatgggacatctccagactacaaaaattggaaagctggacagccggataactggggtcatggccatgggccaggagaagactgtgctgggttgatttatgctgggcagtggaacgatttccaatgtgaagacgtcaataacttcatttgcgaaaaagacagggagacagtactgtcatctgcattataacggactgtgatgggatcacatgagcaaattttcagctctcaaaggcaaaggacactcctttctaattgcatcaccttctcatcagattgaaaaaaaaaaagcactgaaaaccaattactgaaaaaaaattgacagctagtgttttttaccatccgtcattacccaaagacttgggaactaaaatgttccccagggtgatatgctgattttcattgtgcacatggactgaatcacatagattctcctccgtcagtaaccgtgcgattatacaaattatgtcttccaaagtatggaacactccaatcagaaaaaggttatcattggtcgttgagttatgggaagaacttaagcatatactgtgtaaacagtgccatacatttctaaaatcccaagtgtaggaaaaatatgcagacatacagatatataggccaactattagtaataatatgaaatatacttaaagagcttttaaaactttgtatttttgtacaaaatatttgtcttttacaatttttttcctttttttttttttgtcattttaccgacataatacatggagccaaagaaaacaataatggtactaataaaaactcctagggtttcctgtcagatttaattctacccagtggcaaagaattttttcaattgtggctttaaaaaaataattaaatatacatgtgtatatatatatatatatatatatttttttttttttttttttttaatgtttcatttcctcagaggaaccaatcacttggaatgtctagaaatatccttgcagattttgccagtgtcaatcaagcctgcacacatgcacagtgaagcgggctgtgcctgccttgagcccatcaccagccaacattcttgacgtgtgcctgaccagacacagaagaaatgggcaactcaagacgtgcttccacttcattttggtggagtcgggaggtgtgggggatggagaggcatctgttgggaagggcactgaatctggcctatctggaaggccctgtgtcatggctgagctatgactgtacttggcatcagatccctacagagccaacattaactgtcaggaacgtatggcgtcacatcagccaaaggcagagatgctagaaagatgggaaccggctacgtgttacctggaaagtttgttttcttaagtcatattccaaaaacataactccaaggcatacgcatgataaaatgcaagaataaacttttggccactttgtggaactcttaaaagaacctttccagccgggcgcagtggctcatgcctgtaatcccagcactttgggaggccgaggcaggcagatgacttgaggtcaggagttcgagaccagcctggccaacgtggcaaaaccccatctctactaaaaataagaaaattagccgggtgtagtggcacatgcctgtaatcccagctactcaggaggctgaggcaggagaatcgcttgagcccaggaggcagagattgcagtgagccaagatcgcaccactgcactccagcctcggtgacagagcaagactccatctcaaaaaaaaaaaaaaaaaaaaaacctttcctctgagcccatcttcctttcgctccttgactttccttgacttgctgttggaaagtctaatatgaaaagggctgaaactaggcattaaatataactgatgctcaaaggtaagatttccatccaacagattccttctccctcccaagggtcttcccaggcagtgctgctacttatcccaaataaaatggtaaaagaataaagacagccgggcgcggtggctcacgcctgtaatcccagcactttgggaggccgaggcggacggatcacaaggtcaggagatcgagaccatcctggctaacacggtgaaaccccgtctctactaaaaatacaaaaaaaaaattagccgggcgcggtggcgggcgcctgtagtcccagctactcgggaggctgaggcaggagaatggcgtgaacccaggaagcggagcttgcagtgagccgagatcgcgccactgcactccagcctgggcgacagagcgagactcatctcaaaaagaaaaaaaaaaaagaataaagacagagtttgactttcccacctgcgaacaagtggactgtactgctttgcccacagtctccattccccattcatgctgttttcacagcccagtaatggccaactgctcagcacctgtgtgccctgctgtcaggcaggtgggacccacagtcctctgggcctaaactgctgaagcctgcaccacaaggcgggcacggcattccaacacctcttcaggctcaacagcctttagaggctacactgagtcctctttttcatgctcttcctggttttcaagtgtcaattaaaatttgtcttcagaagaaacttgaaaataagtatctgatgccgtcatcaggatagactagtattagctttcgcagctgaagttattgctctcccagccctaataataacttaccaagtgcttattatttatcaggcactggtccaagtccttcaatcagattgtctcacctgatcctcccaacagccctaggaagcaggtcttactacactccccatttcacagggactggggcttggggaggtgatgcggtttcctgggtcactccattactgagtagtgagacaggattcagacgcaagctttgaaaatgttctaattttctttagaaggaagggcccttcttaatagcacactgaataaaatcaaatgaataatcacacattacaagatgcctcctatacgtctctatatttagctacttacataccaggtttcttttttgtttgtttttgtttttaagacagagtctcgctctgtcacccaggctggagtgcggtggcgcgatctcggctcactgcaatctctgcctcccaggttcaagcgactctcccgcctcagcctctgcagtagcttagggactacaggtgcgtgccaccatgccaggctaatttttgtgtttttagtagagacacggtttcgccattttggccaggctggtctcaaactcctgacctcaggtgatccacccgccttggcctcccaaagtgctgggattacaggtgtgagccaccgtgcccggcctacacaccagctttctattcacctacacacaactgatgctcttttggagtggagagttttagtaaaatatgatggggtcttcaggcacctgagttgctacttactactatgagaagatagaaaatgttttttcctctaaacagcttttgaaagaatgaatgcacaacaaggcaaaaaataaaaactttcttttccttttcta

SEQ ID NO: 4683 - DNA, 4719 bp, Homo sapiens
  source 1..4719: mol_type = unassigned DNA; mol_type = unassigned DNA
cgcgcgcggcagccccgaggcagcagagcgcggagccgggagcgcggggagcgcgggccggcggcggcgagggaggacgggggcgcagacggccggcgcgcggcgcggctaccatgggcgtgcggtgagcagccgctcgggacgacttcctcggctgcgcggcgctcgcgcggagctccccggccggcggtgcgtccccacggtcaccatgaaagacgacttcgcagaggaggaggaggtgcaatccttcggttacaagcggtttggtattcaggaaggaacacaatgtaccaaatgtaaaaataactgggcactgaagttttctatcatattattatacattttgtgtgccttgctaacaatcacagtagccattttgggatataaagttgtagagaaaatggacaatgtcacaggtggcatggaaacatctcgccaaacctatgatgacaagctcacagcagtggaaagtgacctgaaaaaattaggtgaccaaactgggaagaaagctatcagcaccaactcagaactctccaccttcagatcagacattctagatctccgtcagcaacttcgtgagattacagaaaaaaccagcaagaacaaggatacgctggagaagttacaggcgagcggggatgctctggtggacaggcagagtcaattgaaagaaactttggagaataactctttcctcatcaccactgtaaacaaaaccctccaggcgtataatggctatgtcacgaatctgcagcaagataccagcgtgctccagggcaatctgcagaaccaaatgtattctcataatgtggtcatcatgaacctcaacaacctgaacctgacccaggtgcagcagaggaacctcatcacgaatctgcagcggtctgtggatgacacaagccaggctatccagcgaatcaagaacgactttcaaaatctgcagcaggtttttcttcaagccaagaaggacacggattggctgaaggagaaagtgcagagcttgcagacgctggctgccaacaactctgcgttggccaaagccaacaacgacaccctggaggatatgaacagccagctcaactcattcacaggtcagatggagaacatcaccactatctctcaagccaacgagcagaacctgaaagacctgcaggacttacacaaagatgcagagaatagaacagccatcaagttcaaccaactggaggaacgcttccagctctttgagacggatattgtgaacatcattagcaatatcagttacacagcccaccacctgcggacgctgaccagcaatctaaatgaagtcaggaccacttgcacagatacccttaccaaacacacagatgatctgacctccttgaataataccctggccaacatccgtttggattctgtttctctcaggatgcaacaagatttgatgaggtcgaggttagacactgaagtagccaacttatcagtgattatggaagaaatgaagctagtagactccaagcatggtcagctcatcaagaattttacaatactacaaggtccaccgggccccaggggtccaagaggtgacagaggatcccagggaccccctggcccaactggcaacaagggacagaaaggagagaagggggagcctggaccacctggccctgcgggtgagagaggcccaattggaccagctggtccccccggagagcgtggcggcaaaggatctaaaggctcccagggccccaaaggctcccgtggttcccctgggaagcccggccctcagggctccagtggggacccaggccccccgggcccaccaggcaaagagggactccccggccctcagggccctcctggcttccagggacttcagggcaccgttggggagcctggggtgcctggacctcggggactgccaggcttgcctggggtaccaggcatgccaggccccaagggcccccccggccctcctggcccatcaggagcggtggtgcccctggccctgcagaatgagccaaccccagcaccggaggacaatggtaagtccaagccctccctccagccagggggacagggcagtgcatgtgcttgagactgagccaacccccagtgtgtggccccacccatgttatttttgtttttgtttttgttttgagacagggtctcactctgttgcccaggctggagtgcagtggcgtgatctcggctcactgcaacctccacatcccgggttcaagtgattctcctgccttagcctcccaggtagctgggactacaagcgtgtgcccccacagccagctaatttttgtatttttagtagagagggggtttcaccgtgttggccaggctggtctcaaactcctggcctcaagtgatccacctaccttagtctcccaaagtgctgggattacaggtgtgagccaccacgtcttgtcccccgctgcatattatttaacagcaaaggcatcataggggctggcacaggagccctgctgccagaacaggcctccataccaggcatgtgtttctctctaaacgccattgggttctctagtgctcatttgttttatgtattatgtgtgtatgtatgggacagggtctcactctgtcacccaggctggaatgacgaagtgaagtagtgcaaacatagctcactgcagctttgacctcctgggcttaggtgatcttcccactcagactcctgcgtagctgggaccacaggggtatgccaccacacctggctaattttttattttcctttttgtagagacagggtcttgctatgttgcccaggctggtcttgaactcctggcctcaagcaaccctcctgcctcagtcttgcaaagtgctgggattccaggtgggagccactgcacctggctcttgcacttgtttatttataggagccagccctcagaagacaaacacaatgcaaaacatttccttcagggaagcctgctggccgccctgagcgctcttccctcgttttacatcctcactctggagatagatgggctccctcggttagctccatcaacatgtggatggaaccctctgctattgatgactacatttaatttctttttgagaaaggtgttagatgttacggtgccttctagtcttttgataattaaacctttggcaaaactcgaatgtttggttagcaaccaagcctatttttctctcctttgacccaaccgctattctacttgattttggtcggtgaggcccgggttatttttgttgatccgtgagcccagttttggtgctgggttctcacatccaagtgttcctgggttccgtatgattccagactgacgctgaacatctgtgcctgccctgcttcttgttgttgcttctgttatttctgtcattgtgaagacggatccagacacagaagaacaaagacccagtcaaagatcttttccagattatgtggttttggcttgtgctctgcagtccactttgggtcatgcttgctgcgagcacgtccgtgaacgtcagctgtgggcctcgtgcagggacgctcaggctgctcccagcgggaccacagttttggcctctgaaacacagctgaagaaaggcagagtgctttctgtgatcttttaatcaatgttttccacttttgcattcctaggctgcccgcctcactggaagaacttcacagacaaatgctactatttttcagttgagaaagaaatttttgaggatgcaaagcttttctgtgaagacaagtcttcacatcttgttttcataaacactagagaggaacagcaatggataaaaaaacagatggtagggagagagagccactggatcggcctcacagactcagagcgtgaaaatgaatggaagtggctggatgggacatctccagactacaaaaattggaaagctggacagccggataactggggtcatggccatgggccaggagaagactgtgctgggttgatttatgctgggcagtggaacgatttccaatgtgaagacgtcaataacttcatttgcgaaaaagacagggagacagtactgtcatctgcattataacggactgtgatgggatcacatgagcaaattttcagctctcaaaggcaaaggacactcctttctaattgcatcaccttctcatcagattgaaaaaaaaaaagcactgaaaaccaattactgaaaaaaaattgacagctagtgttttttaccatccgtcattacccaaagacttgggaactaaaatgttccccagggtgatatgctgattttcattgtgcacatggactgaatcacatagattctcctccgtcagtaaccgtgcgattatacaaattatgtcttccaaagtatggaacactccaatcagaaaaaggttatcattggtcgttgagttatgggaagaacttaagcatatactgtgtaaacagtgccatacatttctaaaatcccaagtgtaggaaaaatatgcagacatacagatatataggccaactattagtaataatatgaaatatacttaaagagcttttaaaactttgtatttttgtacaaaatatttgtcttttacaatttttttcctttttttttttttgtcattttaccgacataatacatggagccaaagaaaacaataatggtactaataaaaactcctagggtttcctgtcagatttaattctacccagtggcaaagaattttttcaattgtggctttaaaaaaataattaaatatacatgtgtata

SEQ ID NO: 4684 - DNA, 587 bp, Homo sapiens
  source 1..587: mol_type = unassigned DNA; mol_type = unassigned DNA
tggcaaacctggtcgaagccgactattcctactggaccctgggctacgtcatctctctggaaggagcacagaagctggttggagccaatccttttgggaagatgctgccagtggatgagtttctgccagtcatgtacaacaagcatcccgtcctcctctcaagtcctcactgccatctcttccaaacactttctgatgactgccaacggtgaacaaacccgtgcaccctaggagaaggcattacccctctgtggcagaggtggtcgtgttcatcaactcctccaggtttctcctgcatttcccacctcccctgtactcacatcgggcccggggactggttgatgggctgtgaacagaagtgacaggtgtcgctttggtctaaggcagttgggaacagtttgtgagttctctttactctctttatcatcactgtgactggaagggaaacaccgagatggcgaagttgcaagatggaagctgcctggatctgtgagctgctgttagagaaaagctactaaggagtttcctggcttgcattacactgtcccgtgaaagaaaaaataaacctcggtcttaagctgttgaaa

SEQ ID NO: 4685 - DNA, 4723 bp, Homo sapiens
  source 1..4723: mol_type = unassigned DNA; mol_type = unassigned DNA
ttttctattcttttactttcaacctatttttgtcttttaatctaaaggctgcctcttatagataccacatggttgtattaatttttaaaacttactatgccaaattcttccttcattgcagtgttttattcatttgccttcactacatttttttccagatccttaaggtcagccagaggtgagagactagggacttctcaagtttttcctgggcgtgtggacagccctgaatatgcctggggccttctagattctcagggatattttggagcaaatcaaactccctatggacctcttattccttggtttttccttttaagttttttggtgggcttcttgttagcatcagctgataatgcttctcaaacagctgtaatgttaaacagttgttgctcatgggttttgacaaatgacctgcagatagtgctgttcacagaaaatgaactctgagtcaggtcaaatcaagacaagctctgagaatgtagcttttcaaggagctactagacaggttgaatagagattattttctgggggcaggtctttaagggagtctcagtccattttgtccctgccagtggcttctgggttggtggggtttgccgctctcttagttgtgaggctactggttttcaaggcttttgtagggctggggtgaacaggttaggattagggcagctgtgaacttcacaaagctcactgtgttaacagagattcagcagtaggtcttgatcaaacactccttggattattgcagtactttaactaatttccataggagtgtacttattaaatcttgtcaaaaaactgatgatgcttagaactatgttgggcactatgagggatacacaaaaatatgataccctcttgtcttcccagacctcataatactagtgtgacacattagcctggaggaacttctaaggaataaagggaagcctctctgtctttgtctgtgtgggggaggggtgtttgcagaactaactctctctttctctggcctttgtggtggggacctttgacttgttaatctccagacgtgttttatgtgatgcagggcactcaacacaagccagctgaaggcactgaatattgaaatgctgcctggctatcgagatccctattcctccaggcctctaacaaggggtgaaatcggctgctttctcagccactactcagtctggaaagaggtaattgatcgagagctagagaagactcttgtaattgaagacgatgtgcgttttgagcatcagtttaagaagaagctgatgaagctgatggataacattgaccaggctcagctggactgggaactgatttatattggtaggaagaggatgcaagtaaaggagccagagaaagcagtgcccaatgtggcaaacctggtcgaagccgactattcctactggaccctgggctacgtcatctctctggaaggagcacagaagctggttggagccaatccttttgggaagatgctgccagtggatgagtttctgccagtcatgtacaacaagcatcccgtagccgagtacaaggagtattatgaatccagggacctgaaagccttctctgcagaacccttgctcatctaccctacgcactacacaggccagccggggtacctgagtgacacggagacctccaccatctgggacaatgagacagtggccaccgactgggataggacacatgcctggaagtcccggaagcaaagccgcatctacagcaatgccaagaacacagaggccctgccaccgccaacctccctggacactgtgccttcaagggatgagctatgaaggctccctgggagtgtggcccacatcagttcaacatcctctggtttttctaaagggctattcatctgtttgctccagttttctgttttgttttgttcttagtggtcacagtcatctaaccaaagtgatctagtgtgatagatcgaaattaacatatttttgaccatggaaggaaataaggaaattcaacccaaatttcccaagacggctgaaagacaggttttttggaaactgttaagataaactgtaatccagacacctaattcttcagttcactactcatgtgatactgattcccacattaaggttgaacaacatggctcagagtcttgttcaagagaaagtgatcaccgagctgtcacatcagcaaatatgtagtcaaggcagccaggccaactagaccacacttattggtctagtttgtccgttttatatgacattgaaaacttgtgtgtgcaacttttgggggacaggaatcacttaaaatcatatttatttggctttttatttaaaggattctgtcacaagtcttattgaaaagtagattttttaaaaaaaaaaaatcttagtccctgttatccagtaggggtgggtatttgggtccgactgagacttggcctgtgaccatcatggcagttggagttctcatatagaggtgaccagtttgccatgtggatataatttagtagatatttgacagtttgtgtaggtatttgagggaaaaaactcaatgtttggcttttttattatggccactcgagtcaggatgctctatttataaagataaatgtaatatataaagggtgaggactggctgtgcatcctgccctgtcccgggtttgcgcgctgctacagagcttcacgctctccgctccaccccttagcctgggaacccaccgcaggtgtgagttctgtgagtcactgctaagagacagagcacattttcaggccagcaactatccttgccagagttttttcattatattttgaattatttattttacaaaatgggcgaagatattgtctttaggataaggcagagaaacagatgttgcagacttccacggcacccgggggagtggtgggtgtggacacattggttcggcaatctgattctcctgaatttcccagccaggctcttgtggggaggcctgtggatggggggatttgaactatttggaaacaaatgattctctatctcaggtgagaaacctggtcagaaacaaagggctggtcacctgatttaggccagcaaccagggaagctcttagaatcccaggcggacaccctttctcaaaagatatcccctaagagtcctttctgctttcttcacagattgattttatgtaaaatgcagagttggactacacgatttcttcccactccacaatctgtcatcctagtatagatcatggtggtttccctcaagtttatgttctcatgccctcaatctgtaaatttttgtctccagaaaaaccctcccaggcatcccataccagcaccgttcctcatcactgtccatgcaccatgcagccatatggggggccgtgcacaccccaaaccctgagcttcacacttaaactcatggggagggcccttcagagcagagtccacaggcgggtggtgctacatacacaagcttagtgtacgagtgtaagatacactttaagccagacacctaattcttcagttcactgcccatgtgatactgattgccacattaaggttgaacagcatggctcagagtctagagaaagtgatcaccaagctgtctcatcaccaaataggtagtcaaggcagcctcatctccccaggtgaggggcgggtccccactttaggacaagaggcagcttgccttccaccagacgccagcctcggccttccttcccgactcactgtgggtacccttctacactgaccagcaagctaggccgctggaggaaagggaactcacccaactctaaattgtgccgcttagacttagctgtcagtgtgacttcctttcccacccacccccagaaaaacagaaagagcatctggggagcgagtgaaaattccttaggtgattcctaagatttccttgggtatctggtttttgttttcatatttgagtgtgtgcatgtgtgcatgactttaatgacttttttaatggggtgggaggtggctggggtgctggggttgaaggaagtttgggttgatttttgtggtgttttgtttaatagagaattttttttttcctgttcccctgtcagctggtctgacagatttaagaactctcattcttaaaagactttggacttaaattctagcattttagactaggactgttctactgtgaagaaagttctgtctcctttagcccggtttgtttctccctgctcaggtctagaatcccaagcagtgttcttttctggtgaacactgtgagccgcagatgtgactttttttttaaagtcatctcttcagcaatccagaggttccttgacctcattatttgtcctatctctcccttatagtcctaagccaagacatttgacctttgacatttgacctttgcagtgtcatgtgagggcgtcagtatagaggcctttgcatctgggcctggcacccgctctctgcctctggaggctaaaccctgtctggatttctcttgggatctaacgtgggatcttctggacagacaaccgtgacatcagcagtgctggtgctgctgtgtgtggactgaacacctgcactttgcagaggacacgctgcatgggccccgcttgcggttcattcaggcctgctgcaggagctctgagaacaagaaagagtggacacccgttcccctgcatcatctgtcttgcgtgctatttcagagtggggaagtgataaactatttgccttctggagctctttgtgaaaaattaaaaaaaaacttagctc

SEQ ID NO: 4686 - DNA, 5177 bp, Homo sapiens
  source 1..5177: mol_type = unassigned DNA; mol_type = unassigned DNA
cacaactcgcggctctagggaaggccacagacctcagctgtacgagcggaacctggactagaggaactttcctcaggactcagggcacacagcccctcggccactactgtctgcgagcccgaggcgcaggggagcgccagcggctgcaggtacgctgcgcacccgcactggggcctgggcggtgcagcggcggcgggagggtcctgggaaccgcagccgccgaggccagtgtgtgagccggccggccgcggcaagccgcatcccccggccgcccctcgcagccccttgctccccggcagccgccgccgccctcaggcagcccagccgggcgctcgcgccaggacttccccgccgcccgcctcggcccggaacatggctgcgcgccctgctgccaccctcgcctggtcgctactgctcctctcctcagccctgctccgcgaaggctgccgagcgcgcttcgtcgccgagcgggactcggaggacgacggagaggagccggtggttttcccggagtcgcccctgcagagccccacggtgctcgtggcggtcctcgcccgcaacgcggcgcacacgctgccgcacttcctcggctgcctggagcggctggactaccccaagagcaggatggccatctgggcagccactgatcacaatgtggataatacaacagaaatattcagggagtggttgaaaaatgtacagagactctatcactatgtggagtggaggcctatggatgaaccagagtcttaccctgatgaaattggaccaaagcactggccaacctcccggtttgcccatgtgatgaaactacgacaggcagcccttcgaactgcgagggaaaaatggtcagactacattctgttcatagatgttgacaatttcctgactaatccacagaccctcaatctactgattgcagaaaacaaaactattgtggcccccatgctggagtctcggggcctgtattctaatttctggtgcggaatcacccctaagggcttctataagaggaccccagactacgttcagattcgagaatggaagaggacaggctgcttccccgtccccatggtccactccaccttcctaattgacctcaggaaggaggcctcggacaagctgactttctaccccccacaccaggactacacctggacctttgatgacatcattgtctttgccttctccagcaggcaagcaggcatccagatgtacctctgcaacagagagcactatggctacctgcccatccccctgaagccccatcagacactgcaggaagacatcgagaacctcatccatgtgcagattgaagcaatgattgaccgtcctccaatggaaccctcccagtatgtctcagttgtccctaaatatccagacaagatgggatttgatgagattttcatgataaacctcaaacgcagaaaggacaggcgggaccggatgctgcgcacactgtatgaacaggagattgaggtcaagattgtcgaggctgtggatggaaaggcactcaacacaagccagctgaaggcactgaatattgaaatgctgcctggctatcgagatccctattcctccaggcctctaacaaggggtgaaatcggctgctttctcagccactactcagtctggaaagaggtaattgatcgagagctagagaagactcttgtaattgaagacgatgtgcgttttgagcatcagtttaagaagaagctgatgaagctgatggataacattgaccaggctcagctggactgggaactgatttatattggtaggaagaggatgcaagtaaaggagccagagaaagcagtgcccaatgtggcaaacctggtcgaagccgactattcctactggaccctgggctacgtcatctctctggaaggagcacagaagctggttggagccaatccttttgggaagatgctgccagtggatgagtttctgccagtcatgtacaacaagcatcccgtagccgagtacaaggagtattatgaatccagggacctgaaagccttctctgcagaacccttgctcatctaccctacgcactacacaggccagccggggtacctgagtgacacggagacctccaccatctgggacaatgagacagtggccaccgactgggataggacacatgcctggaagtcccggaagcaaagccgcatctacagcaatgccaagaacacagaggccctgccaccgccaacctccctggacactgtgccttcaagggatgagctatgaaggctccctgggagtgtggcccacatcagttcaacatcctctggtttttctaaagggctattcatctgtttgctccagttttctgttttgttttgttcttagtggtcacagtcatctaaccaaagtgatctagtgtgatagatcgaaattaacatatttttgaccatggaaggaaataaggaaattcaacccaaatttcccaagacggctgaaagacaggttttttggaaactgttaagataaactgtaatccagacacctaattcttcagttcactactcatgtgatactgattcccacattaaggttgaacaacatggctcagagtcttgttcaagagaaagtgatcaccgagctgtcacatcagcaaatatgtagtcaaggcagccaggccaactagaccacacttattggtctagtttgtccgttttatatgacattgaaaacttgtgtgtgcaacttttgggggacaggaatcacttaaaatcatatttatttggctttttatttaaaggattctgtcacaagtcttattgaaaagtagattttttaaaaaaaaaaaatcttagtccctgttatccagtaggggtgggtatttgggtccgactgagacttggcctgtgaccatcatggcagttggagttctcatatagaggtgaccagtttgccatgtggatataatttagtagatatttgacagtttgtgtaggtatttgagggaaaaaactcaatgtttggcttttttattatggccactcgagtcaggatgctctatttataaagataaatgtaatatataaagggtgaggactggctgtgcatcctgccctgtcccgggtttgcgcgctgctacagagcttcacgctctccgctccaccccttagcctgggaacccaccgcaggtgtgagttctgtgagtcactgctaagagacagagcacattttcaggccagcaactatccttgccagagttttttcattatattttgaattatttattttacaaaatgggcgaagatattgtctttaggataaggcagagaaacagatgttgcagacttccacggcacccgggggagtggtgggtgtggacacattggttcggcaatctgattctcctgaatttcccagccaggctcttgtggggaggcctgtggatggggggatttgaactatttggaaacaaatgattctctatctcaggtgagaaacctggtcagaaacaaagggctggtcacctgatttaggccagcaaccagggaagctcttagaatcccaggcggacaccctttctcaaaagatatcccctaagagtcctttctgctttcttcacagattgattttatgtaaaatgcagagttggactacacgatttcttcccactccacaatctgtcatcctagtatagatcatggtggtttccctcaagtttatgttctcatgccctcaatctgtaaatttttgtctccagaaaaaccctcccaggcatcccataccagcaccgttcctcatcactgtccatgcaccatgcagccatatggggggccgtgcacaccccaaaccctgagcttcacacttaaactcatggggagggcccttcagagcagagtccacaggcgggtggtgctacatacacaagcttagtgtacgagtgtaagatacactttaagccagacacctaattcttcagttcactgcccatgtgatactgattgccacattaaggttgaacagcatggctcagagtctagagaaagtgatcaccaagctgtctcatcaccaaataggtagtcaaggcagcctcatctccccaggtgaggggcgggtccccactttaggacaagaggcagcttgccttccaccagacgccagcctcggccttccttcccgactcactgtgggtacccttctacactgaccagcaagctaggccgctggaggaaagggaactcacccaactctaaattgtgccgcttagacttagctgtcagtgtgacttcctttcccacccacccccagaaaaacagaaagagcatctggggagcgagtgaaaattccttaggtgattcctaagatttccttgggtatctggtttttgttttcatatttgagtgtgtgcatgtgtgcatgactttaatgacttttttaatggggtgggaggtggctggggtgctggggttgaaggaagtttgggttgatttttgtggtgttttgtttaatagagaattttttttttcctgttcccctgtcagctggtctgacagatttaagaactctcattcttaaaagactttggacttaaattctagcattttagactaggactgttctactgtgaagaaagttctgtctcctttagcccggtttgtttctccctgctcaggtctagaatcccaagcagtgttcttttctggtgaacactgtgagccgcagatgtgactttttttttaaagtcatctcttcagcaatccagaggttccttgacctcattatttgtcctatctctcccttatagtcctaagccaagacatttgacctttgacatttgacctttgcagtgtcatgtgagggcgtcagtatagaggcctttgcatctgggcctggcacccgctctctgcctctggaggctaaaccctgtctggatttctcttgggatctaacgtgggatcttctggacagacaaccgtgacatcagcagtgctggtgctgctgtgtgtggactgaacacctgcactttgcagaggacacgctgcatgggccccgcttgcggttcattcaggcctgctgcaggagctctgagaacaagaaagagtggacacccgttcccctgcatcatctgtcttgcgtgctatttcagagtggggaagtgataaactatttgccttctggagctctttgtgaaaaattaaaaaaaaacttagctc

SEQ ID NO: 4687 - DNA, 2325 bp, Homo sapiens
  source 1..2325: mol_type = unassigned DNA; mol_type = unassigned DNA
ttttcgtttttttgttctatgtatgcctagatttagctttaataatctgtcagcgttacagaattttcctgtttgctttcatatcaaatgtggatttcattcctcattttcttgttatttcctgtaggtggattacagtgttccattctgctctccagaatgggaattccttgcctcccttttgatcctttcatgccttttttgttcattccaggccatgagtttgctttttcttcagagggaaaaaatcaatttcctctgggctgaagaatagccgagtgtttttattagtccccaatgctgtgttttacttttttaataaaggagcattttttaggtctatagacatacctgaaacaaccacttatttaattgcagtgtcaaactcagcatcagacacagttcaggttccttctcctcgcttgtcactcagcagtatgttttctgattgttggctttgtccctctcttggatcctcaggcatccagatgtacctctgcaacagagagcactatggctacctgcccatccccctgaagccccatcagacactgcaggaagacatcgagaacctcatccatgtgcagattgaagcaatgattgaccgtcctccaatggaaccctcccagtatgtctcagttgtccctaaatatccagacaagatgggatttgatgagattttcatgataaacctcaaacgcagaaaggacaggcgggaccggatgctgcgcacactgtatgaacaggagattgaggtcaagattgtcgaggctgtggatggaaaggcactcaacacaagccagctgaaggcactgaatattgaaatgctgcctggctatcgagatccctattcctccaggcctctaacaaggggtgaaatcggctgctttctcagccactactcagtctggaaagaggtaattgatcgagagctagagaagactcttgtaattgaagacgatgtgcgttttgagcatcagtttaagaagaagctgatgaagctgatggataacattgaccaggctcagctggactgggaactgatttatattggtaggaagaggatgcaagtaaaggagccagagaaagcagtgcccaatgtggcaaacctggtcgaagccgactattcctactggaccctgggctacgtcatctctctggaaggagcacagaagctggttggagccaatccttttgggaagatgctgccagtggatgagtttctgccagtcatgtacaacaagcatcccgtagccgagtacaaggagtattatgaatccagggacctgaaagccttctctgcagaacccttgctcatctaccctacgcactacacaggccagccggggtacctgagtgacacggagacctccaccatctgggacaatgagacagtggccaccgactgggataggacacatgcctggaagtcccggaagcaaagccgcatctacagcaatgccaagaacacagaggccctgccaccgccaacctccctggacactgtgccttcaagggatgagctatgaaggctccctgggagtgtggcccacatcagttcaacatcctctggtttttctaaagggctattcatctgtttgctccagttttctgttttgttttgttcttagtggtcacagtcatctaaccaaagtgatctagtgtgatagatcgaaattaacatatttttgaccatggaaggaaataaggaaattcaacccaaatttcccaagacggctgaaagacaggttttttggaaactgttaagataaactgtaatccagacacctaattcttcagttcactactcatgtgatactgattcccacattaaggttgaacaacatggctcagagtcttgttcaagagaaagtgatcaccgagctgtcacatcagcaaatatgtagtcaaggcagccaggccaactagaccacacttattggtctagtttgtccgttttatatgacattgaaaacttgtgtgtgcaacttttgggggacaggaatcacttaaaatcatatttatttggctttttatttaaaggattctgtcacaagtcttattgaaaagtagattttttaaaaaaaaaaaatcttagtccctgttatccagtaggggtgggtatttgggtccgactgagacttggcctgtgaccatcatggcagttggagttctcatatagaggtgaccagtttgccatgtggatataatttagtagatatttgacagtttgtgtaggtatttgagggaaaaaactcaatgtttggcttttttattatggccactcgagtcaggatgctctatttataaagataaatgtaatat

SEQ ID NO: 4688 - DNA, 587 bp, Homo sapiens; identical to SEQ ID NO: 4684
  source 1..587: mol_type = unassigned DNA; mol_type = unassigned DNA

SEQ ID NO: 4689 - DNA, 4723 bp, Homo sapiens; identical to SEQ ID NO: 4685
  source 1..4723: mol_type = unassigned DNA; mol_type = unassigned DNA

SEQ ID NO: 4690 - DNA, 5177 bp, Homo sapiens; identical to SEQ ID NO: 4686
  source 1..5177: mol_type = unassigned DNA; mol_type = unassigned DNA

SEQ ID NO: 4691 - DNA, 2325 bp, Homo sapiens; identical to SEQ ID NO: 4687
  source 1..2325: mol_type = unassigned DNA; mol_type = unassigned DNA

SEQ ID NO: 4692 - DNA, 2239 bp, Homo sapiens
  source 1..2239: mol_type = unassigned DNA; mol_type = unassigned DNA
aagaaggggcgtgtcaggctgcgcaggcggccagtccattggctggaagagaccggagccgggctccgggcccgaccagaggagggcggtgctgcagggctggtccgggaggtgacgaccggcttcggagagtctatcatggcagctcggactggtcatacggccttgagaagggtagtctcgggatgccgtccgaagtcggcgacagcggccggggcgcaggcgcccgtgcggaatggcagatatttagcttcctgtggtatactgatgagcagaactcttccactacatacctcaattttgcctaaggagatatgtgcacgaactttcttcaaaatcactgcaccattaataaacaaaaggaaagaatattcagagagaagaattttaggatattcaatgcaggaaatgtatgatgtagtatcgggagtggaggattacaagcattttgttccttggtgcaaaaaatcagatgttatatcaaagagatctggatattgtaaaacaagattagaaattggatttccacctgtgttggagcgatatacatcagtagtaaccttggtgaaacctcatttagtaaaggcatcttgtactgatgggagacttttcaatcatttggagactatttggcgttttagcccaggtcttcctggctacccaagaacttgtaccttggatttttcaatttcttttgaatttcgatcacttctacattcccagcttgccacactcttttttgatgaagttgtgaagcagatggtagctgcctttgaaagaagagcatgtaagctgtatggtccagaaacaaatatacctcgggagttaatgcttcatgaagtccatcacacataaaggcaaaaaagaactggtgccacctgcttctgactttagtttgttcacttttaggaagtattttcatgacatgttttcagaagccagaaagcatttgttaaacgcagctttggttataaacctgcaccattgaaaatttgcacatagaatatagactcacttgtacatagaattatttcttcaagtataattcaaaataatatggacattatcatgttctgcattacaataatgggatgtcatcaccattgctagaatactggcatgattcttctgagcagaagttgaaactgtaaatttaaaccttttaattatcaccttacctgaaagaggttagttaagatattcacacagtatgtattatattaaccatatcacacttaagttattaaattcagactatttgtaacttattgttatagggcctgccgtatggcttaggatatttgagtaatcatatatttaaagtaaaaactttgggctgggcacagtggctcacacctgtaatcccagcacttggggaagctgaggtgggcagatcagttgaggtcaggagttctagaccagcctggtcaacatggcgaaaccccatctctactaaaaatacaaaaattagctgggcgtggtggcacacacctgtaatcccagttacttgggaggctgaggcacaagaatcgcttgaacccgggaggcggaggttgcagttagccaagatcgccctgctgcactccagcctgggcaacagagggagactctgtctccaaaaacaaaaacaaaaactgttagtgaaggttccctgggacttttgatattttaaaaattgttcttatgactagtagataaattcattgccataatgaggctagctcccagataaacagtgtattttcttctttttttttttttttttggtgagtggtccagagctttaagctacttttccagtagtttgccactttctccgaggtagtttggctgctctttcagtaatgctaattgtgtgtcaaattttgtctacaacagtaggcaacagatgaagataagttggttgaatgtctccagcactatgcatccctattttctatttattgtgtacactcactttcagtaatgtgtttcaaactggtattttttaaaaaacaaatcaatgtaaggactgaagttgaagtagcaatgtaataaagttaatttgtttattttttgtacagttagtttggttattgaaatcttcctatattgtttaaatgtgtatttgcatagacatagtaaagtgttacagcatttcatgtcttaaaaatatctatgaagatatctaaaatatctatttctatgaagaaacagactttaacaaatataagcaaaattcagttttcttttaaccagt

SEQ ID NO: 4693 - DNA, 879 bp, Homo sapiens
  source 1..879: mol_type = unassigned DNA; mol_type = unassigned DNA
cccgaccagaggagggcggtgctgcagggctggtccgggaggtgacgaccggcttcggagagtctatcatggcagctcggactggtcatacggccttgagaagggtagtctcgggatgccgtccgaagtcggcgacagcggccggggcgcaggcgcccgtgcggaatggcagatattcaatgcaggaaatgtatgatgtagtatcgggagtggaggattacaagcattttgttccttggtgcaaaaaatcagatgttatatcaaagagatctggatattgtaaaacaagattagaaattggatttccacctgtgttggagcgatatacatcagtagtaaccttggtgaaacctcatttagtaaaggcatcttgtactgatgggagacttttcaatcatttggagactatttggcgttttagcccaggtcttcctggctacccaagaacttgtaccttggatttttcaatttcttttgaatttcgatcacttctacattcccagcttgccacactcttttttgatgaagttgtgaagcagatggtagctgcctttgaaagaagagcatgtaagctgtatggtccagaaacaaatatacctcgggagttaatgcttcatgaagtccatcacacataaaggcaaaaaagaactggtgccacctgcttctgactttagtttgttcacttttaggaagtattttcatgacatgttttcagaagccagaaagcatttgttaaacgcagctttggttataaacctgcaccattgaaaatttgcacatagaatatagactcacttgtacatagaattatttcttcaagtataattcaaaataatatggacattatcatgttctgcattacaataatgggatgtcatc

SEQ ID NO: 4694 - DNA, 549 bp, Homo sapiens
  source 1..549: mol_type = unassigned DNA; mol_type = unassigned DNA
gtgcatttccgtgtctttagaggagaaggcttttttttgcgtttggcatctgagggactcaagagcggcgcgcatcaccttgggcccaaggctgtgttcgtggctcgtttgcctcgtgagaggcggtgaatcatcggcgaagcgactttggaagcaatttggccattggtgcctttgggctcttccggtctcctcccctatggcttgttgctactgctgttggaaagttttaactttgcgcagaagggttgccggctgctggctgtatgggagtttgtgtttggcggtgagcccccttctccggttccttctacctgccagatggtcagatgcgttttcccaatttctgaaagagtgctttgccctcgccatttagtgtttacaaaactaaatacagccagcataagggacttggattttttcactctgctgtaacttacaggtcctgtaaccttgaagcatagtcagctttcgattttcctgatatttagcttcctgtggtatactgatgagcagaactcttccactacatacctcaattttgcctaa

SEQ ID NO: 4695 - DNA, 1355 bp, Homo sapiens
  source 1..1355: mol_type = unassigned DNA; mol_type = unassigned DNA
ttttttttgcgtttggcatctgagggactcaagagcggcgcgcatcaccttgggcccaaggctgtgttcgtggctcgtttgcctcgtgagaggcggtgaatcatcggcgaagcgactttggaagcaatttggccattggtgcctttgggctcttccggtctcctcccctatggcttgttgctactgctgttggaaagttttaactttgcgcagaagggttgccggctgctggctgtatgggagtttgtgtttggcgatatttagcttcctgtggtatactgatgagcagaactcttccactacatacctcaattttgcctaaggagatatgtgcacgaactttcttcaaaatcactgcaccattaataaacaaaaggaaagaatattcagagagaagaattttaggatattcaatgcaggaaatgtatgatgtagtatcgggagtggaggattacaagcattttgttccttggtgcaaaaaatcagatgttatatcaaagagatctggatattgtaaaacaagattagaaattggatttccacctgtgttggagcgatatacatcagtagtaaccttggtgaaacctcatttagtaaaggcatcttgtactgatgggagacttttcaatcatttggagactatttggcgttttagcccaggtcttcctggctacccaagaacttgtaccttggatttttcaatttcttttgaatttcgatcacttctacattcccagcttgccacactcttttttgatgaagttgtgaagcagatggtagctgcctttgaaagaagagcatgtaagctgtatggtccagaaacaaatatacctcgggagttaatgcttcatgaagtccatcacacataaaggcaaaaaagaactggtgccacctgcttctgactttagtttgttcacttttaggaagtattttcatgacatgttttcagaagccagaaagcatttgttaaacgcagctttggttataaacctgcaccattgaaaatttgcacatagaatatagactcacttgtacatagaattatttcttcaagtataattcaaaataatatggacattatcatgttctgcattacaataatgggatgtcatcaccattgctagaatactggcatgattcttctgagcagaagttgaaactgtaaatttaaaccttttaattatcaccttacctgaaagaggttagttaagatattcacacagtatgtattatattaaccatatcacacttaagttattaaattcagactatttgtaacttattgttatagggcctgccgtatggcttaggatatttgagtaatcatatatttaaagtaaaaactttgggctggg

SEQ ID NO: 4696 - DNA, 4852 bp, Homo sapiens
  source 1..4852: mol_type = unassigned DNA; mol_type = unassigned DNA
atgaaacagtctcctgccctcgctccggaagagcgctgccgcagagccgggtccccaaagccggtcttgagagctgatgacaataacatgggcaatggctgctctcagaagctggcgactgctaacctcctccggttcctattgctggtcctgattccatgtatctgtgctctcgttctcttgctggtgatcctgctttcctatgttggaacattacaaaaggtctattttaaatcaaatgggagtgaacctttggtcactgatggtgaaatccaagggtccgatgttattcttacaaatacaatttataaccagagcactgtggtgtctactgcacatcccgaccaacacgttccagcctggactacggatgcttctctcccaggggaccaaagtcacaggaatacaagtgcctgtatgaacatcacccacagccagtgtcagatgctgccctaccacgccacgctgacacctctcctctcagttgtcagaaacatggaaatggaaaagttcctcaagtttttcacatatctccatcgcctcagttgctatcaacatatcatgctgtttggctgtaccctcgccttccctgagtgcatcattgatggcgatgacagtcatggactcctgccctgtaggtccttctgtgaggctgcaaaagaaggctgtgaatcagtcctggggatggtgaattactcctggccggatttcctcagatgctcccagtttagaaaccaaactgaaagcagcaatgtcagcagaatttgcttctcacctcagcaggaaaacggaaagcaattgctctgtggaaggggtgagaactttctgtgtgccagtggaatctgcatccccgggaaactgcaatgtaatggctacaacgactgtgacgactggagtgacgaggctcattgcaactgcagcgagaatctgtttcactgtcacacaggcaagtgccttaattacagccttgtgtgtgatggatatgatgactgtggggatttgagtgatgagcaaaactgtgattgcaatcccacaacagagcatcgctgcggggacgggcgctgcatcgccatggagtgggtgtgtgatggtgaccacgactgtgtggataagtctgacgaggtcaactgctcctgtcacagccagggtctggtggaatgcagaaatggacaatgtatccccagcacgtttcaatgtgatggtgacgaggactgcaaggatgggagtgatgaggagaactgcagcgtcattcagacttcatgtcaagaaggagaccaaagatgcctctacaatccctgccttgattcatgtggtggtagctctctctgtgacccgaacaacagtctgaataactgtagtcaatgtgaaccaattacattggaactctgcatgaatttgccctacaacagtacaagttatccaaattattttggccacaggactcaaaaggaagcatccatcagctgggagtcttctcttttccctgcacttgttcaaaccaactgttataaatacctcatgttcttttcttgcaccattttggtaccaaaatgtgatgtgaatacaggcgagcatatccctccttgcagggcattgtgtgaacactctaaagaacgctgtgagtctgttcttgggattgtgggcctacagtggcctgaagacacagattgcagtcaatttccagaggaaaattcagacaatcaaacctgcctgatgcctgatgaatatgtggaagaatgctcacctagtcatttcaagtgccgctcaggacagtgtgttctggcttccagaagatgtgatggccaggccgactgtgacgatgacagtgatgaggaaaactgtggttgtaaagagagagatctttgggaatgtccatccaataaacaatgtttgaagcacacagtgatctgcgatgggttcccagactgccctgattacatggacgagaaaaactgctcattttgccaagatgatgagctggaatgtgcaaaccatgcgtgtgtgtcacgtgacctgtggtgtgatggtgaagccgactgctcagacagttcagatgaatgggactgtgtgaccctctctataaatgtgaactcctcttcctttctgatggttcacagagctgccacagaacaccatgtgtgtgcagatggctggcaggagatattgagtcagctggcctgcaagcagatgggtttaggagaaccatctgtgaccaaattgatacaggaacaggagaaagagccgcggtggctgacattacactccaactgggagagcctcaatgggaccactttacatgaacttctagtaaatgggcagtcttgtgagagcagaagtaaaatttctcttctgtgtactaaacaagactgtgggcgccgccctgctgcccgaatgaacaaaaggatccttggaggtcggacgagtcgccctggaaggtggccatggcagtgttctctgcagagtgaacccagtggacatatctgtggctgtgtcctcattgccaagaagtgggttctgacagttgcccactgcttcgaggggagagagaatgctgcagtttggaaagtggtgcttggcatcaacaatctagaccatccatcagtgttcatgcagacacgctttgtgaagaccatcatcctgcatccccgctacagtcgagcagtggtggactatgacatcagcatcgttgagctgagtgaagacatcagtgagactggctacgtccggcctgtctgcttgcccaacccggagcagtggctagagcctgacacgtactgctatatcacaggctggggccacatgggcaataaaatgccatttaagctgcaagagggagaggtccgcattatttctctggaacattgtcagtcctactttgacatgaagaccatcaccactcggatgatatgtgctggctatgagtctggcacagttgattcatgcatgggtgacagcggtgggcctcttgtttgtgagaagcctggaggacggtggacattatttggattaacttcatggggctccgtctgcttttccaaagtcctggggcctggcgtttatagtaatgtgtcatatttcgtcgaatggattaaaagacagatttacatccagacctttctcctaaactaattataaggatgatcagagacttttgccagctacactaaaagaaaatggccttcttgactgtgaagagctgcctgcagagagctgtacagaagcacttttcatggacagaaatgctcaatcgtgcactgcaaatttgcatgtttgttttggactaatttttttcaatttattttttcaccttcatttttctcttatttcaagttcaatgaaagactttacaaaagcaaacaaagcagactttgtccttttgccaggcctaaccatgactgcagcacaaaattatcgactctggcgagatttaaaatcaggtgctacagtaacaggttatggaatggtctcttttatcctatcacaaaaaaagacatagatatttaggctgattaattatctctaccagtttttgtttctcaagctcagtgcatagtggtaaatttcagtgttaacattggagacttgcttttctttttctttttttataccccacaattcttttttattacacttcgaattttagggtacacgagcacaacgtgcaggttagttacatatgtatacatgtgccatgttggtgtgctgaacccagtaactcgtcatttgatttattaaaagccaagataatttacatgtttaaagtatttactattacccccttctaatgtttgcataattctgagaactgataaaagacagcaataaaagaccagtgtcatccatttaggtagcaagacatattgaatgcaaagttctttagatatcaatattaacacttgacattattggaccccccattctggatgtatatcaagatcataattttatagaagagtctctatagaactgtcctcatagctgggtttgttcaggatatatgagttggctgattgagactgcaacaactacatctatatttatgggcaatattttgttttacttatgtggcaaagaactggatattaaactttgcaaaagagaatttagatgagagatgcaattttttaaaaagaaaattaatttgcatccctcgtttaattaaatttatttttcagttttcttgcgttcatccataccaacaaagtcataaagagcatattttagagcacagtaagactttgcatggagtaaaacattttgtaattttcctcaaaagatgtttaatatctggtttcttctcattggtaattaaaattttagaaatgatttttagctctaggccactttacgcaactcaatttctgaagcaattagtggtaaaaagtatttttccccactaaaaaactttaaaacacaaatcttcatatatacttaatttaattagtcaggcatccattttgccttttaaacaactaggattccctactaacctccaccagcaacctggactgcctcagcattccaaatagatactacctgcaattttatacatgtatttttgtatcttttctgtgtgtaaacatagttgaaattcaaaaagttgtagcaatttctatactattcatctcctgtccttcagtttgtataaacctaaggagagtgtgaaatccagcaactgaattgtggtcacgattgtatgaaagttcaagaacatatgtcagttttgttacagttgtagctacatactcaatgtatcaacttttagcctgctcaacttaggctcagtgaaatatatatattatacttattttaaataattcttaatacaaataaaatggtaatggtctaatca

SEQ ID NO: 4697 - DNA, 3200 bp, Homo sapiens
  source 1..3200: mol_type = unassigned DNA; mol_type = unassigned DNA
ttttacttggctgtctcaccacagccagccccatgaagaggaacattacaaaaggtctattttaaatcaaatgggagtgaacctttggtcactgatggtgaaatccaagggtccgatgttattcttacaaatacaatttataaccagagcactgtggtgtctactgcacatcccgaccaacacgttccagcctggactacggatgcttctctcccaggggaccaaagtcacaggaatacaagtgcctgtatgaacatcacccacagccagtgtcagatgctgccctaccacgccacgctgacacctctcctctcagttgtcagaaacatggaaatggaaaagttcctcaagtttttcacatatctccatcgcctcagttgctatcaacatatcatgctgtttggctgtaccctcgccttccctgagtgcatcattgatggcgatgacagtcatggactcctgccctgtaggtccttctgtgaggctgcaaaagaaggctgtgaatcagtcctggggatggtgaattactcctggccggatttcctcagatgctcccagtttagaaaccaaactgaaagcagcaatgtcagcagaatttgcttctcacctcagcaggaaaacggaaagcaattgctctgtggaaggggtgagaactttctgtgtgccagtggaatctgcatccccgggaaactgcaatgtaatggctacaacgactgtgacgactggagtgacgaggctcattgcaactgcagcgagaatctgtttcactgtcacacaggcaagtgccttaattacagccttgtgtgtgatggatatgatgactgtggggatttgagtgatgagcaaaactgtgattgcaatcccacaacagagcatcgctgcggggacgggcgctgcatcgccatggagtgggtgtgtgatggtgaccacgactgtgtggataagtctgacgaggtcaactgctcctgtcacagccagggtctggtggaatgcagaaatggacaatgtatccccagcacgtttcaatgtgatggtgacgaggactgcaaggatgggagtgatgaggagaactgcagcgtcattcagacttcatgtcaagaaggagaccaaagatgcctctacaatccctgccttgattcatgtggtggtagctctctctgtgacccgaacaacagtctgaataactgtagtcaatgtgaaccaattacattggaactctgcatgaatttgccctacaacagtacaagttatccaaattattttggccacaggactcaaaaggaagcatccatcagctgggagtcttctcttttccctgcacttgttcaaaccaactgttataaatacctcatgttcttttcttgcaccattttggtaccaaaatgtgatgtgaatacaggcgagcatatccctccttgcagggcattgtgtgaacactctaaagaacgctgtgagtctgttcttgggattgtgggcctacagtggcctgaagacacagattgcagtcaatttccagaggaaaattcagacaatcaaacctgcctgatgcctgatgaatatgtggaagaatgctcacctagtcatttcaagtgccgctcaggacagtgtgttctggcttccagaagatgtgatggccaggccgactgtgacgatgacagtgatgaggaaaactgtggttgtaaagagagagatctttgggaatgtccatccaataaacaatgtttgaagcacacagtgatctgcgatgggttcccagactgccctgattacatggacgagaaaaactgctcattttgccaagatgatgagctggaatgtgcaaaccatgcgtgtgtgtcacgtgacctgtggtgtgatggtgaagccgactgctcagacagttcagatgaatgggactgtgtgaccctctctataaatgtgaactcctcttcctttctgatggttcacagagctgccacagaacaccatgtgtgtgcagatggctggcaggagatattgagtcagctggcctgcaagcagatgggtttaggagaaccatctgtgaccaaattgatacaggaacaggagaaagagccgcggtggctgacattacactccaactgggagagcctcaatgggaccactttacatgaacttctagtaaatgggcagtcttgtgagagcagaagtaaaatttctcttctgtgtactaaacaagactgtgggcgccgccctgctgcccgaatgaacaaaaggatccttggaggtcggacgagtcgccctggaaggtggccatggcagtgttctctgcagagtgaacccagtggacatatctgtggctgtgtcctcattgccaagaagtgggttctgacagttgcccactgcttcgaggggagagagaatgctgcagtttggaaagtggtgcttggcatcaacaatctagaccatccatcagtgttcatgcagacacgctttgtgaagaccatcatcctgcatccccgctacagtcgagcagtggtggactatgacatcagcatcgttgagctgagtgaagacatcagtgagactggctacgtccggcctgtctgcttgcccaacccggagcagtggctagagcctgacacgtactgctatatcacaggctggggccacatgggcaataaaatgccatttaagctgcaagagggagaggtccgcattatttctctggaacattgtcagtcctactttgacatgaagaccatcaccactcggatgatatgtgctggctatgagtctggcacagttgattcatgcatgggtgacagcggtgggcctcttgtttgtgagaagcctggaggacggtggacattatttggattaacttcatggggctccgtctgcttttccaaagtcctggggcctggcgtttatagtaatgtgtcatatttcgtcgaatggattaaaagacagatttacatccagacctttctcctaaactaattataaggatgatcagagacttttgccagctacactaaaagaaaatggccttcttgactgtgaagagctgcctgcagagagctgtacagaagcacttttcatggacagaaatgctcaatcgtgcactgcaaatttgcatgtttgttttggactaatttttttcaatttattttttcaccttcatttttctcttatttcaagttcaatgaaagactttacaaaagcaaacaaagcagact

SEQ ID NO: 4698 - DNA, 3112 bp, Homo sapiens
  source 1..3112: mol_type = unassigned DNA; mol_type = unassigned DNA
agttcagtttgtctctcttgagcttggagaaaatcatccgtagtgcctccccgggggacacgtagaggagagaaaagcgaccaagataaaagtggacagaagaataagcgagactttttatccatgaaacagtctcctgccctcgctccggaagagcgctgccgcagagccgggtccccaaagccggtcttgagagctgatgacaataacatgggcaatggctgctctcagaagctggcgactgctaacctcctccggttcctattgctggtcctgattccatgtatctgtgctctcgttctcttgctggtgatcctgctttcctatgttggtgcctgtatgaacatcacccacagccagtgtcagatgctgccctaccacgccacgctgacacctctcctctcagttgtcagaaacatggaaatggaaaagttcctcaagtttttcacatatctccatcgcctcagttgctatcaacatatcatgctgtttggctgtaccctcgccttccctgagtgcatcattgatggcgatgacagtcatggactcctgccctgtaggtccttctgtgaggctgcaaaagaaggctgtgaatcagtcctggggatggtgaattactcctggccggatttcctcagatgctcccagtttagaaaccaaactgaaagcagcaatgtcagcagaatttgcttctcacctcagcaggaaaacggaaagcaattgctctgtggaaggggtgagaactttctgtgtgccagtggaatctgcatccccgggaaactgcaatgtaatggctacaacgactgtgacgactggagtgacgaggctcattgcaactgcagcgagaatctgtttcactgtcacacaggcaagtgccttaattacagccttgtgtgtgatggatatgatgactgtggggatttgagtgatgagcaaaactgtgattgcaatcccacaacagagcatcgctgcggggacgggcgctgcatcgccatggagtgggtgtgtgatggtgaccacgactgtgtggataagtctgacgaggtcaactgctcctgtcacagccagggtctggtggaatgcagaaatggacaatgtatccccagcacgtttcaatgtgatggtgacgaggactgcaaggatgggagtgatgaggagaactgcagcgtcattcagacttcatgtcaagaaggagaccaaagatgcctctacaatccctgccttgattcatgtggtggtagctctctctgtgacccgaacaacagtctgaataactgtagtcaatgtgaaccaattacattggaactctgcatgaatttgccctacaacagtacaagttatccaaattattttggccacaggactcaaaaggaagcatccatcagctgggagtcttctcttttccctgcacttgttcaaaccaactgttataaatacctcatgttcttttcttgcaccattttggtaccaaaatgtgatgtgaatacaggcgagcatatccctccttgcagggcattgtgtgaacactctaaagaacgctgtgagtctgttcttgggattgtgggcctacagtggcctgaagacacagattgcagtcaatttccagaggaaaattcagacaatcaaacctgcctgatgcctgatgaatatgtggaagaatgctcacctagtcatttcaagtgccgctcaggacagtgtgttctggcttccagaagatgtgatggccaggccgactgtgacgatgacagtgatgaggaaaactgtggttgtaaagagagagatctttgggaatgtccatccaataaacaatgtttgaagcacacagtgatctgcgatgggttcccagactgccctgattacatggacgagaaaaactgctcattttgccaagatgatgagctggaatgtgcaaaccatgcgtgtgtgtcacgtgacctgtggtgtgatggtgaagccgactgctcagacagttcagatgaatgggactgtgtgaccctctctataaatgtgaactcctcttcctttctgatggttcacagagctgccacagaacaccatgtgtgtgcagatggctggcaggagatattgagtcagctggcctgcaagcagatgggtttaggagaaccatctgtgaccaaattgatacaggaacaggagaaagagccgcggtggctgacattacactccaactgggagagcctcaatgggaccactttacatgaacttctagtaaatgggcagtcttgtgagagcagaagtaaaatttctcttctgtgtactaaacaagactgtgggcgccgccctgctgcccgaatgaacaaaaggatccttggaggtcggacgagtcgccctggaaggtggccatggcagtgttctctgcagagtgaacccagtggacatatctgtggctgtgtcctcattgccaagaagtgggttctgacagttgcccactgcttcgaggggagagagaatgctgcagtttggaaagtggtgcttggcatcaacaatctagaccatccatcagtgttcatgcagacacgctttgtgaagaccatcatcctgcatccccgctacagtcgagcagtggtggactatgacatcagcatcgttgagctgagtgaagacatcagtgagactggctacgtccggcctgtctgcttgcccaacccggagcagtggctagagcctgacacgtactgctatatcacaggctggggccacatgggcaataaaatgccatttaagctgcaagagggagaggtccgcattatttctctggaacattgtcagtcctactttgacatgaagaccatcaccactcggatgatatgtgctggctatgagtctggcacagttgattcatgcatgggtgacagcggtgggcctcttgtttgtgagaagcctggaggacggtggacattatttggattaacttcatggggctccgtctgcttttccaaagtcctggggcctggcgtttatagtaatgtgtcatatttcgtcgaatggattaaaagacagatttacatccagacctttctcctaaactaattataaggatgatcagagacttttgccagctacactaaaagaaaatggccttcttgactgt

SEQ ID NO: 4699 - DNA, 3018 bp, Homo sapiens
  source 1..3018: mol_type = unassigned DNA; mol_type = unassigned DNA
atgaaacagtctcctgccctcgctccggaagagcgctgccgcagagccgggtccccaaagccggtcttgagagctgatgacaataacatgggcaatggctgctctcagaagctggcgactgctaacctcctccggttcctattgctggtcctgattccatgtatctgtgctctcgttctcttgctggtgatcctgctttcctatgttggaacattacaaaaggtctattttaaatcaaatgggagtgaacctttggtcactgatggtgaaatccaagggtccgatgttattcttacaaatacaatttataaccagagcactgtggtgtctactgcacatcccgaccaacacgttccagcctggactacggatgcttctctcccaggggaccaaagtcacaggaatacaagtgcctgtatgaacatcacccacagccagtgtcagatgctgccctaccacgccacgctgacacctctcctctcagttgtcagaaacatggaaatggaaaagttcctcaagtttttcacatatctccatcgcctcagttgctatcaacatatcatgctgtttggctgtaccctcgccttccctgagtgcatcattgatggcgatgacagtcatggactcctgccctgtaggtccttctgtgaggctgcaaaagaaggctgtgaatcagtcctggggatggtgaattactcctggccggatttcctcagatgctcccagtttagaaaccaaactgaaagcagcaatgtcagcagaatttgcttctcacctcagcaggaaaacggaaagcaattgctctgtggaaggggtgagaactttctgtgtgccagtggaatctgcatccccgggaaactgcaatgtaatggctacaacgactgtgacgactggagtgacgaggctcattgcaactgcagcgagaatctgtttcactgtcacacaggcaagtgccttaattacagccttgtgtgtgatggatatgatgactgtggggatttgagtgatgagcaaaactgtgcctgtcacagccagggtctggtggaatgcagaaatggacaatgtatccccagcacgtttcaatgtgatggtgacgaggactgcaaggatgggagtgatgaggagaactgcagcgtcattcagacttcatgtcaagaaggagaccaaagatgcctctacaatccctgccttgattcatgtggtggtagctctctctgtgacccgaacaacagtctgaataactgtagtcaatgtgaaccaattacattggaactctgcatgaatttgccctacaacagtacaagttatccaaattattttggccacaggactcaaaaggaagcatccatcagctgggagtcttctcttttccctgcacttgttcaaaccaactgttataaatacctcatgttcttttcttgcaccattttggtaccaaaatgtgatgtgaatacaggcgagcatatccctccttgcagggcattgtgtgaacactctaaagaacgctgtgagtctgttcttgggattgtgggcctacagtggcctgaagacacagattgcagtcaatttccagaggaaaattcagacaatcaaacctgcctgatgcctgatgaatatgtggaagaatgctcacctagtcatttcaagtgccgctcaggacagtgtgttctggcttccagaagatgtgatggccaggccgactgtgacgatgacagtgatgaggaaaactgtggttgtaaagagagagatctttgggaatgtccatccaataaacaatgtttgaagcacacagtgatctgcgatgggttcccagactgccctgattacatggacgagaaaaactgctcattttgccaagatgatgagctggaatgtgcaaaccatgcgtgtgtgtcacgtgacctgtggtgtgatggtgaagccgactgctcagacagttcagatgaatgggactgtgtgaccctctctataaatgtgaactcctcttcctttctgatggttcacagagctgccacagaacaccatgtgtgtgcagatggctggcaggagatattgagtcagctggcctgcaagcagatgggtttaggagaaccatctgtgaccaaattgatacaggaacaggagaaagagccgcggtggctgacattacactccaactgggagagcctcaatgggaccactttacatgaacttctagtaaatgggcagtcttgtgagagcagaagtaaaatttctcttctgtgtactaaacaagactgtgggcgccgccctgctgcccgaatgaacaaaaggatccttggaggtcggacgagtcgccctggaaggtggccatggcagtgttctctgcagagtgaacccagtggacatatctgtggctgtgtcctcattgccaagaagtgggttctgacagttgcccactgcttcgaggggagagagaatgctgcagtttggaaagtggtgcttggcatcaacaatctagaccatccatcagtgttcatgcagacacgctttgtgaagaccatcatcctgcatccccgctacagtcgagcagtggtggactatgacatcagcatcgttgagctgagtgaagacatcagtgagactggctacgtccggcctgtctgcttgcccaacccggagcagtggctagagcctgacacgtactgctatatcacaggctggggccacatgggcaataaaatgccatttaagctgcaagagggagaggtccgcattatttctctggaacattgtcagtcctactttgacatgaagaccatcaccactcggatgatatgtgctggctatgagtctggcacagttgattcatgcatgggtgacagcggtgggcctcttgtttgtgagaagcctggaggacggtggacattatttggattaacttcatggggctccgtctgcttttccaaagtcctggggcctggcgtttatagtaatgtgtcatatttcgtcgaatggattaaaagacagatttacatccagacctttctcctaaactaa

SEQ ID NO: 4700 - DNA, 582 bp, Homo sapiens
  source 1..582: mol_type = unassigned DNA; mol_type = unassigned DNA
aacagggagaatatgacaagattcaagaagagatttttgaaatcagatacaaaatgtttagtataaatgtttcaagtttggaacaggatatttagaattgcaaaaaatttatcttatccactgtgaaaggcatttatatgtcaagatgaactgtcaaggactgaggctggatgcttagattattttcccccatcaatagatggaagaggacaaaccttatccttcaactgaagtgtgttacatgtctaggtaattcctgcacttctgtcttgttgttagaggaacaggagaaagagccgcggtggctgacattacactccaactgggagagcctcaatgggaccactttacatgaacttctagtaaatgggcagtcttgtgagagcagaagtaaaatttctcttctgtgtactaaacaagactgtgggcgccgccctgctgcccgaatgaacaaaaggatccttggaggtcggacgagtcgccctggaaggtggccatggcagtgttctctgcagagtgaacccagtggacatatctgtggctgtgtcctcattgccaagaagtgggttctgacagttgccc

SEQ ID NO: 4701 - DNA, 680 bp, Homo sapiens
  source 1..680: mol_type = unassigned DNA; mol_type = unassigned DNA
ctagggcattgtgtgaacactctaaagaacgctgtgagtctgttcttgggattgtgggcctacagtggcctgaagacacagattgcagtcaatttccagaggaaaattcagacaatcaaacctgcctgatgcctgatgaatatgtggaaggttgtaaagagagagatctttgggaatgtccatccaataaacaatgtttgaagcacacagtgatctgcgatgggttcccagactgccctgattacatggacgagaaaaactgctcattttgccaagatgatgagctggaatgtgcaaaccatgcgtgtgtgtcacgtgacctgtggtgtgatggtgaagccgactgctcagacagttcagatgaatgggactgtggtgagctacttgtttctgccatctgttgtactctctcatgcctgtcagccactgaagctgaatggatcctaaattacttcctggattttactgaccaagttcatctattttgttttactgttataaaagctgatagtgctgatctatgtgtgttatttccaactcacagaaaatttccccacgaagctacttctctatttgaaatatctatattgtatggaaaaacgtttgggttcaaaatgttgtaatcatataattgctgggagaggatttaaaaactcttcattaaaacccaacttcaataa

SEQ ID NO: 4702 - DNA, 2417 bp, Homo sapiens
  source 1..2417: mol_type = unassigned DNA; mol_type = unassigned DNA
agagcagacaaaatatggggcccctggcgcttaaagttcagtttgtctctcttgagcttggagaaaatcatccgtagtgcctccccgggggacacgtagaggagagaaaagcgaccaagataaaagtggacagaagaataagcgagactttttatccatgaaacagtctcctgccctcgctccggaagagcgctgccgcagagccgggtccccaaagccggtcttgagagctgatgacaataacatgggcaatggctgctctcagaagctggcgactgctaacctcctccggttcctattgctggtcctgattccatgtatctgtgctctcgttctcttgctggtgatcctgctttcctatgttggaacattacaaaaggtctattttaaatcaaatgggagtgaacctttggtcactgatggtgaaatccaagggtccgatgttattcttacaaatacaatttataaccagagcactgtggtgtctactgcacatcccgaccaacacgttccagcctggactacggatgcttctctcccaggggaccaaagtcacaggaatacaagtgcctgtatgaacatcacccacagccagtgtcagatgctgccctaccacgccacgctgacacctctcctctcagttgtcagaaacatggaaatggaaaagttcctcaagtttttcacatatctccatcgcctcagttgctatcaacatatcatgctgtttggctgtaccctcgccttccctgagtgcatcattgatggcgatgacagtcatggactcctgccctgtaggtccttctgtgaggctgcaaaagaaggctgtgaatcagtcctggggatggtgaattactcctggccggatttcctcagatgctcccagtttagaaaccaaactgaaagcagcaatgtcagcagaatttgcttctcacctcagcaggaaaacggaaagcaattgctctgtggaaggggtgagaactttctgtgtgccagtggaatctgcatccccgggaaactgcaatgtaatggctacaacgactgtgacgactggagtgacgaggctcattgcaactgcagcgagaatctgtttcactgtcacacaggcaagtgccttaattacagccttgtgtgtgatggatatgatgactgtggggatttgagtgatgagcaaaactgtgcctgtcacagccagggtctggtggaatgcagaaatggacaatgtatccccagcacgtttcaatgtgatggtgacgaggactgcaaggatgggagtgatgaggagaactgcagcgtcattcagacttcatgtcaagaaggagaccaaagatgcctctacaatccctgccttgattcatgtggtggtagctctctctgtgacccgaacaacagtctgaataactgtagtcaatgtgaaccaattacattggaactctgcatgaatttgccctacaacagtacaagttatccaaattattttggccacaggactcaaaaggaagcatccatcagctgggagtcttctcttttccctgcacttgttcaaaccaactgttataaatacctcatgttcttttcttgcaccattttggtaccaaaatgtgatgtgaatacaggcgagcatatccctccttgcagggcattgtgtgaacactctaaagaacgctgtgagtctgttcttgggattgtgggcctacagtggcctgaagacacagattgcagtcaatttccagaggaaaattcagacaatcaaacctgcctgatgcctgatgaatatgtggaagaatgctcacctagtcatttcaagtgccgctcaggacagtgtgttctggcttccagaagatgtgatggccaggccgactgtgacgatgacagtgatgaggaaaactgtggttgtaaagagagagatctttgggaatgtccatccaataaacaatgtttgaagcacacagtgatctgcgatgggttcccagactgccctgattacatggacgagaaaaactgctcattttgccaagatgatgagctggaatgtgcaaaccatgcgtgtgtgtcacgtgacctgtggtgtgatggtgaagccgactgctcagacagttcagatgaatgggactgtggtgagctacttgtttctgccatctgttgtactctctcatgcctgtcagccactgaagctgaatggatcctaaattacttcctggattttactgaccaagttcatctattttgttttactgttataaaagctgatagtgctgatctatgtgtgttatttccaactcacagaaaatttccccacgaagctacttctctatttgaaatatctatattgtatggaaaaacgtttgggttcaaaatgttgtaatcatataattgctgggagaggatttaaaaactcttcattaaaacccaacttcaat

SEQ ID NO: 4703 - DNA, 1965 bp, Homo sapiens
  source 1..1965: mol_type = unassigned DNA; mol_type = unassigned DNA
agtttgtctctcttgagcttggagaaaatcatccgtagtgcctccccgggggacacgtagaggagagaaaagcgaccaagataaaagtggacagaagaataagcgagactttttatccatgaaacagtctcctgccctcgctccggaagagcgctgccgcagagccgggtccccaaagccggtcttgagagctgatgacaataacatgggcaatggctgctctcagaagctggcgactgctaacctcctccggttcctattgctggtcctgattccatgtatctgtgctctcgttctcttgctggtgatcctgctttcctatgttggaacattacaaaaggtctattttaaatcaaatgggagtgaacctttggtcactgatggtgaaatccaagggtccgatgttattcttacaaatacaatttataaccagagcactgtggtgtctactgcacatcccgaccaacacgttccagcctggactacggatgcttctctcccaggggaccaaagtcacaggaatacaagtgcctgtatgaacatcacccacagccagtgtcagatgctgccctaccacgccacgctgacacctctcctctcagttgtcagaaacatggaaatggaaaagttcctcaagtttttcacatatctccatcgcctcagttgctatcaacatatcatgctgtttggctgtaccctcgccttccctgagtgcatcattgatggcgatgacagtcatggactcctgccctgtaggtccttctgtgaggctgcaaaagaaggctgtgaatcagtcctggggatggtgaattactcctggccggatttcctcagatgctcccagtttagaaaccaaactgaaagcagcaatgtcagcagaatttgcttctcacctcagcaggaaaacggaaagcaattgctctgtggaaggggtgagaactttctgtgtgccagtggaatctgcatccccgggaaactgcaatgtaatggctacaacgactgtgacgactggagtgacgaggctcattgcaactgcagcgagaatctgtttcactgtcacacaggcaagtgccttaattacagccttgtgtgtgatggatatgatgactgtggggatttgagtgatgagcaaaactgtgcctgtcacagccagggtctggtggaatgcagaaatggacaatgtatccccagcacgtttcaatgtgatggtgacgaggactgcaaggatgggagtgatgaggagaactgcagcgtcattcagacttcatgtcaagaaggagaccaaagatgcctctacaatccctgccttgattcatgtggtggtagctctctctgtgacccgaacaacagtctgaataactgtagtcaatgtgaaccaattacattggaactctgcatgaatttgccctacaacagtacaagttatccaaattattttggccacaggactcaaaaggaagcatccatcagctgggagtcttctcttttccctgcacttgttcaaaccaactgttataaatacctcatgttcttttcttgcaccattttggtaccaaaatgtgatgtgaatacaggcgagcatatccctccttgcagggcattgtgtgaacactctaaagaacgctgtgagtctgttcttgggattgtgggcctacagtggcctgaagacacagattgcagtcaatttccagaggaaaattcagacaatcaaacctgcctgatgcctgatgaatatgtggaaggttaattttaaaattaattacagcagggtatctaacatggatgaacatgttagctaccttttgaatttcttctatttatggcttcttgtttgtttgttttctatttagtttccaatcaggctgcttaggtgagtgaatttgtgaacttgattgcattgaagaatttggcactcatctgttagatattgcattcattttaaaaataaagaagtcattttctatt

SEQ ID NO: 4704 - DNA, 5378 bp, Homo sapiens
  source 1..5378: mol_type = unassigned DNA; mol_type = unassigned DNA
agagcagacaaaatatggggcccctggcgcttaaagttcagtttgtctctcttgagcttggagaaaatcatccgtagtgcctccccgggggacacgtagaggagagaaaagcgaccaagataaaagtggacagaagaataagcgagactttttatccatgaaacagtctcctgccctcgctccggaagagcgctgccgcagagccgggtccccaaagccggtcttgagagctgatgacaataacatgggcaatggctgctctcagaagctggcgactgctaacctcctccggttcctattgctggtcctgattccatgtatctgtgctctcgttctcttgctggtgatcctgctttcctatgttggaacattacaaaaggtctattttaaatcaaatgggagtgaacctttggtcactgatggtgaaatccaagggtccgatgttattcttacaaatacaatttataaccagagcactgtggtgtctactgcacatcccgaccaacacgttccagcctggactacggatgcttctctcccaggggaccaaagtcacaggaatacaagtgcctgtatgaacatcacccacagccagtgtcagatgctgccctaccacgccacgctgacacctctcctctcagttgtcagaaacatggaaatggaaaagttcctcaagtttttcacatatctccatcgcctcagttgctatcaacatatcatgctgtttggctgtaccctcgccttccctgagtgcatcattgatggcgatgacagtcatggactcctgccctgtaggtccttctgtgaggctgcaaaagaaggctgtgaatcagtcctggggatggtgaattactcctggccggatttcctcagatgctcccagtttagaaaccaaactgaaagcagcaatgtcagcagaatttgcttctcacctcagcaggaaaacggaaagcaattgctctgtggaaggggtgagaactttctgtgtgccagtggaatctgcatccccgggaaactgcaatgtaatggctacaacgactgtgacgactggagtgacgaggctcattgcaactgcagcgagaatctgtttcactgtcacacaggcaagtgccttaattacagccttgtgtgtgatggatatgatgactgtggggatttgagtgatgagcaaaactgtggtaagtagcattgtttccccaaaggttttaatttaaaatcatagaaatttataaccaaaaacttacagttcattatgtgttaatatgattagcagtttaaattacaaaatgattggtttcttgttttttagaaggaggaagtttgttcagtcactgtcctcagtaatgtcttatgtgtaaatgtaatacctaaaaaatcatattaagaaaatgtttaagaagtgggatgggaagactggtaaaggttgttaatgcattaatagttttttttcctctcctcaaatgtgttctgtttctcctctggttagagccagtggcttacgttagatttgggcttttgagcaaactttgagggcagatatattgtctgtgcctgattcccttggtacatgtgactgaagtcccctcctttatttaatcctcaaatagtacagggaccacctgttcagcagctacacccagggttaggatgatgcatttgttttgtgtacacatggtgatcttatcttttaaagaataaccccactttttaaagagtcatgtccaattctgaatgccatctcatgaattaaaatcagcaaaattcctcttgctcatttacttttttggctttgtgactagcttcagaatttttaggtagcatattattgagtgacgtaggaactttgcaacatgaacaaaagggcaaactgggatgaggatacaccctggacaaatgatatcagacaatgtcctgcattagataacatcaaaatgaatgtttgggaaggatcagcggtatggtcagaggaaggcattggaatcatgaatgttaggaataaccccatgctgggaaacctggtggtttctaggagcgctgtctagctgccacttgctgtatctgtaaaaatattttaaaatgtatgtgtacaaaccattcctgtgtgactagatagaggtgggttattgcttttttctgataatagtttatttttattttattttgactaataatagttgtacatatttattgaatacagcatgatattttaatacatgtatacaatatgtaatgatcaaatcagggtaattagtgtatccatcacctcaaacatttatcatttctttgtattaggaacattcagaatcttctcatttagttatttgaaaatatgcaataaattatcattaactatagtcaccatccagtgctataaaaacctacaacttgttcctcctatctagctgtaattttgtatcagttaaacaatctctgtctctctctctcttttttttttttttttttttttgagatggagtcttgctccatcacccaggctggagtgcagtggcgctatcccggctcactgcaatctccgcctcccgggctcaagtgattctcctgcctcagcctcctgagtacttgggactacaggtgtgtgccaccacgctcagctaatttttgtatttttagtagagatggggtttcttcatgttggtcaggctggtctctaactcctgagctcatgatttgcctgcctcggcctcccaaagtgctgggattacaggcatgagccaccgcacctggcagcaatctctctttgtccctcctcctccatacccttctggcctctagtaaccactgttctactctctatttccatgagatcaactctgcatatgagtgagggcatgtggtatttctgtttctatgcctggcttatttcactaaacagaatgtcctccaggctcatccatgttgctacaaataacaggattttattcttttggcgtggctgaatagtattccattgtgtagatgtaccatattttcttctccactcattttttgatggcataaattgattccatatcatggttattgtgagtagtgctgcagtgaatgtgggggtgcagatgtctgtttgatatactgatttcctttcctttgggtatatgcccagtagtgggattgctgggttatatggaagttctatttgtagttttctcaagaacctccatattgttttccataatgactatactaatttacatttagatgtgggttatatcctgggactgactagtcttgagaaaaaggatgagaggaaattgtaattatatagatcacagaaattatagttgcaggaggccttggagatcatcagattcaacccttccctttaccagtgagataattaggaaatgcaggggattgaaaatgagtgagtgtcgtttggtagttggataggttagtggagagggccagcatgcaggtagcatgtgagaaaaaatggtcttaacaggcaacagaattcctctgaagatagcaggctatcatgaagtttgtgtgtctggatgccagttgtctccatctaatagcaataattatcactttccttcagaccagcctctgccctggctccctgtgctcttctggttcctgcccaagcacttcttatgcttttcttcttttctcaaacctatgtcctccctatactttcctctgttgatccaaaatatgctttaagatccatggtcactccggaagtctgtctatgaccatggcactgttactagactcatcatactttctcatggaatctattattcatgaatccacatacatcttctaaaacactgcttatattcagggtataccacctctcatggcaaagcatcctatggattctgccctttgtgagagcgaacttatcacttagttctttttcactaatatataaattgggacaaagttgaagtccaggctaaaaagaatcatgaatataacataaatattttgcatggcttacctagcagttcttttggatataaggccaggcatgctggcatattccttgtagtcccaactacttggaggctggggtgggaggatcacctgatcctaggaggttgaggctgcagtgagctatgatcacaccactgcactccagcctgggagaaagagagagaccttgtctcaaaaaaaagataatcaattaaaaacttaagcttagcatcaggagagatgacaaggagatacgtgccttcccaatttgccagacaggtaagttataattcctagaaacgtgagagagctgttacagatacatcaaatccgctagccgcattgtgaaacacaaatcacagttctgttttttgaaccagggtagaaatcataaatttttcataaggaaagaaaatgacaactaaagaaaacaaaagccaacaacaataagaacaaactacgggtcctggggcagctagagtagttacttatctgaaaaacagacccatcttaccccacagtgatggtggtcagtggggcacatgagtggggagggcgtggcattttaattgggccagacctattgtagaaatgttattgaaggtattggagccattggaacagactctcttcgatgggaactgggagccatagaatcctgcctgttagtcatgctggttctctgcatcctcgtgagttttcatttctccagattgcaatcccacaacagagcatcgctgcggggacgggcgctgcatcgccatggagtgggtgtgtgatggtgaccacgactgtgtggataagtctgacgaggtcaactgctgtgagtgctctgaggacgtttgttttgcttatttttccatttctggttctttaggctgtactcaaggttgaggactgtacttaagactcactatatacacagcattccaagggaaagattcttatgctttggttctagcctgtaaagatcactgagtcatgggatgacaatagcaatggagtgtatctgacttccacacctctccctgcaaaactccaagcttcatttggctgatctagccaagtgggtgtctgttttctctctcgttgctccatatgtctcttttatgcttctgtgactttgtcaaaggtgatgctctgcccacagaatggggaacctttcttctgcaaacaatacatgagtagttaagcttccctgcaggagtgccctaacatgttttcaggggccatttgtggaagaacatggaaagaatcgtcagagagaagagagcctttaatgttcatatgatgatacaaagagagcataataggccgggcatggtggctcacgcctgtagtcccagcactttgggaggcagagatgggtagatgacctgaggtcaggagtttgagaccagcctggccaacagtctctagtaaaaatacaaaaa

SEQ ID NO: 4705 - DNA, 482 bp, Homo sapiens
  source 1..482: mol_type = unassigned DNA; mol_type = unassigned DNA
acactggcggcaggggaggctgcaggtggagctgtcggagccagcccctcggggatctacagcttcctgtctgcgccggcgtctcgggcgccgggtggctggagggactgtgcagcagtcttgcctgccccagacgtcttgagagctgatgacaataacatgggcaatggctgctctcagaagctggcgactgctaacctcctccggttcctattgctggtcctgattccatgtatctgtgctctcgttctcttgctggtgatcctgctttcctatgttggaacattacaaaaggtctattttaaatcaaatgggagtgaacctttggtcactgatggtgaaatccaagggtccgatgttattcttacaaatacaatttataaccagagcactgtggtgtctactgcacatcccgaccaacacgttccagcctggactacggatgcttctctcccaggggaccaaagtcacaggaatacaag

SEQ ID NO: 4706 - DNA, 4696 bp, Homo sapiens
  source 1..4696: mol_type = unassigned DNA; mol_type = unassigned DNA
agagcagacaaaatatggggcccctggcgcttaaagttcagtttgtctctcttgagcttggagaaaatcatccgtagtgcctccccgggggacacgtagaggagagaaaagcgaccaagataaaagtggacagaagaataagcgagactttttatccatgaaacagtctcctgccctcgctccggaagagcgctgccgcagagccgggtccccaaagccggtcttgagagctgatgacaataacatgggcaatggctgctctcagaagctggcgactgctaacctcctccggttcctattgctggtcctgattccatgtatctgtgctctcgttctcttgctggtgatcctgctttcctatgttggtgcctgtatgaacatcacccacagccagtgtcagatgctgccctaccacgccacgctgacacctctcctctcagttgtcagaaacatggaaatggaaaagttcctcaagtttttcacatatctccatcgcctcagttgctatcaacatatcatgctgtttggctgtaccctcgccttccctgagtgcatcattgatggcgatgacagtcatggactcctgccctgtaggtccttctgtgaggctgcaaaagaaggctgtgaatcagtcctggggatggtgaattactcctggccggatttcctcagatgctcccagtttagaaaccaaactgaaagcagcaatgtcagcagaatttgcttctcacctcagcaggaaaacggaaagcaattgctctgtggaaggggtgagaactttctgtgtgccagtggaatctgcatccccgggaaactgcaatgtaatggctacaacgactgtgacgactggagtgacgaggctcattgcaactgcagcgagaatctgtttcactgtcacacaggcaagtgccttaattacagccttgtgtgtgatggatatgatgactgtggggatttgagtgatgagcaaaactgtgcctgtcacagccagggtctggtggaatgcagaaatggacaatgtatccccagcacgtttcaatgtgatggtgacgaggactgcaaggatgggagtgatgaggagaactgcagcgtcattcagacttcatgtcaagaaggagaccaaagatgcctctacaatccctgccttgattcatgtggtggtagctctctctgtgacccgaacaacagtctgaataactgtagtcaatgtgaaccaattacattggaactctgcatgaatttgccctacaacagtacaagttatccaaattattttggccacaggactcaaaaggaagcatccatcagctgggagtcttctcttttccctgcacttgttcaaaccaactgttataaatacctcatgttcttttcttgcaccattttggtaccaaaatgtgatgtgaatacaggcgagcatatccctccttgcagggcattgtgtgaacactctaaagaacgctgtgagtctgttcttgggattgtgggcctacagtggcctgaagacacagattgcagtcaatttccagaggaaaattcagacaatcaaacctgcctgatgcctgatgaatatgtggaagaatgctcacctagtcatttcaagtgccgctcaggacagtgtgttctggcttccagaagatgtgatggccaggccgactgtgacgatgacagtgatgaggaaaactgtggttgtaaagagagagatctttgggaatgtccatccaataaacaatgtttgaagcacacagtgatctgcgatgggttcccagactgccctgattacatggacgagaaaaactgctcattttgccaagatgatgagctggaatgtgcaaaccatgcgtgtgtgtcacgtgacctgtggtgtgatggtgaagccgactgctcagacagttcagatgaatgggactgtgtgaccctctctataaatgtgaactcctcttcctttctgatggttcacagagctgccacagaacaccatgtgtgtgcagatggctggcaggagatattgagtcagctggcctgcaagcagatgggtttaggagaaccatctgtgaccaaattgatacaggaacaggagaaagagccgcggtggctgacattacactccaactgggagagcctcaatgggaccactttacatgaacttctagtaaatgggcagtcttgtgagagcagaagtaaaatttctcttctgtgtactaaacaagactgtgggcgccgccctgctgcccgaatgaacaaaaggatccttggaggtcggacgagtcgccctggaaggtggccatggcagtgttctctgcagagtgaacccagtggacatatctgtggctgtgtcctcattgccaagaagtgggttctgacagttgcccactgcttcgaggggagagagaatgctgcagtttggaaagtggtgcttggcatcaacaatctagaccatccatcagtgttcatgcagacacgctttgtgaagaccatcatcctgcatccccgctacagtcgagcagtggtggactatgacatcagcatcgttgagctgagtgaagacatcagtgagactggctacgtccggcctgtctgcttgcccaacccggagcagtggctagagcctgacacgtactgctatatcacaggctggggccacatgggcaataaaatgccatttaagctgcaagagggagaggtccgcattatttctctggaacattgtcagtcctactttgacatgaagaccatcaccactcggatgatatgtgctggctatgagtctggcacagttgattcatgcatgggtgacagcggtgggcctcttgtttgtgagaagcctggaggacggtggacattatttggattaacttcatggggctccgtctgcttttccaaagtcctggggcctggcgtttatagtaatgtgtcatatttcgtcgaatggattaaaagacagatttacatccagacctttctcctaaactaattataaggatgatcagagacttttgccagctacactaaaagaaaatggccttcttgactgtgaagagctgcctgcagagagctgtacagaagcacttttcatggacagaaatgctcaatcgtgcactgcaaatttgcatgtttgttttggactaatttttttcaatttattttttcaccttcatttttctcttatttcaagttcaatgaaagactttacaaaagcaaacaaagcagactttgtccttttgccaggcctaaccatgactgcagcacaaaattatcgactctggcgagatttaaaatcaggtgctacagtaacaggttatggaatggtctcttttatcctatcacaaaaaaagacatagatatttaggctgattaattatctctaccagtttttgtttctcaagctcagtgcatagtggtaaatttcagtgttaacattggagacttgcttttctttttctttttttataccccacaattcttttttattacacttcgaattttagggtacacgagcacaacgtgcaggttagttacatatgtatacatgtgccatgttggtgtgctgaacccagtaactcgtcatttgatttattaaaagccaagataatttacatgtttaaagtatttactattacccccttctaatgtttgcataattctgagaactgataaaagacagcaataaaagaccagtgtcatccatttaggtagcaagacatattgaatgcaaagttctttagatatcaatattaacacttgacattattggaccccccattctggatgtatatcaagatcataattttatagaagagtctctatagaactgtcctcatagctgggtttgttcaggatatatgagttggctgattgagactgcaacaactacatctatatttatgggcaatattttgttttacttatgtggcaaagaactggatattaaactttgcaaaagagaatttagatgagagatgcaattttttaaaaagaaaattaatttgcatccctcgtttaattaaatttatttttcagttttcttgcgttcatccataccaacaaagtcataaagagcatattttagagcacagtaagactttgcatggagtaaaacattttgtaattttcctcaaaagatgtttaatatctggtttcttctcattggtaattaaaattttagaaatgatttttagctctaggccactttacgcaactcaatttctgaagcaattagtggtaaaaagtatttttccccactaaaaaactttaaaacacaaatcttcatatatacttaatttaattagtcaggcatccattttgccttttaaacaactaggattccctactaacctccaccagcaacctggactgcctcagcattccaaatagatactacctgcaattttatacatgtatttttgtatcttttctgtgtgtaaacatagttgaaattcaaaaagttgtagcaatttctatactattcatctcctgtccttcagtttgtataaacctaaggagagtgtgaaatccagcaactgaattgtggtcacgattgtatgaaagttcaagaacatatgtcagttttgttacagttgtagctacatactcaatgtatcaacttttagcctgctcaacttaggctcagtgaaatatatatattatacttattttaaataattcttaatacaaataaaatggtaatggtctaatc

SEQ ID NO: 4707 - DNA, 3892 bp, Homo sapiens
  source 1..3892: mol_type = unassigned DNA; mol_type = unassigned DNA
gcgcggcgcgggggcggggcctacgcgcggtggcgggggcggtggcggctgcccgcgcccctcccccgcacggcgctcagtgccaggctggaggcggcagcggttggaggcttcgcccggctttgcagcggggacttcggcggcggcgcctcaggcacctcggcccggacacgatgaggcgagtggtacgacagagcaagtttcggcatgtatttgggcaagcggtgaaaaatgaccagtgctatgatgacatccgggtttctcgtgtgacctgggatagttccttttgtgctgtcaatcccagatttgttgccataatcatagaggcaagtgggggaggagcgttccttgtcctccctctgcacaagactggtcgaattgacaaatcttaccctacagtatgtggccacacaggaccagtgctggacatagactggtgcccacataacgatcaggtcattgccagcggttcagaggactgcacggtcatggtatggcagatcccagaaaatggactcaccctttccctgactgaacctgtggtgattttggaaggccactcaaagagagtcggcatcgtggcttggcatccaacggcccgcaatgtgcttcttagtgcaggctgtgataatgccattatcatctggaatgtgggaacaggggaagcccttataaacttggacgatatgcattcagacatgatttacaatgtgagctggaaccggaatggcagtctgatctgcacagcttccaaagacaagaaagtgagagtcattgatcccaggaaacaagagattgttgctgagaaggagaaagcacatgaaggagcaagacccatgagagccatcttcctggccgatggcaatgtcttcaccactgggttcagccgcatgagcgagcggcagctggctctctggaatccgaaaaatatgcaggaaccaattgctcttcatgagatggacactagcaatggggtgttgctgcctttctatgaccctgacaccagcatcatttacttatgtggaaagggtgacagcagtattcgctattttgagatcacggatgaatccccgtacgtccactacctcaacacattcagcagcaaggagcctcagagagggatgggttacatgcccaagaggggacttgatgttaacaaatgtgagattgccagattcttcaaacttcatgagagaaagtgtgaacctattattatgactgttcccaggaagtctgaccttttccaagatgacctgtatcctgacacagcggggccagaggccgcgctggaggcagaagagtggttcgaaggcaagaatgcagacccaatcctcatctccttgaagcacgggtacattccaggcaaaaacagggatctcaaggtggtcaagaagaacattctggatagcaagcccactgcaaacaagaagtgcgacctgatcagcatccccaagaaaaccacagacacggccagtgtgcaaaatgaagccaagttggatgagattttaaaagagatcaaatctataaaagacacaatctgcaatcaagatgagcgtatttccaagttagaacagcagatggcaaagatagcagcctgaaggtcccacccccacccctacagaaaaaatgggagcaagaacttgtgcttgggagctggttattggtgtggtcctagggagggcggaaagggaggcactgccatttggagacattccatttcagatttgtcaaccagcgataggccacattccagtaagaactcaatttgtctcccaaatttgcagaaacaaaacgtgatttaaaagctgagctttttatcagaaagcttttttgatgttttaagtgttatgtgacttgttgaactttttaaaaagtgctacttttaaaatcccagatactctgaattttagaaaacaaactaattctgattgtgtcgtgcccaagtacccttttttttttaatgaatagggaccaatgccacattgctttttatatttctttcttttttaatgttgccaaaaccaaaagtagctttgttttcctttgtattttgctactttgcagtatttgtgtgtgtggttttttttccttaatttgaaagggacagcactgtgtatgtttataaactaaatgaagataagatattattttgtataaacattcatctgagaacaatcaaagcagtagccacatggtgctggctcctttgcagcacaaacctggtcattttgatgactgtacaacaggaagacttgaaaaatcacgtggattcatattaccaccgctctcatttcatggagtcttctgatcaaaaaagctcacgtcgtatttcttcttttcctttctcttttctagaaattgggtgtttgtaccagaatggaattttgcttctcggttatcctgtgcttcagatgattataatctaacccaaactagcatgtgtttctgcagtttgttacacacctaggatcatattgcattcatcactttaaacatcatgtttcaggttttggtcaatacttgacaagggtgcccaggacaggaagacgtgtactgctgagtgttccttcttgcccttttcagcagcttgcccagctcttgagtacagtggtggggactaaaaatgtgggcatgtggagaggggtatttgccctgggtgatcctgtttccctgtgctgtccccatgctgtgttggaggaggaagtggctctccttccaccaacaaagctcctgctctaccctcttcctcacatgtgctgcgacctctctcagggctcccccagccattccttctttccttcctgccttttagctctaaccacattaagctaagacaaggccagagggtgcgattgaatgagtattgagactgaggagaatgatagagagtgaagcagaaacaggagcacagacctctgctgtagctttaatgcatacaaacatgtccctccgcacaactaacctgccctgcctctccatctctcaccaaggctgcgtcaaagcacagaggctccccggactcggagggggccagagactgagctctggtcacctgttcattcctcggttagctggaactttgccccgtttccagtttcttatagtgcatgcttgggaaacaagatttaaggagcctctgttttggaagggctgtctgtgattgaacgtgaaatgtgtagtgccattgggaccacgaagggaattcttgcacatgctcgtgctggtgtgggcatgggactggctggaaacgtctgtatgcagggagccagggtgagggcagagtgtggtgacagccgaacttggagtaatgtccgtgtagaaaaaggaccatgttcttatccagccaatactgggagtgctgtctccacaatttcagggcatctgaatgtttgatgtggttttgtgtgtgtgtatgtatgtgtttaatattgaagtggatcatgagatgtaaagaaaacaataatggcaatgacttatattcaaatctgtatttgtttctttatcaatgtaatctgctgaggaccttttgtctaagattcagtagtgttttaaggttctgatatcgaattaatgaagtaaagttgttgatggtggtgaaacaccgtagggcatgtggttcaaagagaagcaggagggcaagggaaagttaccctgatcttagtttgtagcttatgacttatttaatgaatggatgcccagccaagctcagagtaggcgcccaaagcattgtggattattttcctgttttgtctttttttttttttttttttaagccatgacatcccagaagaggacagtgaattactcctaggtcggctcttatagagtggccatagtgttctgtcaaaacacttgcttccattttcagagataaaaatcattgattacaaaa

SEQ ID NO: 4708 - DNA, 2487 bp, Homo sapiens
  source 1..2487: mol_type = unassigned DNA; mol_type = unassigned DNA
gcgagaccagctctgggccctgcagatctcggttgggggtcaggcggggcggggcagagctggagctggagtaatgtgggtgggggcggcttgggaagaggctgagcccggccaagggagcagagggctgggactggctgggggttgggaggggaggaacgaagcaggaaggctgtcggatcgggggcccagggtgtccgagtgaactgggtgattcagagacacgatgaggcgagtggtacgacagagcaagtttcggcatgtatttgggcaagcggtgaaaaatgaccagtgctatgatgacatccgggtttctcgtgtgacctgggatagttccttttgtgctgtcaatcccagatttgttgccataatcatagaggcaagtgggggaggagcgttccttgtcctccctctgcacaagactggtcgaattgacaaatcttaccctacagtatgtggccacacaggaccagtgctggacatagactggtgcccacataacgatcaggtcattgccagcggttcagaggactgcacggtcatggtatggcagatcccagaaaatggactcaccctttccctgactgaacctgtggtgattttggaaggccactcaaagagagtcggcatcgtggcttggcatccaacggcccgcaatgtgcttcttagtgcaggctgtgataatgccattatcatctggaatgtgggaacaggggaagcccttataaacttggacgatatgcattcagacatgatttacaatgtgagctggaaccggaatggcagtctgatctgcacagcttccaaagacaagaaagtgagagtcattgatcccaggaaacaagagattgttgctgagaaggagaaagcacatgaaggagcaagacccatgagagccatcttcctggccgatggcaatgtcttcaccactgggttcagccgcatgagcgagcggcagctggctctctggaatccgaaaaatatgcaggaaccaattgctcttcatgagatggacactagcaatggggtgttgctgcctttctatgaccctgacaccagcatcatttacttatgtggaaagggtgacagcagtattcgctattttgagatcacggatgaatccccgtacgtccactacctcaacacattcagcagcaaggagcctcagagagggatgggttacatgcccaagaggggacttgatgttaacaaatgtgagattgccagattcttcaaacttcatgagagaaagtgtgaacctattattatgactgttcccaggaagtctgaccttttccaagatgacctgtatcctgacacagcggggccagaggccgcgctggaggcagaagagtggttcgaaggcaagaatgcagacccaatcctcatctccttgaagcacgggtacattccaggcaaaaacagggatctcaaggtggtcaagaagaacattctggatagcaagcccactgcaaacaagaagtgcgacctgatcagcatccccaagaaaaccacagacacggccagtgtgcaaaatgaagccaagttggatgagattttaaaagagatcaaatctataaaagacacaatctgcaatcaagatgagcgtatttccaagttagaacagcagatggcaaagatagcagcctgaaggtcccacccccacccctacagaaaaaatgggagcaagaacttgtgcttgggagctggttattggtgtggtcctagggagggcggaaagggaggcactgccatttggagacattccatttcagatttgtcaaccagcgataggccacattccagtaagaactcaatttgtctcccaaatttgcagaaacaaaacgtgatttaaaagctgagctttttatcagaaagcttttttgatgttttaagtgttatgtgacttgttgaactttttaaaaagtgctacttttaaaatcccagatactctgaattttagaaaacaaactaattctgattgtgtcgtgcccaagtacccttttttttttaatgaatagggaccaatgccacattgctttttatatttctttcttttttaatgttgccaaaaccaaaagtagctttgttttcctttgtattttgctactttgcagtatttgtgtgtgtggttttttttccttaatttgaaagggacagcactgtgtatgtttataaactaaatgaagataagatattattttgtataaacattcatctgagaacaatcaaagcagtagccacatggtgctggctcctttgcagcacaaacctggtcattttgatgactgtacaacaggaagacttgaaaaatcacgtggattcatattaccaccgctctcatttcatggagtcttctgatcaaaaaagctcacgtcgtatttcttcttttcctttctcttttctagaaattgggtgtttgtaccagaatggaattttgcttctcggttatcctgtgcttcagatgattataatctaacccaaact

SEQ ID NO: 4709 - DNA, 577 bp, Homo sapiens
  source 1..577: mol_type = unassigned DNA; mol_type = unassigned DNA
agcaaggagcctcagagagggatgggttacatgcccaagaggggacttgatgttaacaaatgtgagattgccagattcttcaaacttcatgagagaaagtgtgaacctattattatgactgttcccaggaagtctgaccttttccaagatgacctgtatcctgacacagcggggccagaggccgcgctggaggcagaagagtggttcgaaggcaagaatgcagacccaatcctcatctccttgaagcacgggtacattccaggcaaaaacagggatctcaaggtggtcaagaagaacattctggatagcaagcccactgcaaacaagaagtgcgacctgatcagcatccccaagaaaaccacagacacggccagtgtgcaaaatgaagccaagttggatgagattttaaaagagatcaaatctataaaagacacaatctgcaatcaagatgagcgtatttccaagttagaacagcagatggcaaagatagcagcctgaagaaattgggtgtttgtaccagaatggaattttgcttctcggttatcctgtgcttcagatgattataatctaacccaaa

SEQ ID NO: 4710 - DNA, 891 bp, Homo sapiens
  source 1..891: mol_type = unassigned DNA; mol_type = unassigned DNA
agtgccaggctggaggcggcagcggttggaggcttcgcccggctttgcagcggggacttcggcggcggcgcctcaggcacctcggcccggacacgatgaggcgagtggaagtctgaccttttccaagatgacctgtatcctgacacagcggggccagaggccgcgctggaggcagaagagtggttcgaaggcaagaatgcagacccaatcctcatctccttgaagcacgggtacattccaggcaaaaacagggatctcaaggtggtcaagaagaacattctggatagcaagcccactgcaaacaagaagtgcgacctgatcagcatccccaagaaaaccacagacacggccagtgtgcaaaatgaagccaagttggatgagattttaaaagagatcaaatctataaaagacacaatctgcaatcaagatgagcgtatttccaagttagaacagcagatggcaaagatagcagcctgaaggtcccacccccacccctacagaaaaaatgggagcaagaacttgtgcttgggagctggttattggtgtggtcctagggagggcggaaagggaggcactgccatttggagacattccatttcagatttgtcaaccagcgataggccacattccagtaagaactcaatttgtctcccaaatttgcagaaacaaaacgtgatttaaaagctgagctttttatcagaaagcttttttgatgttttaagtgttatgtgacttgttgaactttttaaaaagtgctacttttaaaatcccagatactctgaattttagaaaacaaactaattctgattgtgtcgtgcccaagtacccttttttttttaatgaatagggaccaatgccacattgctttttatatttctttcttttttaatg

SEQ ID NO: 4711 - DNA, 1296 bp, Homo sapiens
  source 1..1296: mol_type = unassigned DNA; mol_type = unassigned DNA
acacttcatatcacaacaagcctgtaaatcctgccttaaacaaactggtcgaattgacaaatcttaccctacagtatgtggccacacaggaccagtgctggacatagactggtgcccacataacgatcaggtcattgccagcggttcagaggactgcacggtcatggtatggcagatcccagaaaatggactcaccctttccctgactgaacctgtggtgattttggaaggccactcaaagagagtcggcatcgtggcttggcatccaacggcccgcaatgtgcttcttagtgcaggctgtgataatgccattatcatctggaatgtgggaacaggggaagcccttataaacttggacgatatgcattcagacatgatttacaatgtgagctggaaccggaatggcagtctgatctgcacagcttccaaagacaagaaagtgagagtcattgatcccaggaaacaagagattgttgctgagaaggagaaagcacatgaaggagcaagacccatgagagccatcttcctggccgatggcaatgtcttcaccactgggttcagccgcatgagcgagcggcagctggctctctggaatccgaaaaatatgcaggaaccaattgctcttcatgagatggacactagcaatggggtgttgctgcctttctatgaccctgacaccagcatcatttacttatgtggaaagggtgacagcagtattcgctattttgagatcacggatgaatccccgtacgtccactacctcaacacattcagcagcaaggagcctcagagagggatgggttacatgcccaagaggggacttgatgttaacaaatgtgagattgccagattcttcaaacttcatgagagaaagtgtgaacctattattatgactgttcccaggaagtctgaccttttccaagatgacctgtatcctgacacagcggggccagaggccgcgctggaggcagaagagtggttcgaaggcaagaatgcagacccaatcctcatctccttgaagcacgggtacattccaggcaaaaacagggatctcaaggtggtcaagaagaacattctggatagcaagcccactgcaaacaagaagtgcgacctgatcagcatccccaagaaaaccacagacacggccagtgtgcaaaatgaagccaagttggatgagattttaaaagagatcaaatctataaaagacacaatctgcaatcaagatgagcgtatttccaagttagaacagcagatggcaaagatagcagcctgaaggtcccacccccacccctacag

SEQ ID NO: 4712 - DNA, 1245 bp, Homo sapiens
  source 1..1245: mol_type = unassigned DNA; mol_type = unassigned DNA
cggcgctcagtgccaggctggaggcggcagcggttggaggcttcgcccggctttgcagcggggacttcggcggcggcgcctcaggcacctcggcccggacacgatgaggcgagtggtacgacagagcaagtttcggcatgtatttgggcaagcggtgaaaaatgaccagtgctatgatgacatccgggtttctcgtgtgacctgggatagttccttttgtgctgtcaatcccagatttgttgccataatcatagaggcaagtgggggaggagcgttccttgtcctccctctgcacaagactggtcgaattgacaaatcttaccctacagtatgtggccacacaggaccagtgctggacatagactggtgcccacataacgatcaggtcattgccagcggttcagaggactgcacggtcatggtatggcagatcccagaaaatggactcaccctttccctgactgaacctgtggtgattttggaaggccactcaaagagagtcggcatcgtggcttggcatccaacggcccgcaatgtgcttcttagtgcagaaaaatatgcaggaaccaattgctcttcatgagatggacactagcaatggggtgttgctgcctttctatgaccctgacaccagcatcatttacttatgtggaaagggtgacagcagtattcgctattttgagatcacggatgaatccccgtacgtccactacctcaacacattcagcagcaaggagcctcagagagggatgggttacatgcccaagaggggacttgatgttaacaaatgtgagattgccagattcttcaaacttcatgagagaaagtgtgaacctattattatgactgttcccaggaagtctgaccttttccaagatgacctgtatcctgacacagcggggccagaggccgcgctggaggcagaagagtggttcgaaggcaagaatgcagacccaatcctcatctccttgaagcacgggtacattccaggcaaaaacagggatctcaaggtggtcaagaagaacattctggatagcaagcccactgcaaacaagaagtgcgacctgatcagcatccccaagaaaaccacagacacggccagtgtgcaaaatgaagccaagttggatgagattttaaaagagatcaaatctataaaagacacaatctgcaatcaagatgagcgtatttccaagttagaacagcagatggcaaagatagcagcctgaaggtcccacccccacccct

SEQ ID NO: 4713 - DNA, 1710 bp, Homo sapiens
  source 1..1710: mol_type = unassigned DNA; mol_type = unassigned DNA
ttttgcttttcaccacctcatggaagctgtcttatctaactcacgcttgagaagtattcatattgattccaaaatgaaggaccctggccacgaatcatttgccatctcctctaccaaagactcaaaatgtatggccctggtagtcagctgggaaagtctggcaataacagctgggctaaggaacgtggatgctcaattgcctgccaagggtctcttacttcagcccggctacatgcccccagcattggagagaggccactttcacacatgcgttggaaggacacgatgaggcgagtggtacgacagagcaagtttcggcatgtatttgggcaagcggtgaaaaatgaccagtgctatgatgacatccgggtttctcgtgtgacctgggatagttccttttgtgctgtcaatcccagatttgttgccataatcatagaggcaagtgggggaggagcgttccttgtcctccctctgcacaagactggtcgaattgacaaatcttaccctacagtatgtggccacacaggaccagtgctggacatagactggtgcccacataacgatcaggtcattgccagcggttcagaggactgcacggtcatggtatggcagatcccagaaaatggactcaccctttccctgactgaacctgtggtgattttggaaggccactcaaagagagtcggcatcgtggcttggcatccaacggcccgcaatgtgcttcttagtgcaggctgtgataatgccattatcatctggaatgtgggaacaggggaagcccttataaacttggacgatatgcattcagacatgatttacaatgtgagctggaaccggaatggcagtctgatctgcacagcttccaaagacaagaaagtgagagtcattgatcccaggaaacaagagattgttgctgagaaggagaaagcacatgaaggagcaagacccatgagagccatcttcctggccgatggcaatgtcttcaccactgggttcagccgcatgagcgagcggcagctggctctctggaatccgaaaaatatgcaggaaccaattgctcttcatgagatggacactagcaatggggtgttgctgcctttctatgaccctgacaccagcatcatttacttatgtggaaagggtgacagcagtattcgctattttgagatcacggatgaatccccgtacgtccactacctcaacacattcagcagcaaggagcctcagagagggatgggttacatgcccaagaggggacttgatgttaacaaatgtgagattgccagattcttcaaacttcatgagagaaagtgtgaacctattattatgactgttcccaggaagtctgaccttttccaagatgacctgtatcctgacacagcggggccagaggccgcgctggaggcagaagagtggttcgaaggcaagaatgcagacccaatcctcatctccttgaagcacgggtacattccaggcaaaaacagggatctcaaggtggtcaagaagaacattctggatagcaagcccactgcaaacaagaagtgcgacctgatcagcatccccaagaaaaccacagacacggccagtgtgcaaaatgaagccaagttggatgagattttaaaagagatcaaatctataaaagacacaatctgcaatcaagatgagcgtatttccaagttagaacagcagatggcaaagatagcagcctga

SEQ ID NO: 4714 - DNA, 873 bp, Homo sapiens
  source 1..873: mol_type = unassigned DNA; mol_type = unassigned DNA
aggatacaaataaaaatgttatacctttcttccccattacagagctctttgctcccttcttccagtattacagtgcaagtggctttacattctctttccacattttggatagtttcacatttttcttgagtgtcatgtacgatgtggtttgctaggatgagaaaatcataatcctaggattgttttcttttgctttctaaaagtcatatttatacttatatgttcaaccacctcaagctggcagaagaccttgtacccgcgttgtagatacaatctaacagatgtgtgttctctcctgtaggttgacatggtaattttttcataagtgagtcagtttcagtgttgctattatttccaccacagttggtctgtcccccagataattggcatttgtcatcatcatacgtagacctctactcatggttcttgtctccagtctgccagttcctagcatagtgactctcagcttccgttctctcatctgtcaaccgggaacactaaattctgcctattcccggggtggatcagatgtggggatgggtaaagaagcacttgacatttcagacagcattgtagaaaactaattattcatcctgttagtcagcctcatatttcacttaatgcaactttgcctttatttcccctctgaagattcttcaaacttcatgagagaaagtgtgaacctattattatgactgttcccaggaagtctgaccttttccaagatgacctgtatcctgacacagcggggccagaggccgcgctggaggcagaagagtggttcgaaggcaagaatgcagacccaatcctcatctccttgaagcacgggtacattccaggcaaaaacagggatctcaaggtggtcaagaagaa

SEQ ID NO: 4715 - DNA, 547 bp, Homo sapiens
  source 1..547: mol_type = unassigned DNA; mol_type = unassigned DNA
atgtgagctggaaccggaatggcagtctgatctgcacagcttccaaagacaagaaagtgagagtcattgatcccaggaaacaagagattgttgctgagaaggagaaagcacatgaaggagcaagacccatgagagccatcttcctggccgatggcaatgtcttcaccactgggttcagccgcatgagcgagcggcagctggctctctggaatccgaaaaatatgcaggaaccaattgctcttcatgagatggacactagcaatggggtgttgctgcctttctatgaccctgacaccagcatcatttacttatgtggaaagacaagattgccgtcattgttcagggtgacagcagtattcgctattttgagatcacggatgaatccccgtacgtccactacctcaacacattcagcagcaaggagcctcagagagggatgggttacatgcccaagaggggacttgatgttaacaaatgtgagattgccagattcttcaaacttcatgagagaaagtgtgaacctattattatgactgttcccaggaag

SEQ ID NO: 4716 - DNA, 683 bp, Homo sapiens
  source 1..683: mol_type = unassigned DNA; mol_type = unassigned DNA
gaaccggaatggcagtctgatctgcacagcttccaaagacaagaaagtgagagtcattgatcccaggaaacaagagattgttgctgagaaggagaaagcacatgaaggagcaagacccatgagagccatcttcctggccgatggcaatgtcttcaccactgggttcagccgcatgagcgagcggcagctggctctctggaatccgaaaaatatgcaggaaccaattgctcttcatgagatggacactagcaatggggtgttgctgcctttctatgaccctgacaccagcatcatttacttatgtggaaagggtgacagcagtattcgctattttgagatcacggatgaatccccgtacgtccactacctcaacacattcagcagcaaggagcctcagagagggatgggttacatgcccaagaggggacttgatgttaacaaatgtgagattgccaggtaaagaatcgagattgtcaagtattctaggttggtgtaactgtgtgacaattatttgtacttggactagcatatacttcagatctcaaaaatatctgaccattctgagcaagaaagtagtagaattgtacacattgccatgagatggcactttctaaggatatcactaaaactgagtttcttcattagaaaaaaatctcaaaaaaaaaaaaaaaagaaaagaaaaa

SEQ ID NO: 4717 - DNA, 587 bp, Homo sapiens
  source 1..587: mol_type = unassigned DNA; mol_type = unassigned DNA
agtgccaggctggaggcggcagcggttggaggcttcgcccggctttgcagcggggacttcggcggcggcgcctcaggcacctcggcccggactggtcgaattgacaaatcttaccctacagtatgtggccacacaggaccagtgctggacatagactggtgcccacataacgatcaggtcattgccagcggttcagaggactgcacggtcatggtatggcagatcccagaaaatggactcaccctttccctgactgaacctgtggtgattttggaaggccactcaaagagagtcggcatcgtggcttggcatccaacggcccgcaatgtgcttcttagtgcaggctgtgataatgccattatcatctggaatgtgggaacaggggaagcccttataaacttggacgatatgcattcagacatgatttacaatgtgagctggaaccggaatggcagtctgatctgcacagcttccaaagacaagaaagtgagagtcattgatcccaggaaacaagagattgttgctgagaaggagaaagcacatgaaggagcaagacccatgagagccatcttcctggccgatggcaa

SEQ ID NO: 4718 - DNA, 566 bp, Homo sapiens
  source 1..566: mol_type = unassigned DNA; mol_type = unassigned DNA
actaggcggtttggtaacacgatgaggcgagtggtacgacagagcaagtttcggcatgtatttgggcaagcggtgaaaaatgaccagtgctatgatgacatccgggtttctcgtgtgacctgggatagttccttttgtgctgtcaatcccagatttgttgccataatcatagaggcaagtgggggaggagcgttccttgtcctccctctgcacaagactggtcgaattgacaaatcttaccctacagtatgtggccacacaggaccagtgctggacatagactggtgcccacataacgatcaggtcattgccagcggttcagaggactgcacggtcatggtatggcagatcccagaaaatggactcaccctttccctgactgaacctgtggtgattttggaaggccactcaaagagagtcggcatcgtggcttggcatccaacggcccgcaatgtgcttcttagtgcaggctgtgataatgccattatcatctggaatgtgggaacaggggaagcccttataaacttggacgatatgcattcagacatgatttacaatgtgagctg

SEQ ID NO: 4719 - DNA, 547 bp, Homo sapiens
  source 1..547: mol_type = unassigned DNA; mol_type = unassigned DNA
aattctaacataattctcactcttcctttgcagacacgatgaggcgagtggtacgacagagcaagtttcggcatgtatttgggcaagcggtgaaaaatgaccagtgctatgatgacatccgggtttctcgtgtgacctgggatagttccttttgtgctgtcaatcccagatttgttgccataatcatagaggcaagtgggggaggagcgttccttgtcctccctctgcacaagactggtcgaattgacaaatcttaccctacagtatgtggccacacaggaccagtgctggacatagactggtgcccacataacgatcaggtcattgccagcggttcagaggactgcacggtcatggtatggcagatcccagaaaatggactcaccctttccctgactgaacctgtggtgattttggaaggccactcaaagagagtcggcatcgtggcttggcatccaacggcccgcaatgtgcttcttagtgcaggctgtgataatgccattatcatctggaatgtgggaacaggggaagcccttataaacttgga

SEQ ID NO: 4720 - DNA, 547 bp, Homo sapiens
  source 1..547: mol_type = unassigned DNA; mol_type = unassigned DNA
aggctttcgaggtccggaacgctcctggccgggtgcggagccgcgggccgagacacgatgaggcgagtggtacgacagagcaagtttcggcatgtatttgggcaagcggtgaaaaatgaccagtgctatgatgacatccgggtttctcgtgtgacctgggatagttccttttgtgctgtcaatcccagatttgttgccataatcatagaggcaagtgggggaggagcgttccttgtcctccctctgcacaagactggtcgaattgacaaatcttaccctacagtatgtggccacacaggaccagtgctggacatagactggtgcccacataacgatcaggtcattgccagcggttcagaggactgcacggtcatggtatggcagatcccagaaaatggactcaccctttccctgactgaacctgtggtgattttggaaggccactcaaagagagtcggcatcgtggcttggcatccaacggcccgcaatgtgcttcttagtgcaggctgtgataatgccattatcatctggaatgtgggaacagggg

SEQ ID NO: 4721 - DNA, 899 bp, Homo sapiens
  source 1..899: mol_type = unassigned DNA; mol_type = unassigned DNA
gctgcgccgaaatgactgaggatgaggtcagacgtggagggtgggaatgcagaaaccgagctctcccgcctgtccccaccggcgcacgctccccagctctccgtctctcaaatgatttgaatgtgttgggggaagtggcaggctgcggtgagagctgagaagaaaggggcttcctcttggagggaggcgctggccctggcatccttttttgggagtgttcaaaggattttgaacgctggaaaaggaatcgtaggctttactgcatcacgatttagaaacacatcctatatttggccgtaatgtaggctgcccttgttttgtggtgtctaaagtgcttgctctacatgttgcaaacgtgggattcagagtgcgaagcaaattgcaagttgttcatttcccccggcatgacacgatgaggcgagtggtacgacagagcaagtttcggcatgtatttgggcaagcggtgaaaaatgaccagtgctatgatgacatccgggtttctcgtgtgacctgggatagttccttttgtgctgtcaatcccagatttgttgccataatcatagaggcaagtgggggaggagcgttccttgtcctccctctgcacaagactggtcgaattgacaaatcttaccctacagtatgtggccacacaggaccagtgctggacatagactggtgcccacataacgatcaggtcattgccagcggttcagaggactgcacggtcatggtatggcagatcccagaaaatggactcaccctttccctgactgaacctgtggtgattttggaaggccactcaaagagagtcggcatcgtggcttggcatccaacggcccgcaatgtgcttcttagtgcaggctgtgataatgccattatcatctggaatgtgggaacag

SEQ ID NO: 4722 - DNA, 567 bp, Homo sapiens
  source 1..567: mol_type = unassigned DNA; mol_type = unassigned DNA
gtcggatcgggggcccagggtgtccgagtgaactgggtgattcagaggtgtgtttccctaatagcggggcagctggcgagggacgcagtaaaaaggagcgaggtgcagacacgatgaggcgagtggtacgacagagcaagtttcggcatgtatttgggcaagcggtgaaaaatgaccagtgctatgatgacatccgggtttctcgtgtgacctgggatagttccttttgtgctgtcaatcccagatttgttgccataatcatagaggcaagtgggggaggagcgttccttgtcctccctctgcacaagactggtcgaattgacaaatcttaccctacagtatgtggccacacaggaccagtgctggacatagactggtgcccacataacgatcaggtcattgccagcggttcagaggactgcacggtcatggtatggcagatcccagaaaatggactcaccctttccctgactgaacctgtggtgattttggaaggccactcaaagagagtcggcatcgtggcttggcatccaacggcccgcaatgtgcttcttagtgcaggtggga

SEQ ID NO: 4723 - DNA, 804 bp, Homo sapiens
  source 1..804: mol_type = unassigned DNA; mol_type = unassigned DNA
agaaggcttttgaagtcaagggtgatggctgtgtcttttgaattcctcccatagctattcttgttgaaacactctggggaatagacacaattctcagacagcagagtgttgatgtctagggaaaatgtttacaatctgaaaaattaccttggcaggctgaggacaaagccacaaaatcgtaacttgtttttcggctttcttcagcctcacctctaccagagaatttcactttggagttttcttatctgtaaaaggggaagggttgaagtacattatctgtcagctcccacccaaccctgaaaggctaattttctttaattctttcccttaatctttccattgaaattaaaactgatgagctgtttctggatcttgaattaggaatttttcatttctttgtaattctttccctgacgcattttgcagttgtctccggacacgatgaggcgagtggtacgacagagcaagtttcggcatgtatttgggcaagcggtgaaaaatgaccagtgctatgatgacatccgggtttctcgtgtgacctgggatagttccttttgtgctgtcaatcccagatttgttgccataatcatagaggcaagtgggggaggagcgttccttgtcctccctctgcacaagactggtcgaattgacaaatcttaccctacagtatgtggccacacaggaccagtgctggacatagactggtgcccacataacgatcaggtcattgccagcggttcagaggactgcacggtcatggtatggcagatcccagaaaatggactcaccctttccctgactgaa

SEQ ID NO: 4724 - DNA, 474 bp, Homo sapiens
  source 1..474: mol_type = unassigned DNA; mol_type = unassigned DNA
agtgccaggctggaggcggcagcggttggaggcttcgcccggctttgcagcggggacttcggcggcggcgcctcaggcacctcggcccggacacgatgaggcgagtggtacgacagagcaagtttcggcatgtatttgggcaagcggtgaaaaatgaccagtgctatgatgacatccgggtttctcgtgtgacctgggatagttccttttgtgctgtcaatcccagatttgttgccataatcatagaggcaagtgggggaggagcgttccttgtcctccctctgcacaaggtaggtaatttgatcttccattctggtagacaccctctgatagtctccatactttttccttaatagattgacagttcactaagaattgtatttgtgaaaccattagactctgatgtaattgaagttaagttccacacgccttactaaccacatcagtttttctctaacagagaatcattaaata

SEQ ID NO: 4725 - DNA, 3921 bp, Homo sapiens
  source 1..3921: mol_type = unassigned DNA; mol_type = unassigned DNA
aggaccctggccacgaatcatttgccatctcctctaccaaagactcaaaatgtatggccctggtagtcagctgggaaagtctggcaataacagctgggctaaggaacgtggatgctcaattgcctgccaagggtctcttacttcagcccggctacatgcccccagcattggagagaggccactttcacacatgcgttggaaggacacgatgaggcgagtggtacgacagagcaagtttcggcatgtatttgggcaagcggtgaaaaatgaccagtgctatgatgacatccgggtttctcgtgtgacctgggatagttccttttgtgctgtcaatcccagatttgttgccataatcatagaggcaagtgggggaggagcgttccttgtcctccctctgcacaagactggtcgaattgacaaatcttaccctacagtatgtggccacacaggaccagtgctggacatagactggtgcccacataacgatcaggtcattgccagcggttcagaggactgcacggtcatggtatggcagatcccagaaaatggactcaccctttccctgactgaacctgtggtgattttggaaggccactcaaagagagtcggcatcgtggcttggcatccaacggcccgcaatgtgcttcttagtgcaggctgtgataatgccattatcatctggaatgtgggaacaggggaagcccttataaacttggacgatatgcattcagacatgatttacaatgtgagctggaaccggaatggcagtctgatctgcacagcttccaaagacaagaaagtgagagtcattgatcccaggaaacaagagattgttgctgagaaggagaaagcacatgaaggagcaagacccatgagagccatcttcctggccgatggcaatgtcttcaccactgggttcagccgcatgagcgagcggcagctggctctctggaatccgaaaaatatgcaggaaccaattgctcttcatgagatggacactagcaatggggtgttgctgcctttctatgaccctgacaccagcatcatttacttatgtggaaagggtgacagcagtattcgctattttgagatcacggatgaatccccgtacgtccactacctcaacacattcagcagcaaggagcctcagagagggatgggttacatgcccaagaggggacttgatgttaacaaatgtgagattgccagattcttcaaacttcatgagagaaagtgtgaacctattattatgactgttcccaggaagtctgaccttttccaagatgacctgtatcctgacacagcggggccagaggccgcgctggaggcagaagagtggttcgaaggcaagaatgcagacccaatcctcatctccttgaagcacgggtacattccaggcaaaaacagggatctcaaggtggtcaagaagaacattctggatagcaagcccactgcaaacaagaagtgcgacctgatcagcatccccaagaaaaccacagacacggccagtgtgcaaaatgaagccaagttggatgagattttaaaagagatcaaatctataaaagacacaatctgcaatcaagatgagcgtatttccaagttagaacagcagatggcaaagatagcagcctgaaggtcccacccccacccctacagaaaaaatgggagcaagaacttgtgcttgggagctggttattggtgtggtcctagggagggcggaaagggaggcactgccatttggagacattccatttcagatttgtcaaccagcgataggccacattccagtaagaactcaatttgtctcccaaatttgcagaaacaaaacgtgatttaaaagctgagctttttatcagaaagcttttttgatgttttaagtgttatgtgacttgttgaactttttaaaaagtgctacttttaaaatcccagatactctgaattttagaaaacaaactaattctgattgtgtcgtgcccaagtacccttttttttttaatgaatagggaccaatgccacattgctttttatatttctttcttttttaatgttgccaaaaccaaaagtagctttgttttcctttgtattttgctactttgcagtatttgtgtgtgtggttttttttccttaatttgaaagggacagcactgtgtatgtttataaactaaatgaagataagatattattttgtataaacattcatctgagaacaatcaaagcagtagccacatggtgctggctcctttgcagcacaaacctggtcattttgatgactgtacaacaggaagacttgaaaaatcacgtggattcatattaccaccgctctcatttcatggagtcttctgatcaaaaaagctcacgtcgtatttcttcttttcctttctcttttctagaaattgggtgtttgtaccagaatggaattttgcttctcggttatcctgtgcttcagatgattataatctaacccaaactagcatgtgtttctgcagtttgttacacacctaggatcatattgcattcatcactttaaacatcatgtttcaggttttggtcaatacttgacaagggtgcccaggacaggaagacgtgtactgctgagtgttccttcttgcccttttcagcagcttgcccagctcttgagtacagtggtggggactaaaaatgtgggcatgtggagaggggtatttgccctgggtgatcctgtttccctgtgctgtccccatgctgtgttggaggaggaagtggctctccttccaccaacaaagctcctgctctaccctcttcctcacatgtgctgcgacctctctcagggctcccccagccattccttctttccttcctgccttttagctctaaccacattaagctaagacaaggccagagggtgcgattgaatgagtattgagactgaggagaatgatagagagtgaagcagaaacaggagcacagacctctgctgtagctttaatgcatacaaacatgtccctccgcacaactaacctgccctgcctctccatctctcaccaaggctgcgtcaaagcacagaggctccccggactcggagggggccagagactgagctctggtcacctgttcattcctcggttagctggaactttgccccgtttccagtttcttatagtgcatgcttgggaaacaagatttaaggagcctctgttttggaagggctgtctgtgattgaacgtgaaatgtgtagtgccattgggaccacgaagggaattcttgcacatgctcgtgctggtgtgggcatgggactggctggaaacgtctgtatgcagggagccagggtgagggcagagtgtggtgacagccgaacttggagtaatgtccgtgtagaaaaaggaccatgttcttatccagccaatactgggagtgctgtctccacaatttcagggcatctgaatgtttgatgtggttttgtgtgtgtgtatgtatgtgtttaatattgaagtggatcatgagatgtaaagaaaacaataatggcaatgacttatattcaaatctgtatttgtttctttatcaatgtaatctgctgaggaccttttgtctaagattcagtagtgttttaaggttctgatatcgaattaatgaagtaaagttgttgatggtggtgaaacaccgtagggcatgtggttcaaagagaagcaggagggcaagggaaagttaccctgatcttagtttgtagcttatgacttatttaatgaatggatgcccagccaagctcagagtaggcgcccaaagcattgtggattattttcctgttttgtctttttttttttttttttttaagccatgacatcccagaagaggacagtgaattactcctaggtcggctcttatagagtggccatagtgttctgtcaaaacacttgcttccattttcagagataaaaatcattgatt

SEQ ID NO: 4726 - DNA, 5635 bp, Homo sapiens
  source 1..5635: mol_type = unassigned DNA; mol_type = unassigned DNA
cactgacatctttgctggactcttttaatcctcataaacccaggctgctggcacttgaaatttgagaagggcaatcagtctggcctcctgcctttctggcctgcaggcccagcctggacaaacaatttaggtggagctcctggaggctggaagcagagaggaggtacctcaccatcctctcctgccagctgttgcagactctgcctggggaactgattaagggtgagcagaggcatttatctccatgttaacaagcagatgtcatggcacccccagtaccggagctccaagttccgtcatgtctttggcaaaccagccagcaaggagaactgctacgactccgtgcctatcacccgcagcgttcacgacaaccacttctgtgccgtgaacccccacttcattgcagttgtgactgagtgtgctggtggaggggccttcctcgtcatccccctgcaccagacagggaagttggacccccactacccaaaagtctgcgggcacagaggcaacgttttggatgtcaagtggaacccttttgatgattttgagatcgcctcctgttctgaagatgccacaattaagatctggagcatccccaagcagctgctgaccaggaacctcacggcctacaggaaggaactcgtgggccacgcgcgcagagtaggcctggtggagtggcaccccacggccgccaacatcctcttcagtgctggctatgactacaaggtgatgatctggaacctggatacaaaggagtctgtcatcacaagccccatgagtacgattagctgtcaccaagatgtgatcctctccatgtccttcaacaccaacggcagcctgttggccaccacctgcaaagaccgcaagattcgggttattgacccccgagcagggaccgtcctccaggaggccagctacaaagggcaccgggccagcaaagtgctgtttctggggaacctgaagaagctgatgtccacaggcacatcccgatggaacaaccggcaggtggccttgtgggaccaggataacctctctgtgcctctgatggaggaggacctggacggctcctcgggcgtgctgtttcccttctatgacgcggacaccagcatgctctacgtggtggggaagggagatggcaacatccgctactacgaggtgagcgccgacaagcctcacctgagctacctgactgagtaccgctcctataacccacagaaggggatcggtgtcatgccaaagagaggactcgacgtgtcctcctgcgagatcttccgcttctacaagctgatcacaaccaaaagcctcatcgagcccatctccatgattgtgccccggcggtcagaatcctaccaagaggacatataccctccaacagcaggggcccagccctccctgacggcccaggagtggctcagcgggatgaatcgagacccaatcctggtgtcccttaggcctggctctgagctgctgagaccccacccactgcctgcagagagacctatcttcaattccatggccccagcctcaccccggctcttgaatcagacagaaaagctggctgcagaagatggctggaggtcttcctccctgttggaggagaagatgccaaggtgggcagcagaacacaggctggaggagaagaaaacctggctgacaaatggctttgacgttttcgaatgccccccaccaaagacagagaatgagttgctgcagatgttctaccggcaacaggaggagatccgaaggctccgggagctgttgacccagcgagaggtccaggccaaacagttggaactggagatcaaaaacttgcggatgggctcagagcagctctgagcagagacctctgccctcctcaccctcagggacaccactcggctccatggggaggtttagaaccaaaccacaagtcccctcaaggacaaccactatttctatattttttaccagaaaacaaaactctccatcgctgaaagagattccagtgggacatggtgccgtttttctgtttgccttcttgcaacaacagtttctgaattgactttgttttcagatgatgccttctgttgaattctgttattaagggcccatgatgagctgtaacttctcaagaggaaagaacacagtagaaaactagagctggaaggatctaggttgacctgtctgtgattttcaaactgtggtccagagaataggggaagactgggccagacgcagtggctcatgcctgtaatcccagcactctgggaggctgaggtgggcggattgcttgaggtcgggagtttgaaaccagtctcaccaggcgcagtggctcacgcctgtaattccagcatgttgggaggccgaggctggtggatcacgaggtcagcagttcgagaccagcctgaccaacatggtgaaaccccatctctactaaaaatacaaaaaaattagctgggcgtggtggcaggcgcctgtaattccagcgacttgggaggctgaggcaggagaattgcttgaaaccggaaggcgggggttgcagtgagctgagattgtgccactgcactctaacctgggcaataagagcaaaagtctgtctcaaaaaaaaaaaaaaaagaaagaaaccagcctggccaacatggtgaaaccccgtctctactaaaaatacaaaaattaggcagggcgtggtggttcacgcctataatcccagaactttgggaggccaagctgggcggatcttctgaggtcaggagttcaagaccagcctggccaacatggtgaaaccccgtctccactaaaaataaaaaattaaccaggcatggtggtgcatgcctgtaatcccagctatttgggaggctgaggcaggagaatcgcttgagcctgggaggcggaggttgcagtgaaccaagatcatgccacttcactccagcctgggtgacagagtgagactccgtctcaaaaaaaaaaagttggccagccgtggtggtgagcgtctgtagtccctgctattcgggaggctgagataggagaattgcttgaacctgggaggtggaggttgctatgagccacgattgcggactgcactgcagcctgggtgacagagcgagactccatctccaaaaaaaaaaaaaaaaagagagagagaataggggaagactaagcaggaaggctgtgtctcccttccccacactgtattccaaccagacagctcccttctattttatatgttgggctagtatgaaaaacaattctgctaggaaaaaaaaatttttttagaagtttgaaagctagtgatttgacccaagttcctcattttacagctggggaaactaaggcctagagagaggcaagtgatatttgtttcatggcagggctgggctgagatcctgcttttctgggtctgtctttttgctcttttgggtctgatgcagttctcagcccaaagagtagaaatctgttgcttctggcctcagctgtgccccagcttactcagtgacctcttgcaagtcctgccctctctggtctcagtttcttcatctgaaccaggggtaccctggaacaagctgctctctgcaggatctgccacctgaaaccttgacctaagagaaaactacctgtggggtgatctgggtttgctacagaaactaacggacactggcaaggggtcagaggcattcaacccaattctacaacacaggcaggtggtcaaaaccaacctttccaaccagaatcagcctgatatggatagatgctgtcccttatggagggacgcagacttcagaactgtgcccatgactgctgactgccaccaccaaggccctcaggtacacagcctgcctcctgcaggatgatgtgggcagatttcagccctagttaacagaagagtcccccaggaggtagggggcccccatcactggagacatgccagcagagcctctggccacctaaccaggaggtcttctgaaatgactatacgaggtaaagaagtagtaccagatggtcccaaagttcccttttagcctgaaagcttttctttgtccctccttagtgaatctgtgttccgagccctactctaaagttcagtggtcaatacaatagtccaccaagagactgggaatgattagaagtgaaattggtccctccttaccaaggaggggcagatgatctccattgcacagggcgattagattctggagctgaggtggggactgcaggaggccacctagtctggtaggtttcaacccaagctgtgtacattagaattcccttgggagcgtgcaggaaatacagatgcccatgccacattccagaccaactgaagctgaatctccagagtagggcctgtatggtcatataagctccacaggtgatctgcagtacagtgaagatggaagactgcatgtgtacctatttgcaataaagatgaagaggacagcaagctccagacaggagctgggactcaacccagatctcttaagtcctgcctggtggctccttaaaagtccagaagtgttgccccaagccctccctcaacatctctgggaaccgcagctgcagcacgatgggggttcagtgcccctgtttgccccttacccagctgtggtttattctgcttgtatgtctgcacaggccggatgctcgtgttccttgtcttattctccatttactcagtcactggggctcactcccgtctgatgcactagccaagattgccttagtgtgctccagaaaagaaggccaaatcccaggcattgtcagggcagcagagctctacaggataggcttacctttcccacctgtgtggctagcacttcacagtttacaaattcctcccacctccactcagtgacacatgctgttctaacacaggtcaggcaggcattacagtccccatgttcagaatcaaagacctagcctcagagaagtgaagaaacatcatgccaaggtcattgactgccaagcggtagaggtggggttgcatccagagagcttcccggtatgcctctgcacaatgccattccttggccagctccctccaccccaagggacccagactgcacacttaacaaacaggacacaggtgtctttgaacaaacttttttgtattattatttttacatctagaataaattatttaaattatttcacagcaagggagagggataggtaatttttatcagatatttttttaaaccatctgttttttaaattacatttttgtttatgttcttgagctgatgtagtggaacttgcctagcacattcaggtcccagccagttggcagagcatgctctcatctccttattccataccctgggcgtcccctttctgttgactcaggaactttctgagaatgaggacagcactaggagatgagctttggcaggtatccaccttaacgctacaataattgtgcttcctgaaacaaaacttgagattgtatcatagaaggaaacaggaagtcagaaatcaaatctatgcttttaattgaaaccgtgcctgaaacagtttgaatgattgttttaatgttgtttctgaaattccttgtacctttgtgaaaaataatgataataaataaaagtgaaaataaatagatgtggaatatgcaatggaaataatgtaacaaaataataaacatctggccattttactacaa

SEQ ID NO: 4727 - DNA, 5459 bp, Homo sapiens
  source 1..5459: mol_type = unassigned DNA; mol_type = unassigned DNA
cgggagtcggcgggcggcgaggagcgcggagccggagctggacgccgccgccgccaccgccacctgcgcggcagtcatcaagatgtcatggcacccccagtaccggagctccaagttccgtcatgtctttggcaaaccagccagcaaggagaactgctacgactccgtgcctatcacccgcagcgttcacgacaaccacttctgtgccgtgaacccccacttcattgcagttgtgactgagtgtgctggtggaggggccttcctcgtcatccccctgcaccagacagggaagttggacccccactacccaaaagtctgcgggcacagaggcaacgttttggatgtcaagtggaacccttttgatgattttgagatcgcctcctgttctgaagatgccacaattaagatctggagcatccccaagcagctgctgaccaggaacctcacggcctacaggaaggaactcgtgggccacgcgcgcagagtaggcctggtggagtggcaccccacggccgccaacatcctcttcagtgctggctatgactacaaggtgatgatctggaacctggatacaaaggagtctgtcatcacaagccccatgagtacgattagctgtcaccaagatgtgatcctctccatgtccttcaacaccaacggcagcctgttggccaccacctgcaaagaccgcaagattcgggttattgacccccgagcagggaccgtcctccaggaggccagctacaaagggcaccgggccagcaaagtgctgtttctggggaacctgaagaagctgatgtccacaggcacatcccgatggaacaaccggcaggtggccttgtgggaccaggataacctctctgtgcctctgatggaggaggacctggacggctcctcgggcgtgctgtttcccttctatgacgcggacaccagcatgctctacgtggtggggaagggagatggcaacatccgctactacgaggtgagcgccgacaagcctcacctgagctacctgactgagtaccgctcctataacccacagaaggggatcggtgtcatgccaaagagaggactcgacgtgtcctcctgcgagatcttccgcttctacaagctgatcacaaccaaaagcctcatcgagcccatctccatgattgtgccccggcggtcagaatcctaccaagaggacatataccctccaacagcaggggcccagccctccctgacggcccaggagtggctcagcgggatgaatcgagacccaatcctggtgtcccttaggcctggctctgagctgctgagaccccacccactgcctgcagagagacctatcttcaattccatggccccagcctcaccccggctcttgaatcagacagaaaagctggctgcagaagatggctggaggtcttcctccctgttggaggagaagatgccaaggtgggcagcagaacacaggctggaggagaagaaaacctggctgacaaatggctttgacgttttcgaatgccccccaccaaagacagagaatgagttgctgcagatgttctaccggcaacaggaggagatccgaaggctccgggagctgttgacccagcgagaggtccaggccaaacagttggaactggagatcaaaaacttgcggatgggctcagagcagctctgagcagagacctctgccctcctcaccctcagggacaccactcggctccatggggaggtttagaaccaaaccacaagtcccctcaaggacaaccactatttctatattttttaccagaaaacaaaactctccatcgctgaaagagattccagtgggacatggtgccgtttttctgtttgccttcttgcaacaacagtttctgaattgactttgttttcagatgatgccttctgttgaattctgttattaagggcccatgatgagctgtaacttctcaagaggaaagaacacagtagaaaactagagctggaaggatctaggttgacctgtctgtgattttcaaactgtggtccagagaataggggaagactgggccagacgcagtggctcatgcctgtaatcccagcactctgggaggctgaggtgggcggattgcttgaggtcgggagtttgaaaccagtctcaccaggcgcagtggctcacgcctgtaattccagcatgttgggaggccgaggctggtggatcacgaggtcagcagttcgagaccagcctgaccaacatggtgaaaccccatctctactaaaaatacaaaaaaattagctgggcgtggtggcaggcgcctgtaattccagcgacttgggaggctgaggcaggagaattgcttgaaaccggaaggcgggggttgcagtgagctgagattgtgccactgcactctaacctgggcaataagagcaaaagtctgtctcaaaaaaaaaaaaaaaagaaagaaaccagcctggccaacatggtgaaaccccgtctctactaaaaatacaaaaattaggcagggcgtggtggttcacgcctataatcccagaactttgggaggccaagctgggcggatcttctgaggtcaggagttcaagaccagcctggccaacatggtgaaaccccgtctccactaaaaataaaaaattaaccaggcatggtggtgcatgcctgtaatcccagctatttgggaggctgaggcaggagaatcgcttgagcctgggaggcggaggttgcagtgaaccaagatcatgccacttcactccagcctgggtgacagagtgagactccgtctcaaaaaaaaaaagttggccagccgtggtggtgagcgtctgtagtccctgctattcgggaggctgagataggagaattgcttgaacctgggaggtggaggttgctatgagccacgattgcggactgcactgcagcctgggtgacagagcgagactccatctccaaaaaaaaaaaaaaaaagagagagagaataggggaagactaagcaggaaggctgtgtctcccttccccacactgtattccaaccagacagctcccttctattttatatgttgggctagtatgaaaaacaattctgctaggaaaaaaaaatttttttagaagtttgaaagctagtgatttgacccaagttcctcattttacagctggggaaactaaggcctagagagaggcaagtgatatttgtttcatggcagggctgggctgagatcctgcttttctgggtctgtctttttgctcttttgggtctgatgcagttctcagcccaaagagtagaaatctgttgcttctggcctcagctgtgccccagcttactcagtgacctcttgcaagtcctgccctctctggtctcagtttcttcatctgaaccaggggtaccctggaacaagctgctctctgcaggatctgccacctgaaaccttgacctaagagaaaactacctgtggggtgatctgggtttgctacagaaactaacggacactggcaaggggtcagaggcattcaacccaattctacaacacaggcaggtggtcaaaaccaacctttccaaccagaatcagcctgatatggatagatgctgtcccttatggagggacgcagacttcagaactgtgcccatgactgctgactgccaccaccaaggccctcaggtacacagcctgcctcctgcaggatgatgtgggcagatttcagccctagttaacagaagagtcccccaggaggtagggggcccccatcactggagacatgccagcagagcctctggccacctaaccaggaggtcttctgaaatgactatacgaggtaaagaagtagtaccagatggtcccaaagttcccttttagcctgaaagcttttctttgtccctccttagtgaatctgtgttccgagccctactctaaagttcagtggtcaatacaatagtccaccaagagactgggaatgattagaagtgaaattggtccctccttaccaaggaggggcagatgatctccattgcacagggcgattagattctggagctgaggtggggactgcaggaggccacctagtctggtaggtttcaacccaagctgtgtacattagaattcccttgggagcgtgcaggaaatacagatgcccatgccacattccagaccaactgaagctgaatctccagagtagggcctgtatggtcatataagctccacaggtgatctgcagtacagtgaagatggaagactgcatgtgtacctatttgcaataaagatgaagaggacagcaagctccagacaggagctgggactcaacccagatctcttaagtcctgcctggtggctccttaaaagtccagaagtgttgccccaagccctccctcaacatctctgggaaccgcagctgcagcacgatgggggttcagtgcccctgtttgccccttacccagctgtggtttattctgcttgtatgtctgcacaggccggatgctcgtgttccttgtcttattctccatttactcagtcactggggctcactcccgtctgatgcactagccaagattgccttagtgtgctccagaaaagaaggccaaatcccaggcattgtcagggcagcagagctctacaggataggcttacctttcccacctgtgtggctagcacttcacagtttacaaattcctcccacctccactcagtgacacatgctgttctaacacaggtcaggcaggcattacagtccccatgttcagaatcaaagacctagcctcagagaagtgaagaaacatcatgccaaggtcattgactgccaagcggtagaggtggggttgcatccagagagcttcccggtatgcctctgcacaatgccattccttggccagctccctccaccccaagggacccagactgcacacttaacaaacaggacacaggtgtctttgaacaaacttttttgtattattatttttacatctagaataaattatttaaattatttcacagcaagggagagggataggtaatttttatcagatatttttttaaaccatctgttttttaaattacatttttgtttatgttcttgagctgatgtagtggaacttgcctagcacattcaggtcccagccagttggcagagcatgctctcatctccttattccataccctgggcgtcccctttctgttgactcaggaactttctgagaatgaggacagcactaggagatgagctttggcaggtatccaccttaacgctacaataattgtgcttcctgaaacaaaacttgagattgtatcatagaaggaaacaggaagtcagaaatcaaatctatgcttttaattgaaaccgtgcctgaaacagtttgaatgattgttttaatgttgtttctgaaattccttgtacctttgtgaaaaataatgataataaataaaagtgaaaataaatagatgtggaatatgcaatggaaataatgtaacaaaataataaacatctggccattttactacaa

SEQ ID NO: 4728 - DNA, 3569 bp, Homo sapiens
  source 1..3569: mol_type = unassigned DNA; mol_type = unassigned DNA
cgggccctctccctctctccctttcttcctgcctcgccttcctgcggcgaaggaggctcatctattataaatgcacattcggggctgacatcagcgacgagcggcgggcgagcgccgacgagcggtccctgcgcgctgcccgcccggagcgcagcccccaggctcggccgagccgccggcggggcgcggggagcgagccgggagctgccggacccccttccgccgccgccccgggccgccgccgccgcccccgcacgccgcgcccgcgcccccgctccgccgcggagtttctgcatgactgtcacaaagatgtcctggcgtccgcaataccgtagctccaagttccggaatgtctacgggaaggtggccaaccgggagcactgcttcgatgggatccccatcaccaagaatgtgcacgacaaccacttctgtgccgtcaacacccgcttcctggccatcgtcaccgagagcgcagggggcggctccttcctcgtcatccccctggagcagacaggcaggattgaacccaactaccccaaggtctgcggccaccagggcaatgtgctggatatcaaatggaaccccttcatcgacaacatcattgcctcgtgctcggaggacacgtcggtgcggatctgggagatccccgagggcgggctgaagcggaacatgacggaggcgctcctggagctgcacgggcacagccggcgtgtggggctggtcgagtggcaccccaccaccaacaacatcctgttcagcgctggctacgactacaaggtcctcatctggaacctggatgtgggtgagccggtgaagatgattgactgccacacggatgtgatcctctgcatgtccttcaacacggacggcagcctgctcaccaccacgtgcaaggacaagaagctgcgtgtgattgagccccgctctggccgtgttctgcaggaggccaactgcaaaaaccacagagtgaaccgggtggtgttcctggggaacatgaagcggctcctcacgacaggggtctccaggtggaacacaagacagattgccctctgggaccaggaggacctctccatgcccctgatcgaagaggaaattgatgggctctctggcctcctgttccccttctatgatgctgacacccacatgctctacctggctggaaagggtgatggaaacatccggtactacgagatcagcactgagaagccctacctgagttacctcatggagttccgctccccagccccgcagaaaggcctaggggtcatgcccaagcacgggctggatgtgtcagcctgcgaggtgttccgcttctacaagctggtgactctcaagggcctgatcgagcccatctccatgatcgtgccccggaggtcagattcctaccaggaagacatttacccaatgacaccaggcacggagccagcactgaccccggatgaatggctgggaggcatcaaccgagatcccgtgctgatgtctttgaaagaaggctataagaagtcctcaaaaatggtatttaaggctcccatcaaagaaaagaagagtgttgtggtcaacggaatagatttattagaaaatgtcccacccaggacagagaatgagctccttcgaatgttcttccggcagcaggatgagattcgacggttgaaagaggagctggcccagaaggacatccgcattcggcagctccagctggaactgaaaaacttgcgcaacagccccaagaactgttagctccccagctgggctgttttctaagccgatctctccgtcgtttctactcatcccttaacttctcccttaccagtgaccccagagacagagccaggacaggagtgggggccagcctgaggacccccgcctaccacctcgagaactggaagccaacctctaacctcctgacctcatgctaataaaagtccccagcttctggagaccccctgccggcagcccctttccctgccaccccaggagccaggcttcccctcagctgggtgaagactacagactccctggggttggcaggggctccatctcagtggaccaggaagcaagaggggaagcgggatcccagctagacttagaacttggacttttcccctgtgaagggggctgccaggacatctcagcactcccgcctggagctctcagcatcactgaaggtaccacagtgtaagtgctggactgcaggctgcagtgatccctctttcgtcccaccccctcttccctcagcagccccggaagcctgcctcacccgacgaggacagcgagcggcccggctcctttctgtctcttcccttcccaccctcttgtcttcagggaattcagaggattgctctccaaggccataatgaccccttgccttccccatgattctctacaaagctcttgcacacccttttcccattcaatttgtgagccaggcagggtagggattagtgtccccctttgacaaatgacagaactgagggttgcaatggggaaatgacttataaagtcacccagcaggtcaacaatgggcccacgaccaagaccctgggtgttcagaccccaaggccagggcctttcccgctgcatcaagatgccaatccctttgtgggcttcaccagtgcccaagtctctatggagaatgagaactggaagccactgctaccgtctacccagcaccagtagtgccgatgtgccacactgcccagttgaggcccctcacgctctgtgcccctagatccttcaggtccccaccctcagctgtcaccaccaccctccccaggggactccatctgagatgaggcctcgtcctcctggaagctgaggctgagaagggtggagcttggccctggggaaggcagaccagggtctgatggcttctagggatgctctgcgtgtgtctcagcaccgctatctcagccactttcagccttatgcacgtagaatgaccacagccactcgcatccgtatagcactttaaagtttctgcagtcctttgacacataggatctcatggagcctcacgtctactcccttctgcagatgaggaaaccgagagaagtggcccaaggtcacgcaactctgagatgccacatttcatttgatcttgtacacattttcttttattccttcttttttcctcctttcatttcccactacgcacaaagagtttataaacactgttctcagaagagtcacagtttggggtgagatctggaaatcaagaaatgggtgtccactcttttctttcattagctaggatctactagatgcattatactccatacctgcttttcccatggccgccctacggaaaatcccatccacagaggccagggctacccaagcccctccaggtgagctgggcctttcctttatgaacctccatcctcccagccagctacagtagggcctcctcaccccgtaccccacagctagacagtgtcagcactcatctcctcctcccacatttctggagcttttttttttccttccccattgacctttgtggtcttctgtgattatttatgctgcctcccaaggatagaattgaaataaaatgttttcaacttatcaaa

SEQ ID NO: 4729 - DNA, 3566 bp, Homo sapiens
  source 1..3566: mol_type = unassigned DNA; mol_type = unassigned DNA
cgggccctctccctctctccctttcttcctgcctcgccttcctgcggcgaaggaggctcatctattataaatgcacattcggggctgacatcagcgacgagcggcgggcgagcgccgacgagcggtccctgcgcgctgcccgcccggagcgcagcccccaggctcggccgagccgccggcggggcgcggggagcgagccgggagctgccggacccccttccgccgccgccccgggccgccgccgccgcccccgcacgccgcgcccgcgcccccgctccgccgcggagtttctgcatgactgtcacaaagatgtcctggcgtccgcaataccgtagctccaagttccggaatgtctacgggaaggtggccaaccgggagcactgcttcgatgggatccccatcaccaagaatgtgcacgacaaccacttctgtgccgtcaacacccgcttcctggccatcgtcaccgagagcgcagggggcggctccttcctcgtcatccccctggagcagacaggcaggattgaacccaactaccccaaggtctgcggccaccagggcaatgtgctggatatcaaatggaaccccttcatcgacaacatcattgcctcgtgctcggaggacacgtcggtgcggatctgggagatccccgagggcgggctgaagcggaacatgacggaggcgctcctggagctgcacgggcacagccggcgtgtggggctggtcgagtggcaccccaccaccaacaacatcctgttcagcgctggctacgactacaaggtcctcatctggaacctggatgtgggtgagccggtgaagatgattgactgccacacggatgtgatcctctgcatgtccttcaacacggacggcagcctgctcaccaccacgtgcaaggacaagaagctgcgtgtgattgagccccgctctggccgtgttctgcaggaggccaactgcaaaaaccacagagtgaaccgggtggtgttcctggggaacatgaagcggctcctcacgacaggggtctccaggtggaacacaagacagattgccctctgggaccaggaggacctctccatgcccctgatcgaagaggaaattgatgggctctctggcctcctgttccccttctatgatgctgacacccacatgctctacctggctggaaagggtgatggaaacatccggtactacgagatcagcactgagaagccctacctgagttacctcatggagttccgctccccagccccgcagaaaggcctaggggtcatgcccaagcacgggctggatgtgtcagcctgcgaggtgttccgcttctacaagctggtgactctcaagggcctgatcgagcccatctccatgatcgtgccccggaggtcagattcctaccaggaagacatttacccaatgacaccaggcacggagccagcactgaccccggatgaatggctgggaggcatcaaccgagatcccgtgctgatgtctttgaaagaaggctataagaagtcctcaaaaatggtatttaaggctcccatcaaagaaaagaagagtgttgtggtcaacggaatagatttattagaaaatgtcccacccaggacagagaatgagctccttcgaatgttcttccggcagcaggatgagattcgacggttgaaagaggagctggcccagaaggacatccgcattcggcagctccagctggaactgaaaaacttgcgcaacagccccaagaactgttagctccccagctgggctgttttctaagccgatctctccgtcgtttctactcatcccttaacttctcccttaccagtgaccccagagacagagccaggacaggagtgggggccagcctgaggacccccgcctaccacctcgagaactggaagccaacctctaacctcctgacctcatgctaataaaagtccccagcttctggagaccccctgccggcagcccctttccctgccaccccaggagccaggcttcccctcagctgggtgaagactacagactccctggggttggcaggggctccatctcagtggaccaggaagcaagaggggaagcgggatcccagctagacttagaacttggacttttcccctgtgaagggggctgccaggacatctcagcactcccgcctggagctctcagcatcactgaaggtaccacagtgtaagtgctggactgcaggctgcagtgatccctctttcgtcccaccccctcttccctcagcagccccggaagcctgcctcacccgacgaggacagcgagcggcccggctcctttctgtctcttcccttcccaccctcttgtcttcagggaattcagaggattgctctccaaggccataatgaccccttgccttccccatgattctctacaaagctcttgcacacccttttcccattcaatttgtgagccaggcagggtagggattagtgtccccctttgacaaatgacagaactgagggttgcaatggggaaatgacttataaagtcacccagcaggtcaacaatgggcccacgaccaagaccctgggtgttcagaccccaaggccagggcctttcccgctgcatcaagatgccaatccctttgtgggcttcaccagtgcccaagtctctatggagaatgagaactggaagccactgctaccgtctacccagcaccagtagtgccgatgtgccacactgcccagttgaggcccctcacgctctgtgcccctagatccttcaggtccccaccctcagctgtcaccaccaccctccccaggggactccatctgagatgaggcctcgtcctcctggaagctgaggctgagaagggtggagcttggccctggggaaggcagaccagggtctgatggcttctagggatgctctgcgtgtgtctcagcaccgctatctcagccactttcagccttatgcacgtagaatgaccacagccactcgcatccgtatagcactttaaagtttctgcagtcctttgacacataggatctcatggagcctcacgtctactcccttctgcagatgaggaaaccgagagaagtggcccaaggtcacgcaactctgagatgccacatttcatttgatcttgtacacattttcttttattccttcttttttcctcctttcatttcccactacgcacaaagagtttataaacactgttctcagaagagtcacagtttggggtgagatctggaaatcaagaaatgggtgtccactcttttctttcattagctaggatctactagatgcattatactccatacctgcttttcccatggccgccctacggaaaatcccatccacagaggccagggctacccaagcccctccaggtgagctgggcctttcctttatgaacctccatcctcccagccagctacagtagggcctcctcaccccgtaccccacagctagacagtgtcagcactcatctcctcctcccacatttctggagcttttttttttccttccccattgacctttgtggtcttctgtgattatttatgctgcctcccaaggatagaattgaaataaaatgttttcaacttatc

SEQ ID NO: 4730 - DNA, 3332 bp, Homo sapiens
  source 1..3332: mol_type = unassigned DNA; mol_type = unassigned DNA
attcaaaccgcctgctgggtgccgtgggccattgtgcaagtcttccaggccgcggtcgaatgattctgacaagcgatgtcctggcgtccgcaataccgtagctccaagttccggaatgtctacgggaaggtggccaaccgggagcactgcttcgatgggatccccatcaccaagaatgtgcacgacaaccacttctgtgccgtcaacacccgcttcctggccatcgtcaccgagagcgcagggggcggctccttcctcgtcatccccctggagcagacaggcaggattgaacccaactaccccaaggtctgcggccaccagggcaatgtgctggatatcaaatggaaccccttcatcgacaacatcattgcctcgtgctcggaggacacgtcggtgcggatctgggagatccccgagggcgggctgaagcggaacatgacggaggcgctcctggagctgcacgggcacagccggcgtgtggggctggtcgagtggcaccccaccaccaacaacatcctgttcagcgctggctacgactacaaggtcctcatctggaacctggatgtgggtgagccggtgaagatgattgactgccacacggatgtgatcctctgcatgtccttcaacacggacggcagcctgctcaccaccacgtgcaaggacaagaagctgcgtgtgattgagccccgctctggccgtgttctgcaggaggccaactgcaaaaaccacagagtgaaccgggtggtgttcctggggaacatgaagcggctcctcacgacaggggtctccaggtggaacacaagacagattgccctctgggaccaggaggacctctccatgcccctgatcgaagaggaaattgatgggctctctggcctcctgttccccttctatgatgctgacacccacatgctctacctggctggaaagggtgatggaaacatccggtactacgagatcagcactgagaagccctacctgagttacctcatggagttccgctccccagccccgcagaaaggcctaggggtcatgcccaagcacgggctggatgtgtcagcctgcgaggtgttccgcttctacaagctggtgactctcaagggcctgatcgagcccatctccatgatcgtgccccggaggtcagattcctaccaggaagacatttacccaatgacaccaggcacggagccagcactgaccccggatgaatggctgggaggcatcaaccgagatcccgtgctgatgtctttgaaagaaggctataagaagtcctcaaaaatggtatttaaggctcccatcaaagaaaagaagagtgttgtggtcaacggaatagatttattagaaaatgtcccacccaggacagagaatgagctccttcgaatgttcttccggcagcaggatgagattcgacggttgaaagaggagctggcccagaaggacatccgcattcggcagctccagctggaactgaaaaacttgcgcaacagccccaagaactgttagctccccagctgggctgttttctaagccgatctctccgtcgtttctactcatcccttaacttctcccttaccagtgaccccagagacagagccaggacaggagtgggggccagcctgaggacccccgcctaccacctcgagaactggaagccaacctctaacctcctgacctcatgctaataaaagtccccagcttctggagaccccctgccggcagcccctttccctgccaccccaggagccaggcttcccctcagctgggtgaagactacagactccctggggttggcaggggctccatctcagtggaccaggaagcaagaggggaagcgggatcccagctagacttagaacttggacttttcccctgtgaagggggctgccaggacatctcagcactcccgcctggagctctcagcatcactgaaggtaccacagtgtaagtgctggactgcaggctgcagtgatccctctttcgtcccaccccctcttccctcagcagccccggaagcctgcctcacccgacgaggacagcgagcggcccggctcctttctgtctcttcccttcccaccctcttgtcttcagggaattcagaggattgctctccaaggccataatgaccccttgccttccccatgattctctacaaagctcttgcacacccttttcccattcaatttgtgagccaggcagggtagggattagtgtccccctttgacaaatgacagaactgagggttgcaatggggaaatgacttataaagtcacccagcaggtcaacaatgggcccacgaccaagaccctgggtgttcagaccccaaggccagggcctttcccgctgcatcaagatgccaatccctttgtgggcttcaccagtgcccaagtctctatggagaatgagaactggaagccactgctaccgtctacccagcaccagtagtgccgatgtgccacactgcccagttgaggcccctcacgctctgtgcccctagatccttcaggtccccaccctcagctgtcaccaccaccctccccaggggactccatctgagatgaggcctcgtcctcctggaagctgaggctgagaagggtggagcttggccctggggaaggcagaccagggtctgatggcttctagggatgctctgcgtgtgtctcagcaccgctatctcagccactttcagccttatgcacgtagaatgaccacagccactcgcatccgtatagcactttaaagtttctgcagtcctttgacacataggatctcatggagcctcacgtctactcccttctgcagatgaggaaaccgagagaagtggcccaaggtcacgcaactctgagatgccacatttcatttgatcttgtacacattttcttttattccttcttttttcctcctttcatttcccactacgcacaaagagtttataaacactgttctcagaagagtcacagtttggggtgagatctggaaatcaagaaatgggtgtccactcttttctttcattagctaggatctactagatgcattatactccatacctgcttttcccatggccgccctacggaaaatcccatccacagaggccagggctacccaagcccctccaggtgagctgggcctttcctttatgaacctccatcctcccagccagctacagtagggcctcctcaccccgtaccccacagctagacagtgtcagcactcatctcctcctcccacatttctggagcttttttttttccttccccattgacctttgtggtcttctgtgattatttatgctgcctcccaaggatagaattgaaataaaatgttttcaacttatc

SEQ ID NO: 4731 - DNA, 3611 bp, Homo sapiens
  source 1..3611: mol_type = unassigned DNA; mol_type = unassigned DNA
acagattctgttgacctttagtaatgagggaggcagggctagagggtgactagcagccaggcctcccaggctcccaggcctctcagatgcctggaatttcggagctagaaggtagtcagattcccgttatcttgactgctgcagcggggtctctgggatggtgatgtgagtgcctcctgcacccgtggcccccatgtggcataactccttgggcgctattcatccacacggcccatctgtgcagggtacagccttcatggtcttagctggcagccctgacaacttggatgtgcaaagaagatacaagtttgtttcctctgaagcttgtctggtgtcatccaggagccccacctgatgtcctggcgtccgcaataccgtagctccaagttccggaatgtctacgggaaggtggccaaccgggagcactgcttcgatgggatccccatcaccaagaatgtgcacgacaaccacttctgtgccgtcaacacccgcttcctggccatcgtcaccgagagcgcagggggcggctccttcctcgtcatccccctggagcagacaggcaggattgaacccaactaccccaaggtctgcggccaccagggcaatgtgctggatatcaaatggaaccccttcatcgacaacatcattgcctcgtgctcggaggacacgtcggtgcggatctgggagatccccgagggcgggctgaagcggaacatgacggaggcgctcctggagctgcacgggcacagccggcgtgtggggctggtcgagtggcaccccaccaccaacaacatcctgttcagcgctggctacgactacaaggtcctcatctggaacctggatgtgggtgagccggtgaagatgattgactgccacacggatgtgatcctctgcatgtccttcaacacggacggcagcctgctcaccaccacgtgcaaggacaagaagctgcgtgtgattgagccccgctctggccgtgttctgcaggaggccaactgcaaaaaccacagagtgaaccgggtggtgttcctggggaacatgaagcggctcctcacgacaggggtctccaggtggaacacaagacagattgccctctgggaccaggaggacctctccatgcccctgatcgaagaggaaattgatgggctctctggcctcctgttccccttctatgatgctgacacccacatgctctacctggctggaaagggtgatggaaacatccggtactacgagatcagcactgagaagccctacctgagttacctcatggagttccgctccccagccccgcagaaaggcctaggggtcatgcccaagcacgggctggatgtgtcagcctgcgaggtgttccgcttctacaagctggtgactctcaagggcctgatcgagcccatctccatgatcgtgccccggaggtcagattcctaccaggaagacatttacccaatgacaccaggcacggagccagcactgaccccggatgaatggctgggaggcatcaaccgagatcccgtgctgatgtctttgaaagaaggctataagaagtcctcaaaaatggtatttaaggctcccatcaaagaaaagaagagtgttgtggtcaacggaatagatttattagaaaatgtcccacccaggacagagaatgagctccttcgaatgttcttccggcagcaggatgagattcgacggttgaaagaggagctggcccagaaggacatccgcattcggcagctccagctggaactgaaaaacttgcgcaacagccccaagaactgttagctccccagctgggctgttttctaagccgatctctccgtcgtttctactcatcccttaacttctcccttaccagtgaccccagagacagagccaggacaggagtgggggccagcctgaggacccccgcctaccacctcgagaactggaagccaacctctaacctcctgacctcatgctaataaaagtccccagcttctggagaccccctgccggcagcccctttccctgccaccccaggagccaggcttcccctcagctgggtgaagactacagactccctggggttggcaggggctccatctcagtggaccaggaagcaagaggggaagcgggatcccagctagacttagaacttggacttttcccctgtgaagggggctgccaggacatctcagcactcccgcctggagctctcagcatcactgaaggtaccacagtgtaagtgctggactgcaggctgcagtgatccctctttcgtcccaccccctcttccctcagcagccccggaagcctgcctcacccgacgaggacagcgagcggcccggctcctttctgtctcttcccttcccaccctcttgtcttcagggaattcagaggattgctctccaaggccataatgaccccttgccttccccatgattctctacaaagctcttgcacacccttttcccattcaatttgtgagccaggcagggtagggattagtgtccccctttgacaaatgacagaactgagggttgcaatggggaaatgacttataaagtcacccagcaggtcaacaatgggcccacgaccaagaccctgggtgttcagaccccaaggccagggcctttcccgctgcatcaagatgccaatccctttgtgggcttcaccagtgcccaagtctctatggagaatgagaactggaagccactgctaccgtctacccagcaccagtagtgccgatgtgccacactgcccagttgaggcccctcacgctctgtgcccctagatccttcaggtccccaccctcagctgtcaccaccaccctccccaggggactccatctgagatgaggcctcgtcctcctggaagctgaggctgagaagggtggagcttggccctggggaaggcagaccagggtctgatggcttctagggatgctctgcgtgtgtctcagcaccgctatctcagccactttcagccttatgcacgtagaatgaccacagccactcgcatccgtatagcactttaaagtttctgcagtcctttgacacataggatctcatggagcctcacgtctactcccttctgcagatgaggaaaccgagagaagtggcccaaggtcacgcaactctgagatgccacatttcatttgatcttgtacacattttcttttattccttcttttttcctcctttcatttcccactacgcacaaagagtttataaacactgttctcagaagagtcacagtttggggtgagatctggaaatcaagaaatgggtgtccactcttttctttcattagctaggatctactagatgcattatactccatacctgcttttcccatggccgccctacggaaaatcccatccacagaggccagggctacccaagcccctccaggtgagctgggcctttcctttatgaacctccatcctcccagccagctacagtagggcctcctcaccccgtaccccacagctagacagtgtcagcactcatctcctcctcccacatttctggagcttttttttttccttccccattgacctttgtggtcttctgtgattatttatgctgcctcccaaggatagaattgaaataaaatgttttcaacttatc

SEQ ID NO: 4732 - DNA, 2378 bp, Homo sapiens
  source 1..2378: mol_type = unassigned DNA; mol_type = unassigned DNA
cgcagacgggaagctgctcagcaccggcttcagcaggatgagtgagcggcaactcgcgctctgggacccggtaggccaggccgcgccgggcgcgctagctcgctccttctctgggtctgccgggagcgccttcccgggctgtggctggcgcccaagaggccagagcggagcggggagctcccattcgggaaaagcctcgctgcgactccggggagccagcagacacccctgctctagggatcggcctttgagcgcgcttaagggttcgggatcggctgagagccgcgtgcctcctgctctctccaggcccggatgctctccaggtcaggggccagacgtggccccgcaggaagctgagtgcttaggccccatttgtctcttccccgcatccgctcctccaccccggacacccaagtcagcaagctggttgctcatccctccatgctcctcagggcaggcagctgggtgatgtccctccctgtctccccctccccccaggagaggtttgcggcccacgaggggatgaggcccatgcgggccgtcttcacgcgccagggccatatcttcaccacgggcttcacccgcatgagccagcgagagctgggcctgtgggacccggtaacgcagctggaggcttgggttttgctgcgtcgcgtgaaggatcctgcgctggcgcccccacctggtgatgccgagtccctgggggtggtttgctgtgactgcatgcggcgcgcagcggaacaacttcgaggagccagtggcactgcaggagatggacacaagcaacggggtcctattgcccttttacgatcccgactccagcatcgtctacctgtgtggcaagggcgacagcagcattcggtactttgagattaccgacgagccgcctttcgtgcactacctgaacacgttcagcagcaaagagccgcagcggggcatgggtttcatgcccaaaaggggactggatgtcagcaagtgtgagatcgcccggttctacaagctacacgaaagaaagtgtgaacctatcatcatgactgtgccccgcaagtcagacctcttccaggacgatctgtacccggatacgccaggcccggagccggccctagaagcggacgaatggctatccggccaggacgccgaacccgtgctcatttcgctgagggacggctatgtgccccccaagcaccgcgagctccgggtcacgaagcgcaacatcctggacgtgcgcccgccctccggcccccgccgcagccagtcggccagcgacgcccccttgtcgcagcacaccctggagacgctgctggaagagatcaaggccctccgcgagcgggtgcaggcccaggagcagcgcatcacggctctggagaacatgctgtgcgagctggtggacggcacggactagccccgcgcgccaggcaggcggagcggggcggggcgcacaagctcggccccgccccggcttttagtcccgaactccggaccccgccttcttgggctgggcccgggggcgggactggggagggaactccgcccctcgcgggagaccagaactcttggagcttaggggagacccacgtcgctccagcggaggctggactgcgagcctcgtctgggactcggctggagctggcctagggaggcctggggtaacctggggggctcagcaatggtgctgcacggcgaggtggtgtccccctttgtcctccgcccagggcagggaaagtgcttagtattagcgtgatgcttggggttattggagcctgagcttgacctcaaacgggtggcgatttgatgggtacccccaggctggggaaaatgacagcgcttctcctaatcagctcactggattccatcaccctgagcggtaaaccagatgggcgtcaccccagttctgcagacacatacacaacccgtttgctgcagagccggacccagtggctacacccacagcggtctgtggtagagaactctcttccttctttccaccgacaggggcgagggctgcttcctcgcggcagcccccgcgaagaaatctcgagagaactggcatgaggagttaggttcatcacaaatacacacacactgcccccaaccctctgccgttgcctctctcagaaaaacaagacgtactgaatgaaatattttactaagcgttcagtctgtgcctcctgcatgggtgggagtgaggggaacgagacccccagcctctgcaaatgctacccccaggctcctgggagacctggcgatgcactcctgggctcagggtccatcaggcagcctcttaccctagagctctctccactctgaggttcagaaggaccccaacccacaccgtaggcgttccccccaagtaaagttaggtagcaaaagcctccggt

SEQ ID NO: 4733 - DNA, 2603 bp, Homo sapiens
  source 1..2603: mol_type = unassigned DNA; mol_type = unassigned DNA
gatggcagcggcagctggggctgcagcggcgccgggctctagagagccgcaggatcggccagagtgcggagctggacacccgggtcccagatactacagacacccggagaggtggctccttcgccctgaagccttcctcggccccctacgcactcgggccccttccgcagaggattcgcagcgtgagcgccccgcagcccgctcaggaccagctatgagcagacgtgtggttcggcaaagcaagttccgccatgtgtttgggcaggcagcaaaggccgaccaggcctacgaggacatccgtgtgtccaaggtcacatgggacagctccttctgtgccgtcaaccccaaattcctggccattattgtggaggctggaggcgggggtgccttcatcgtcctgcctctggccaagacagggcgagtggataagaactacccactggtcactgggcacactgcccctgtgctggatattgactggtgtccacacaatgacaacgttatcgccagtgcctcagacgacaccaccatcatggtgtggcagattccagactatacccccatgcgcaacattacggaacctatcatcacacttgagggccactccaagcgtgtgggcatcctctcctggcaccctactgccaggaatgtcctgctcagtgcaggtggtgacaatgtgatcatcatctggaatgtgggcaccggggaggtgctgctgagcctggatgatatgcacccagacgtcatccacagtgtgtgctggaacagcaacggtagcctgctagccaccacctgcaaggacaagaccttgcgcatcattgaccccagaaaaggccaagtggtggcggagaggtttgcggcccacgaggggatgaggcccatgcgggccgtcttcacgcgccagggccatatcttcaccacgggcttcacccgcatgagccagcgagagctgggcctgtgggacccgaacaacttcgaggagccagtggcactgcaggagatggacacaagcaacggggtcctattgcccttttacgatcccgactccagcatcgtctacctgtgtggcaagggcgacagcagcattcggtactttgagattaccgacgagccgcctttcgtgcactacctgaacacgttcagcagcaaagagccgcagcggggcatgggtttcatgcccaaaaggggactggatgtcagcaagtgtgagatcgcccggttctacaagctacacgaaagaaagtgtgaacctatcatcatgactgtgccccgcaagtcagacctcttccaggacgatctgtacccggatacgccaggcccggagccggccctagaagcggacgaatggctatccggccaggacgccgaacccgtgctcatttcgctgagggacggctatgtgccccccaagcaccgcgagctccgggtcacgaagcgcaacatcctggacgtgcgcccgccctccggcccccgccgcagccagtcggccagcgacgcccccttgtcgcagcagcacaccctggagacgctgctggaagagatcaaggccctccgcgagcgggtgcaggcccaggagcagcgcatcacggctctggagaacatgctgtgcgagctggtggacggcacggactagccccgcgcgccaggcaggcggagcggggcggggcgcacaagctcggccccgccccggcttttagtcccgaactccggaccccgccttcttgggctgggcccgggggcgggactggggagggaactccgcccctcgcgggagaccagaactcttggagcttaggggagacccacgtcgctccagcggaggctggactgcgagcctcgtctgggactcggctggagctggcctagggaggcctggggtaacctggggggctcagcaatggtgctgcacggcgaggtggtgtccccctttgtcctccgcccagggcagggaaagtgcttagtattagcgtgatgcttggggttattggagcctgagcttgacctcaaacgggtggcgatttgatgggtacccccaggctggggaaaatgacagcgcttctcctaatcagctcactggattccatcaccctgagcggtaaaccagatgggcgtcaccccagttctgcagacacatacacaacccgtttgctgcagagccggacccagtggctacacccacagcggtctgtggtagagaactctcttccttctttccaccgacaggggcgagggctgcttcctcgcggcagcccccgcgaagaaatctcgagagaactggcatgaggagttaggttcatcacaaatacacacacactgcccccaaccctctgccgttgcctctctcagaaaaacaagacgtactgaatgaaatattttactaagcgttcagtctgtgcctcctgcatgggtgggagtgaggggaacgagacccccagcctctgcaaatgctacccccaggctcctgggagacctggcgatgcactcctgggctcagggtccatcaggcagcctcttaccctagagctctctccactctgaggttcagaaggaccccaacccacaccgtaggcgttccccccaagtaaagttaggtagcaaaagcc

SEQ ID NO: 4734 - DNA, 4069 bp, Homo sapiens
  source 1..4069: mol_type = unassigned DNA; mol_type = unassigned DNA
gatggcagcggcagctggggctgcagcggcgccgggctctagagagccgcaggatcggccagagtgcggagctggacacccgggtcccagatactacagacacccggagaggtggctccttcgccctgaagccttcctcggccccctacgcactcgggccccttccgcagaggattcgcagcgtgagcgccccgcagcccgctcaggaccagctatgagcagacgtgtggttcggcaaagcaagttccgccatgtgtttgggcaggcagcaaaggccgaccaggcctacgaggacatccgtgtgtccaaggtcacatgggacagctccttctgtgccgtcaaccccaaattcctggccattattgtggaggctggaggcgggggtgccttcatcgtcctgcctctggccaagacagggcgagtggataagaactacccactggtcactgggcacactgcccctgtgctggatattgactggtgtccacacaatgacaacgttatcgccagtgcctcagacgacaccaccatcatggtgtggcagattccagactatacccccatgcgcaacattacggaacctatcatcacacttgagggccactccaagcgtgtgggcatcctctcctggcaccctactgccaggaatgtcctgctcagtgcaggtggtgacaatgtgatcatcatctggaatgtgggcaccggggaggtgctgctgagcctggatgatatgcacccagacgtcatccacagtgtgtgctggaacagcaacggtagcctgctagccaccacctgcaaggacaagaccttgcgcatcattgaccccagaaaaggccaagtggtggcggtctctgccctaagtaagcccccagcctgcaattctctgcccggctcctgttccctcccctcccttgcatctcagaagctcagagaagggctcctcgctttgggattgaggaggggagaagctggaaactccatcctcccaccagaacctgcatgaaacctgagctcctggacccctctcctctcagccggcacccagacgcatcttccagggtctggggcctgacactggctcgagggctggccctttctccttgtggacccgctgggcgggggatggggcaaccctcgcgcgttgcttatcccagccggatgccctgggagggcggcggccctggcctcgccagcctcaagtctaacctggggtgcgggtgcgtgggccgcgtgcatgtctgcgtggagcaagcgcgccgagagcggtcggggctggcgccggggcgctctaacccactaacccggcgagcaggagcaagcccggcctcacgagggcgcccgcccgctgcgggctgtcttcaccgcagacgggaagctgctcagcaccggcttcagcaggatgagtgagcggcaactcgcgctctgggacccggtaggccaggccgcgccgggcgcgctagctcgctccttctctgggtctgccgggagcgccttcccgggctgtggctggcgcccaagaggccagagcggagcggggagctcccattcgggaaaagcctcgctgcgactccggggagccagcagacacccctgctctagggatcggcctttgagcgcgcttaagggttcgggatcggctgagagccgcgtgcctcctgctctctccaggcccggatgctctccaggtcaggggccagacgtggccccgcaggaagctgagtgcttaggccccatttgtctcttccccgcatccgctcctccaccccggacacccaagtcagcaagctggttgctcatccctccatgctcctcagggcaggcagctgggtgatgtccctccctgtctccccctccccccaggagaggtttgcggcccacgaggggatgaggcccatgcgggccgtcttcacgcgccagggccatatcttcaccacgggcttcacccgcatgagccagcgagagctgggcctgtgggacccggtaacgcagctggaggcttggggtgtgtgcctcggggactggcatcacgggagagtggccaggcgccccccacccgcagggcatgcccacctggacaggactgaaggctgctgccacctctgcagcgcctgccattctcacacccacccctctgcccagttttgctgcgtcgcgtgaaggatcctgcgctggcgcccccacctggtgatgccgagtccctgggggtggtttgctgtgactgcatgcggcgcgcagcgggtatatgtgcaggggaggaggagctatgtgcgcaggggaggaggagagatgtgcccaggggaggggcctgcaactctggtcactagaggtttggggcatagggtttgggaaggccaggaagcgtaaaggggcttctgggggtcccgaagtagcacgggagggtggggcagggctggtcacgcctcctgtgctcgggcagaacaacttcgaggagccagtggcactgcaggagatggacacaagcaacggggtcctattgcccttttacgatcccgactccagcatcgtctacctgtgtggcaagggcgacagcagcattcggtactttgagattaccgacgagccgcctttcgtgcactacctgaacacgttcagcagcaaagagccgcagcggggcatgggtttcatgcccaaaaggggactggatgtcagcaagtgtgagatcgcccggttctacaagctacacgaaagaaagtgtgaacctatcatcatgactgtgccccgcaagtcagacctcttccaggacgatctgtacccggatacgccaggcccggagccggccctagaagcggacgaatggctatccggccaggacgccgaacccgtgctcatttcgctgagggacggctatgtgccccccaagcaccgcgagctccgggtcacgaagcgcaacatcctggacgtgcgcccgccctccggcccccgccgcagccagtcggccagcgacgcccccttgtcgcagcacaccctggagacgctgctggaagagatcaaggccctccgcgagcgggtgcaggcccaggagcagcgcatcacggctctggagaacatgctgtgcgagctggtggacggcacggactagccccgcgcgccaggcaggcggagcggggcggggcgcacaagctcggccccgccccggcttttagtcccgaactccggaccccgccttcttgggctgggcccgggggcgggactggggagggaactccgcccctcgcgggagaccagaactcttggagcttaggggagacccacgtcgctccagcggaggctggactgcgagcctcgtctgggactcggctggagctggcctagggaggcctggggtaacctggggggctcagcaatggtgctgcacggcgaggtggtgtccccctttgtcctccgcccagggcagggaaagtgcttagtattagcgtgatgcttggggttattggagcctgagcttgacctcaaacgggtggcgatttgatgggtacccccaggctggggaaaatgacagcgcttctcctaatcagctcactggattccatcaccctgagcggtaaaccagatgggcgtcaccccagttctgcagacacatacacaacccgtttgctgcagagccggacccagtggctacacccacagcggtctgtggtagagaactctcttccttctttccaccgacaggggcgagggctgcttcctcgcggcagcccccgcgaagaaatctcgagagaactggcatgaggagttaggttcatcacaaatacacacacactgcccccaaccctctgccgttgcctctctcagaaaaacaagacgtactgaatgaaatattttactaagcgttcagtctgtgcctcctgcatgggtgggagtgaggggaacgagacccccagcctctgcaaatgctacccccaggctcctgggagacctggcgatgcactcctgggctcagggtccatcaggcagcctcttaccctagagctctctccactctgaggttcagaaggaccccaacccacaccgtaggcgttccccccaagtaaagttaggtagcaaaagc

SEQ ID NO: 4735 - DNA, 2345 bp, Homo sapiens
  source 1..2345: mol_type = unassigned DNA; mol_type = unassigned DNA
ctcctccctcccgcagctcacaggactaaggaccaaaggcatttctgggcactgagatcctacctctctgcctgcagctatgagcagacgtgtggttcggcaaagcaagttccgccatgtgtttgggcaggcagcaaaggccgaccaggcctacgaggacatccgtgtgtccaaggtcacatgggacagctccttctgtgccgtcaaccccaaattcctggccattattgtggaggctggaggcgggggtgccttcatcgtcctgcctctggccaagacagggcgagtggataagaactacccactggtcactgggcacactgcccctgtgctggatattgactggtgtccacacaatgacaacgttatcgccagtgcctcagacgacaccaccatcatggtgtggcagattccagactatacccccatgcgcaacattacggaacctatcatcacacttgagggccactccaagcgtgtgggcatcctctcctggcaccctactgccaggaatgtcctgctcagtgcaggtggtgacaatgtgatcatcatctggaatgtgggcaccggggaggtgctgctgagcctggatgatatgcacccagacgtcatccacagtgtgtgctggaacagcaacggtagcctgctagccaccacctgcaaggacaagaccttgcgcatcattgaccccagaaaaggccaagtggtggcgaacaacttcgaggagccagtggcactgcaggagatggacacaagcaacggggtcctattgcccttttacgatcccgactccagcatcgtctacctgtgtggcaagggcgacagcagcattcggtactttgagattaccgacgagccgcctttcgtgcactacctgaacacgttcagcagcaaagagccgcagcggggcatgggtttcatgcccaaaaggggactggatgtcagcaagtgtgagatcgcccggttctacaagctacacgaaagaaagtgtgaacctatcatcatgactgtgccccgcaagtcagacctcttccaggacgatctgtacccggatacgccaggcccggagccggccctagaagcggacgaatggctatccggccaggacgccgaacccgtgctcatttcgctgagggacggctatgtgccccccaagcaccgcgagctccgggtcacgaagcgcaacatcctggacgtgcgcccgccctccggcccccgccgcagccagtcggccagcgacgcccccttgtcgcagcagcacaccctggagacgctgctggaagagatcaaggccctccgcgagcgggtgcaggcccaggagcagcgcatcacggctctggagaacatgctgtgcgagctggtggacggcacggactagccccgcgcgccaggcaggcggagcggggcggggcgcacaagctcggccccgccccggcttttagtcccgaactccggaccccgccttcttgggctgggcccgggggcgggactggggagggaactccgcccctcgcgggagaccagaactcttggagcttaggggagacccacgtcgctccagcggaggctggactgcgagcctcgtctgggactcggctggagctggcctagggaggcctggggtaacctggggggctcagcaatggtgctgcacggcgaggtggtgtccccctttgtcctccgcccagggcagggaaagtgcttagtattagcgtgatgcttggggttattggagcctgagcttgacctcaaacgggtggcgatttgatgggtacccccaggctggggaaaatgacagcgcttctcctaatcagctcactggattccatcaccctgagcggtaaaccagatgggcgtcaccccagttctgcagacacatacacaacccgtttgctgcagagccggacccagtggctacacccacagcggtctgtggtagagaactctcttccttctttccaccgacaggggcgagggctgcttcctcgcggcagcccccgcgaagaaatctcgagagaactggcatgaggagttaggttcatcacaaatacacacacactgcccccaaccctctgccgttgcctctctcagaaaaacaagacgtactgaatgaaatattttactaagcgttcagtctgtgcctcctgcatgggtgggagtgaggggaacgagacccccagcctctgcaaatgctacccccaggctcctgggagacctggcgatgcactcctgggctcagggtccatcaggcagcctcttaccctagagctctctccactctgaggttcagaaggaccccaacccacaccgtaggcgttccccccaagtaaagttaggtagcaaaa

SEQ ID NO: 4736 - DNA, 1847 bp, Homo sapiens
  source 1..1847: mol_type = unassigned DNA; mol_type = unassigned DNA
ctcggggactggcatcacgggagagtggccaggcgccccccacccgcagggcatgcccacctggacaggactgaaggctgctgccacctctgcagcgcctgccattctcacacccacccctctgcccagttttgctgcgtcgcgtgaaggatcctgcgctggcgcccccacctggtgatgccgagtccctgggggtggtttgctgtgactgcatgcggcgcgcagcgggtatatgtgcaggggaggaggagctatgtgcgcaggggaggaggagagatgtgcccaggggaggggcctgcaactctggtcactagaggtttggggcatagggtttgggaaggccaggaagcgtaaaggggcttctgggggtcccgaagtagcacgggagggtggggcagggctggtcacgcctcctgtgctcgggcagaacaacttcgaggagccagtggcactgcaggagatggacacaagcaacggggtcctattgcccttttacgatcccgactccagcatcgtctacctgtgtggcaagggcgacagcagcattcggtactttgagattaccgacgagccgcctttcgtgcactacctgaacacgttcagcagcaaagagccgcagcggggcatgggtttcatgcccaaaaggggactggatgtcagcaagtgtgagatcgcccggttctacaagctacacgaaagaaagtgtgaacctatcatcatgactgtgccccgcaagtcagacctcttccaggacgatctgtacccggatacgccaggcccggagccggccctagaagcggacgaatggctatccggccaggacgccgaacccgtgctcatttcgctgagggacggctatgtgccccccaagcaccgcgagctccgggtcacgaagcgcaacatcctggacgtgcgcccgccctccggcccccgccgcagccagtcggccagcgacgcccccttgtcgcagcagcacaccctggagacgctgctggaagagatcaaggccctccgcgagcgggtgcaggcccaggagcagcgcatcacggctctggagaacatgctgtgcgagctggtggacggcacggactagccccgcgcgccaggcaggcggagcggggcggggcgcacaagctcggccccgccccggcttttagtcccgaactccggaccccgccttcttgggctgggcccgggggcgggactggggagggaactccgcccctcgcgggagaccagaactcttggagcttaggggagacccacgtcgctccagcggaggctggactgcgagcctcgtctgggactcggctggagctggcctagggaggcctggggtaacctggggggctcagcaatggtgctgcacggcgaggtggtgtccccctttgtcctccgcccagggcagggaaagtgcttagtattagcgtgatgcttggggttattggagcctgagcttgacctcaaacgggtggcgatttgatgggtacccccaggctggggaaaatgacagcgcttctcctaatcagctcactggattccatcaccctgagcggtaaaccagatgggcgtcaccccagttctgcagacacatacacaacccgtttgctgcagagccggacccagtggctacacccacagcggtctgtggtagagaactctcttccttctttccaccgacaggggcgagggctgcttcctcgcggcagcccccgcgaagaaatctcgagagaactggcatgaggagttaggttcatcacaaatacacacacactgcccccaaccctctgccgttgcctctctcagaaaaacaagacgtactgaatgaaatattttactaagcgttc

SEQ ID NO: 4737 - DNA, 3502 bp, Homo sapiens
  source 1..3502: mol_type = unassigned DNA; mol_type = unassigned DNA
gccagagtgcggagctggacacccgggtcccagatactacagacacccggagaggtggctccttcgccctgaagccttcctcggccccctacgcactcgggccccttccgcagaggattcgcagcgtgagcgccccgcagcccgctcaggaccagctatgagcagacgtgtggttcggcaaagcaagttccgccatgtgtttgggcaggcagcaaaggccgaccaggcctacgaggacatccgtgtgtccaaggtcacatgggacagctccttctgtgccgtcaaccccaaattcctggccattattgtggaggctggaggcgggggtgccttcatcgtcctgcctctggccaaggtggtgacaatgtgatcatcatctggaatgtgggcaccggggaggtgctgctgagcctggatgatatgcacccagacgtcatccacagtgtgtgctggaacagcaacggtagcctgctagccaccacctgcaaggacaagaccttgcgcatcattgaccccagaaaaggccaagtggtggcggtgagtgcctggcctggccactccccagaaccccttgaccagtggccagctgtcagcacccttgtacccaccattatcagagcccctggtcccggctttcacctgtcgcatccctgctccagagactagcccccttcccccgtctctgcaaccacaggtctctgccctaagtaagcccccagcctgcaattctctgcccggctcctgttccctcccctcccttgcatctcagaagctcagagaagggctcctcgctttgggattgaggaggggagaagctggaaactccatcctcccaccagaacctgcatgaaacctgagctcctggacccctctcctctcagccggcacccagacgcatcttccagggtctggggcctgacactggctcgagggctggccctttctccttgtggacccgctgggcgggggatggggcaaccctcgcgcgttgcttatcccagccggatgccctgggagggcggcggccctggcctcgccagcctcaagtctaacctggggtgcgggtgcgtgggccgcgtgcatgtctgcgtggagcaagcgcgccgagagcggtcggggctggcgccggggcgctctaacccactaacccggcgagcaggagcaagcccggcctcacgagggcgcccgcccgctgcgggctgtcttcaccgcagacgggaagctgctcagcaccggcttcagcaggatgagtgagcggcaactcgcgctctgggacccggtaggccaggccgcgccgggcgcgctagctcgctccttctctgggtctgccgggagcgccttcccgggctgtggctggcgcccaagaggccagagcggagcggggagctcccattcgggaaaagcctcgctgcgactccggggagccagcagacacccctgctctagggatcggcctttgagcgcgcttaagggttcgggatcggctgagagccgcgtgcctcctgctctctccaggcccggatgctctccaggtcaggggccagacgtggccccgcaggaagctgagtgcttaggccccatttgtctcttccccgcatccgctcctccaccccggacacccaagtcagcaagctggttgctcatccctccatgctcctcagggcaggcagctgggtgatgtccctccctgtctccccctccccccaggagaggtttgcggcccacgaggggatgaggcccatgcgggccgtcttcacgcgccagggccatatcttcaccacgggcttcacccgcatgagccagcgagagctgggcctgtgggacccggtaacgcagctggaggcttggggtgtgtgcctcggggactggcatcacgggagagtggccaggcgccccccacccgcagggcatgcccacctggacaggactgaaggctgctgccacctctgcagcgcctgccattctcacacccacccctctgcccagttttgctgcgtcgcgtgaaggatcctgcgctggcgcccccacctggtgatgccgagtccctgggggtggtttgctgtgactgcatgcggcgcgcagcggaacaacttcgaggagccagtggcactgcaggagatggacacaagcaacggggtcctattgcccttttacgatcccgactccagcatcgtctacctgtgtggcaagggcgacagcagcattcggtactttgagattaccgacgagccgcctttcgtgcactacctgaacacgttcagcagcaaagagccgcagcggggcatgggtttcatgcccaaaaggggactggatgtcagcaagtgtgagatcgcccggttctacaagctacacgaaagaaagtgtgaacctatcatcatgactgtgccccgcaagtcagacctcttccaggacgatctgtacccggatacgccaggcccggagccggccctagaagcggacgaatggctatccggccaggacgccgaacccgtgctcatttcgctgagggacggctatgtgccccccaagcaccgcgagctccgggtcacgaagcgcaacatcctggacgtgcgcccgccctccggcccccgccgcagccagtcggccagcgacgcccccttgtcgcagcacaccctggagacgctgctggaagagatcaaggccctccgcgagcgggtgcaggcccaggagcagcgcatcacggctctggagaacatgctgtgcgagctggtggacggcacggactagccccgcgcgccaggcaggcggagcggggcggggcgcacaagctcggccccgccccggcttttagtcccgaactccggaccccgccttcttgggctgggcccgggggcgggactggggagggaactccgcccctcgcgggagaccagaactcttggagcttaggggagacccacgtcgctccagcggaggctggactgcgagcctcgtctgggactcggctggagctggcctagggaggcctggggtaacctggggggctcagcaatggtgctgcacggcgaggtggtgtccccctttgtcctccgcccagggcagggaaagtgcttagtattagcgtgatgcttggggttattggagcctgagcttgacctcaaacgggtggcgatttgatgggtacccccaggctggggaaaatgacagcgcttctcctaatcagctcactggattccatcaccctgagcggtaaaccagatgggcgtcaccccagttctgcagacacatacacaacccgtttgctgcagagccggacccagtggctacacccacagcggtctgtggtagagaactctcttccttctttccaccgacaggggcgagggctgcttcctcgcggcagcccccgcgaagaaatctcgagagaactggcatgaggagttaggttcatcacaaatacacacacactgcccccaaccctctgccgttgcctctctcagaaaaacaagacgtactgaatgaaatattttactaagcgttc

SEQ ID NO: 4738 - DNA, 1581 bp, Homo sapiens
  source 1..1581: mol_type = unassigned DNA; mol_type = unassigned DNA
cgcagacgggaagctgctcagcaccggcttcagcaggatgagtgagcggcaactcgcgctctgggacccgttttgctgcgtcgcgtgaaggatcctgcgctggcgcccccacctggtgatgccgagtccctgggggtggtttgctgtgactgcatgcggcgcgcagcggaacaacttcgaggagccagtggcactgcaggagatggacacaagcaacggggtcctattgcccttttacgatcccgactccagcatcgtctacctgtgtggcaagggcgacagcagcattcggtactttgagattaccgacgagccgcctttcgtgcactacctgaacacgttcagcagcaaagagccgcagcggggcatgggtttcatgcccaaaaggggactggatgtcagcaagtgtgagatcgcccggttctacaagctacacgaaagaaagtgtgaacctatcatcatgactgtgccccgcaagtcagacctcttccaggacgatctgtacccggatacgccaggcccggagccggccctagaagcggacgaatggctatccggccaggacgccgaacccgtgctcatttcgctgagggacggctatgtgccccccaagcaccgcgagctccgggtcacgaagcgcaacatcctggacgtgcgcccgccctccggcccccgccgcagccagtcggccagcgacgcccccttgtcgcagcacaccctggagacgctgctggaagagatcaaggccctccgcgagcgggtgcaggcccaggagcagcgcatcacggctctggagaacatgctgtgcgagctggtggacggcacggactagccccgcgcgccaggcaggcggagcggggcggggcgcacaagctcggccccgccccggcttttagtcccgaactccggaccccgccttcttgggctgggcccgggggcgggactggggagggaactccgcccctcgcgggagaccagaactcttggagcttaggggagacccacgtcgctccagcggaggctggactgcgagcctcgtctgggactcggctggagctggcctagggaggcctggggtaacctggggggctcagcaatggtgctgcacggcgaggtggtgtccccctttgtcctccgcccagggcagggaaagtgcttagtattagcgtgatgcttggggttattggagcctgagcttgacctcaaacgggtggcgatttgatgggtacccccaggctggggaaaatgacagcgcttctcctaatcagctcactggattccatcaccctgagcggtaaaccagatgggcgtcaccccagttctgcagacacatacacaacccgtttgctgcagagccggacccagtggctacacccacagcggtctgtggtagagaactctcttccttctttccaccgacaggggcgagggctgcttcctcgcggcagcccccgcgaagaaatctcgagagaactggcatgaggagttaggttcatcacaaatacacacacactgcccccaaccctctgccgttgcctctctcagaaaaacaagacgtactgaatgaaatattttactaag

SEQ ID NO: 4739 - DNA, 1416 bp, Homo sapiens
  source 1..1416: mol_type = unassigned DNA; mol_type = unassigned DNA
atgagcagacgtgtggttcggcaaagcaagttccgccatgtgtttgggcaggcagcaaaggccgaccaggcctacgaggacatccgtgtgtccaaggtcacatgggacagctccttctgtgccgtcaaccccaaattcctggccattattgtggaggctggaggcgggggtgccttcatcgtcctgcctctggccaagacagggcgagtggataagaactacccactggtcactgggcacactgcccctgtgctggatattgactggtgtccacacaatgacaacgttatcgccagtgcctcagacgacaccaccatcatggtgtggcagattccagactatacccccatgcgcaacattacggaacctatcatcacacttgagggccactccaagcgtgtgggcatcctctcctggcaccctactgccaggaatgtcctgctcagtgcaggtggtgacaatgtgatcatcatctggaatgtgggcaccggggaggtgctgctgagcctggatgatatgcacccagacgtcatccacagtgtgtgctggaacagcaacggtagcctgctagccaccacctgcaaggacaagaccttgcgcatcattgaccccagaaaaggccaagtggtggcggagcaagcccggcctcacgagggcgcccgcccgctgcgggctgtcttcaccgcagacgggaagctgctcagcaccggcttcagcaggatgagtgagcggcaactcgcgctctgggacccgaacaacttcgaggagccagtggcactgcaggagatggacacaagcaacggggtcctattgcccttttacgatcccgactccagcatcgtctacctgtgtggcaagggcgacagcagcattcggtactttgagattaccgacgagccgcctttcgtgcactacctgaacacgttcagcagcaaagagccgcagcggggcatgggtttcatgcccaaaaggggactggatgtcagcaagtgtgagatcgcccggttctacaagctacacgaaagaaagtgtgaacctatcatcatgactgtgccccgcaagtcagacctcttccaggacgatctgtacccggatacgccaggcccggagccggccctagaagcggacgaatggctatccggccaggacgccgaacccgtgctcatttcgctgagggacggctatgtgccccccaagcaccgcgagctccgggtcacgaagcgcaacatcctggacgtgcgcccgccctccggcccccgccgcagccagtcggccagcgacgcccccttgtcgcagcacaccctggagacgctgctggaagagatcaaggccctccgcgagcgggtgcaggcccaggagcagcgcatcacggctctggagaacatgctgtgcgagctggtggacggcacggactag

SEQ ID NO: 4740 - DNA, 492 bp, Homo sapiens
  source 1..492: mol_type = unassigned DNA; mol_type = unassigned DNA
cttaggttgatggcagcggcagctggggctgcagcggcgccgggctctagagagccgcaggatcggccagagtgcggagctggacacccgggtcccagatactacagacacccggagaggtggctccttcgccctgaagccttcctcggccccctacgcactcgggccccttccgcagaggattcgcagcgtgagcgccccgcagcccgctcaggaccagggcgacagcagcattcggtactttgagattaccgacgagccgcctttcgtgcactacctgaacacgttcagcagcaaagagccgcagcggggcatgggtttcatgcccaaaaggggactggatgtcagcaagtgtgagatcgcccggttctacaagctacacgaaagaaagtgtgaacctatcatcatgactgtgccccgcaagtcagacctcttccaggacgatctgtacccggatacgccaggcccggagccggccctagaagcggacga

SEQ ID NO: 4741 - DNA, 868 bp, Homo sapiens
  source 1..868: mol_type = unassigned DNA; mol_type = unassigned DNA
ggcagcggcagctggggctgcagcggcgccgggctctagagagccgcaggatcggccagagtgcggagctggacacccgggtcccagatactacagacacccggagaggtggctccttcgccctgaagccttcctcggccccctacgcactcgggccccttccgcagaggattcgcagcgtgagcgccccgcagcccgctcaggaccagctcacaggactaaggaccaaaggcatttctgggcactgagatcctacctctctgcctgcagctatgagcagacgtgtggttcggcaaagcaagttccgccatgtgtttgggcaggcagcaaaggccgaccaggcctacgaggacatccgtgtgtccaaggtcacatgggacagctccttctgtgccgtcaaccccaaattcctggccattattgtggaggctggaggcgggggtgccttcatcgtcctgcctctggccaagacagggcgagtggataagaactacccactggtcactgggcacactgcccctgtgctggatattgactggtgtccacacaatgacaacgttatcgccagtgcctcagacgacaccaccatcatggtgtggcagattccagactatacccccatgcgcaacattacggaacctatcatcacacttgagggccactccaagcgtgtgggcatcctctcctggcaccctactgccaggaatgtcctgctcagtgcaggtggtgacaatgtgatcatcatctggaatgtgggcaccggggaggtgctgctgagcctggatgatatgcacccagacgtcatccacagtgtgtgctggaacagcaacggtagcctgctagccaccacctgcaaggacaagacctt

SEQ ID NO: 4742 - DNA, 559 bp, Homo sapiens
  source 1..559: mol_type = unassigned DNA; mol_type = unassigned DNA
aggttgatggcagcggcagctggggctgcagcggcgccgggctctagagagccgcaggatcggccagagtgcggagctggacacccgggtcccagatactacagacacccggagaggtggctccttcgccctgaagccttcctcggccccctacgcactcgggccccttccgcagaggattcgcagcgtgagcgccccgcagcccgctcaggaccagacagggcgagtggataagaactacccactggtcactgggcacactgcccctgtgctggatattgactggtgtccacacaatgacaacgttatcgccagtgcctcagacgacaccaccatcatggtgtggcagattccagactatacccccatgcgcaacattacggaacctatcatcacacttgagggccactccaagcgtgtgggcatcctctcctggcaccctactgccaggaatgtcctgctcagtgcaggtggtgacaatgtgatcatcatctggaatgtgggcaccggggaggtgctgctgagcctggatgatatgcacccagacgtcatccacagt

SEQ ID NO: 4743 - DNA, 2397 bp, Homo sapiens
  source 1..2397: mol_type = unassigned DNA; mol_type = unassigned DNA
ctatgagcagacgtgtggttcggcaaagcaagttccgccatgtgtttgggcaggcagcaaaggccgaccaggcctacgaggacatccgtgtgtccaaggtcacatgggacagctccttctgtgccgtcaaccccaaattcctggccattattgtggaggctggaggcgggggtgccttcatcgtcctgcctctggccaagacagggcgagtggataagaactacccactggtcactgggcacactgcccctgtgctggatattgactggtgtccacacaatgacaacgttatcgccagtgcctcagacgacaccaccatcatggtgtggcagattccagactatacccccatgcgcaacattacggaacctatcatcacacttgagggccactccaagcgtgtgggcatcctctcctggcaccctactgccaggaatgtcctgctcagtgcaggtggtgacaatgtgatcatcatctggaatgtgggcaccggggaggtgctgctgagcctggatgatatgcacccagacgtcatccacagtgtgtgctggaacagcaacggtagcctgctagccaccacctgcaaggacaagaccttgcgcatcattgaccccagaaaaggccaagtggtggcggagaggtttgcggcccacgaggggatgaggcccatgcgggccgtcttcacgcgccagggccatatcttcaccacgggcttcacccgcatgagccagcgagagctgggcctgtgggacccgaacaacttcgaggagccagtggcactgcaggagatggacacaagcaacggggtcctattgcccttttacgatcccgactccagcatcgtctacctgtgtggcaagggcgacagcagcattcggtactttgagattaccgacgagccgcctttcgtgcactacctgaacacgttcagcagcaaagagccgcagcggggcatgggtttcatgcccaaaaggggactggatgtcagcaagtgtgagatcgcccggttctacaagctacacgaaagaaagtgtgaacctatcatcatgactgtgccccgcaagtcagacctcttccaggacgatctgtacccggatacgccaggcccggagccggccctagaagcggacgaatggctatccggccaggacgccgaacccgtgctcatttcgctgagggacggctatgtgccccccaagcaccgcgagctccgggtcacgaagcgcaacatcctggacgtgcgcccgccctccggcccccgccgcagccagtcggccagcgacgcccccttgtcgcagcagcacaccctggagacgctgctggaagagatcaaggccctccgcgagcgggtgcaggcccaggagcagcgcatcacggctctggagaacatgctgtgcgagctggtggacggcacggactagccccgcgcgccaggcaggcggagcggggcggggcgcacaagctcggccccgccccggcttttagtcccgaactccggaccccgccttcttgggctgggcccgggggcgggactggggagggaactccgcccctcgcgggagaccagaactcttggagcttaggggagacccacgtcgctccagcggaggctggactgcgagcctcgtctgggactcggctggagctggcctagggaggcctggggtaacctggggggctcagcaatggtgctgcacggcgaggtggtgtccccctttgtcctccgcccagggcagggaaagtgcttagtattagcgtgatgcttggggttattggagcctgagcttgacctcaaacgggtggcgatttgatgggtacccccaggctggggaaaatgacagcgcttctcctaatcagctcactggattccatcaccctgagcggtaaaccagatgggcgtcaccccagttctgcagacacatacacaacccgtttgctgcagagccggacccagtggctacacccacagcggtctgtggtagagaactctcttccttctttccaccgacaggggcgagggctgcttcctcgcggcagcccccgcgaagaaatctcgagagaactggcatgaggagttaggttcatcacaaatacacacacactgcccccaaccctctgccgttgcctctctcagaaaaacaagacgtactgaatgaaatattttactaagcgttcagtctgtgcctcctgcatgggtgggagtgaggggaacgagacccccagcctctgcaaatgctacccccaggctcctgggagacctggcgatgcactcctgggctcagggtccatcaggcagcctcttaccctagagctctctccactctgaggttcagaaggaccccaacccacaccgtaggcgttccccccaagtaaagttaggtagcaaaagcctccggt

SEQ ID NO: 4744 - DNA, 1843 bp, Homo sapiens
  source 1..1843: mol_type = unassigned DNA; mol_type = unassigned DNA
gtggaagccgccgccgcgctcgcagcttgcaggcgccgcgtagccgtcgccaccgccgccagcccgtgcgccctcggcgcgtacccgccgcgctcccatccccgccgccggccaggggcgcgctcggccgccccggacagtgtcccgctgcggctccgcggcgatggccaccaagatcgacaaagaggcttgccgggcggcgtacaacctggtgcgcgacgacggctcggccgtcatctgggtgacttttaaatatgacggctccaccatcgtccccggcgagcagggagcggagtaccagcacttcatccagcagtgcacagatgacgtccggttgtttgccttcgtgcgcttcaccaccggggatgccatgagcaagaggtccaagtttgccctcatcacgtggatcggtgagaacgtcagcgggctgcagcgcgccaaaaccgggacggacaagaccctggtgaaggaggtcgtacagaatttcgctaaggagtttgtgatcagtgatcggaaggagctggaggaagatttcatcaagagcgagctgaagaaggcggggggagccaattacgacgcccagacggagtaaccccagcccccgccacaccaccccttgccaaagtcatctgcctgctccccgggggagaggaccgccggcctcagctactagcccaccagcccaccagggagaaaagaagccatgagaggcagcgcccgccaccctgtgtccacagcccccaccttcccgcttcccttagaaccctgccgtgtcctatctcatgacgctcatggaacctctttctttgatcttctttttcttttctccccctcttttttgttctaaagaaaagtcattttgatgcaaggtcctgcctgccatcagatccgaggtgcctcctgcagtgaccccttttcctggcatttctcttccacgcgacgaggtctgcctagtgagatctgcatgacctcacgttgctttccagagcccgggcctattttgccatctcagttttcctggaccctgcttcctgtgtaccactgaggggcagctgggccaggagctgtgcccggtgcctgcagccttcataagcacacacgtccattccctactaaggcccagacctcctggtatctgccccgggctccctcatcccacctccatccggagttgcctaagatgcatgtccagcataggcaggattgctcggtggtgagaaggttaggtccggctcagactgaataagaagagataaaatttgccttaaaacttacctggcagtggctttgctgcacggtctgaaaccacctgttcccaccctcttgaccgaaatttccttgtgacacagagaagggcaaaggtctgagcccagagttgacggagggagtatttcagggttcacttcaggggctcccaaagcgacaagatcgttagggagagaggcccagggtggggactgggaatttaaggagagctgggaacggatcccttaggttcaggaagcttctgtgtaagctgcgaggatggcttgggccgaagggttgctctgcccgccgcgctagctgtgagctgagcaaagccctgggctcacagcaccccaaaagcctgtggcttcagtcctgcgtctgcaccacacattcaaaaggatcgttttgttttgtttttaaagaaaggtgagattggcttggttcttcatgagcacatttgatatagctctttttctgtttttccttgctcatttcgttttggggaagaaatctgtactgtattgggattgtaaagaacatctctgcactcagacagtttacagaaataaatgttttttttgtttttcagaaaaca

SEQ ID NO: 4745 - DNA, 5330 bp, Homo sapiens
  source 1..5330: mol_type = unassigned DNA; mol_type = unassigned DNA
gtgggtttcatagctgtgtgttttcatttggctcctcttccttggggattgccttgtctcctagcaagattcagggtgctggggactgtggctgtatttcttcagcagttcagagtctttggtttattggtcatcatcacccacttgtggaaaagacacattcatgtgtccagcacatgtcttgtctatccccggctccatcttatgcctgcgggaggggagattctagtccccacaccgtgttgtgagggtttgggaaggacctgaagccagcaggcagccttcattgtgagagctatgctctgatcccaaagctgacttttccatgccaggtttccccattgccctaggatctggtgtccctggtggaacttcgtcccgtgtctatgtgctctggaggcttaggtgtaggatccctggatgactggtggggaaaggctgggggaccctgttgtccagccttcttctttcacagaggtggaaaccagggcccagagccattaaatactgccttccgggcatttcagagcccgctgcttctatttttctattctcagtctgtcagagagaccagtaagtaccagaattttgacttcccagagcctaggagagtgtatggcatatgacaggtgtttattaatgtgtgttcgtgggaagaacaaattgtgtcgctttcattgtctttcaatacaatgaagatcagttcctctcctgggccccacttcatagaaatatgcattcctgacttcacaaatggaactgcccaagaatccccactcatgttttctccccggagcttcccctgcacccacattctctgcattggttaggaatatcctcataggcgcaacactcctgaatagcagaccttacacttgtaccccgacaggcctccttgttccctgaagctaaccctgggcctggctttggggtttgcagccggatttgtcatcttctgtctgccagtttcactgacttggttattccaaggaattcctgggacttccctttgttaaaaaataaacgttaggaatgagaagaggaactagctactgcctgtgtcttcactctgagtgactgagggaacttcattaaatctcagattcccctaacgatcctgagaatgaaggtgaacccacagtcctgtagaacattctctctgactgttgagcactccgctttgtaccaggtgttctcatcaagtgtgcaagccccttttatgctcatacgaccctcccaacagccctaggatgtgaagctgctattgtccgcatttgcagatgaggagactcaggctcagggaggttgagtccccagggaggctcaggccactggagatgcctgtggacaagggtgcctgtttgtatttggcctggacctgctcccagcatgctggggtttaaacctgggcagttgggagccattaaaaaatgaaaaggggtcaggtgtggtggctcatgcctgtgatcccagcactttgggaggccaagggggggagatcacttgaggccaggagttcgagaccagtctggccaacatgatgaaaccctgtctctaataaaaatacaaaaatgagccggccgtggtggtacgtgcctgtaatcccagctacttcagaggctgaggcaggagaattgcttgaacctggaagtggaggttgtgctgagctgagattgcaccactgcactccagtctgggcgacagagtgagactccgtctcaaaaaatgaaaataaataaaaataaaaatgaaaaggatgggctgggcgtggtgactcacccctgtaatcccagcactttgggaggctggtctcgaactcctgacctcaggtgatctgcctgcctcggcctccaaagtgctgggatgacgggcgtgagccaccgcacctggcctgaaccattttaaagtgtacaattcagtggctttcagaacattcacagtgttgtgcaagccctacctctgtctggttccaaaactttttcatcaccccaaaaggagatggtggctctttcaagacgccagctttggcatcaactggaccttctggttgtctgacttcggacaagcattgtaatttccagcctttgtttcctcacctttaaaatggaaataatgttgatcaccttacgggcctttttaaaaagaacttgattgaggtatgatgtatgtacctcaaaatcaagtcatcctaagtgtactttttcagtactttttcgtgaatttgtggagttgtgcacccattaccacaatcccaattttagaacgtctctatcatttcctgttcccatctccagctctgtgtaaccacgagtctgctttctgtctgtatgggtttgccttttttagacatttataccaatggcagctgacagtacatggtcttcatgcctggcttctttcactcagcatcctgtttccgaggttcatccatgtagttgcgtgtggcagcgcttcattcctctctgtggctgaggaatattccattgtgtggacggaccgtgttttgataatccactcctctgttgatggacataggggttgcttccaccttccatgattcatatttactactgtgtgtcattctcagtactgtggcactgtgctggtacacataagtgcttaataattgtggttagccgggcgtggtggctcacgcctgtagtgccaacaccttgggaggccaagctgggcggatcacttaaggccaggagtttgagaccagcctggccaatgtggcgaaaccctgcttctactaaaaatacaaaaaatagctgggtgtggtggcagacgcctgtagttcgagctacttgggaggctgagacatgagaatggcttgaaccctgggggcagaggttgctgtgagccaagattgcgccactgcactccagcctgggcaacaggcttttctctcaagaaaaagaaaaatggtggtcattgtttatgttatttccttatgggcttttttttttaatgtggatgattttcttacctttagacgtgttatttgtggttttgatagcttttttttgtcaagctgtccgtcatcgttctgaaattttgtttgttaaagtcttatgatccacatatggcagtaactgtgtatcatcatggcttaagggtgtctgataagccaggtcacctggttccctcattcatgccacaagcgtttactgagtgcatcatgggtgcctgcgggttctatgggtgaaacctgtgtactgcaagaggaaagactgactgcatccattttgctgagccctgtagccccacagcctggcgtggtatttgttgaaagaaggcagagcctctaccctcgtgtaactcagtgcgggtggagagcccatggcagacccaggactggaggctcctgcgtcattaggaacattggtggctgaagcttgcttgtcccagctggcgagagccaattacgcctgtctccttccacctccacgtatggtgacatcactttgatagcttgacgtcagccactgggggactatttacatcatggatatgggcaaaagacaccaatctgagcttttgtccttttcttttttttggagtgcctgcacacccgtgagcctttccaacctcgtaacctattattttcctgacgagatagttttttacagatgagaaagttgaggcacagagaattgaagggacttggccaaggtaacagcccaaattcaagccccagcttcctcgggccatccccacggacatgggaagacgcagcatcagatctgccccactccctcctcccagtcaggttttttctgccagatgactctgctgttcaatttccattgactctgctgctgaatttccattgactgactctgctgctgaatttccatttccatctctcatcagggttttcagtgctttgcttcccagtgtgttgcctgagccaccctcacatcctgtgccttccttcttaataggaacgctgtgttttcctttgttcttgcagaatttcgctaaggagtttgtgatcagtgatcggaaggagctggaggaagatttcatcaagagcgagctgaagaaggcggggggagccaattacgacgcccagacggagtaaccccagcccccgccacaccaccccttgccaaagtcatctgcctgctccccgggggagaggaccgccggcctcagctactagcccaccagcccaccagggagaaaagaagccatgagaggcagcgcccgccaccctgtgtccacagcccccaccttcccgcttcccttagaaccctgccgtgtcctatctcatgacgctcatggaacctctttctttgatcttctttttcttttctccccctcttttttgttctaaagaaaagtcattttgatgcaaggtcctgcctgccatcagatccgaggtgcctcctgcagtgaccccttttcctggcatttctcttccacgcgacgaggtctgcctagtgagatctgcatgacctcacgttgctttccagagcccgggcctattttgccatctcagttttcctggaccctgcttcctgtgtaccactgaggggcagctgggccaggagctgtgcccggtgcctgcagccttcataagcacacacgtccattccctactaaggcccagacctcctggtatctgccccgggctccctcatcccacctccatccggagttgcctaagatgcatgtccagcataggcaggattgctcggtggtgagaaggttaggtccggctcagactgaataagaagagataaaatttgccttaaaacttacctggcagtggctttgctgcacggtctgaaaccacctgttcccaccctcttgaccgaaatttccttgtgacacagagaagggcaaaggtctgagcccagagttgacggagggagtatttcagggttcacttcaggggctcccaaagcgacaagatcgttagggagagaggcccagggtggggactgggaatttaaggagagctgggaacggatcccttaggttcaggaagcttctgtgtaagctgcgaggatggcttgggccgaagggttgctctgcccgccgcgctagctgtgagctgagcaaagccctgggctcacagcaccccaaaagcctgtggcttcagtcctgcgtctgcaccacacattcaaaaggatcgttttgttttgtttttaaagaaaggtgagattggcttggttcttcatgagcacatttgatatagctctttttctgtttttccttgctcatttcgttttggggaagaaatctgtactgtattgggattgtaaagaacatctctgcactcagacagtttacagaaataaatgttttttttgtttttc

SEQ ID NO: 4746 - DNA, 1677 bp, Homo sapiens
  source 1..1677: mol_type = unassigned DNA; mol_type = unassigned DNA
ctcgcagcttgcaggcgccgcgtagccgtcgccaccgccgccagcccgtgcgccctcggcgcgtacccgccgcgctcccatccccgccgccggccaggggcgcgctcggccgccccggacagtgtcccgctgcggctccgcggcgatggccaccaagatcgacaaagaggcttgccgggcggcgtacaacctggtgcgcgacgacggctcggccgtcatctgatgacgtccggttgtttgccttcgtgcgcttcaccaccggggatgccatgagcaagaggtccaagtttgccctcatcacgtggatcggtgagaacgtcagcgggctgcagcgcgccaaaaccgggacggacaagaccctggtgaaggaggtcgtacagaatttcgctaaggagtttgtgatcagtgatcggaaggagctggaggaagatttcatcaagagcgagctgaagaaggcggggggagccaattacgacgcccagacggagtaaccccagcccccgccacaccaccccttgccaaagtcatctgcctgctccccgggggagaggaccgccggcctcagctactagcccaccagcccaccagggagaaaagaagccatgagaggcagcgcccgccaccctgtgtccacagcccccaccttcccgcttcccttagaaccctgccgtgtcctatctcatgacgctcatggaacctctttctttgatcttctttttcttttctccccctcttttttgttctaaagaaaagtcattttgatgcaaggtcctgcctgccatcagatccgaggtgcctcctgcagtgaccccttttcctggcatttctcttccacgcgacgaggtctgcctagtgagatctgcatgacctcacgttgctttccagagcccgggcctattttgccatctcagttttcctggaccctgcttcctgtgtaccactgaggggcagctgggccaggagctgtgcccggtgcctgcagccttcataagcacacacgtccattccctactaaggcccagacctcctggtatctgccccgggctccctcatcccacctccatccggagttgcctaagatgcatgtccagcataggcaggattgctcggtggtgagaaggttaggtccggctcagactgaataagaagagataaaatttgccttaaaacttacctggcagtggctttgctgcacggtctgaaaccacctgttcccaccctcttgaccgaaatttccttgtgacacagagaagggcaaaggtctgagcccagagttgacggagggagtatttcagggttcacttcaggggctcccaaagcgacaagatcgttagggagagaggcccagggtggggactgggaatttaaggagagctgggaacggatcccttaggttcaggaagcttctgtgtaagctgcgaggatggcttgggccgaagggttgctctgcccgccgcgctagctgtgagctgagcaaagccctgggctcacagcaccccaaaagcctgtggcttcagtcctgcgtctgcaccacacattcaaaaggatcgttttgttttgtttttaaagaaaggtgagattggcttggttcttcatgagcacatttgatatagctctttttctgtttttccttgctcatttcgttttggggaagaaatctgtactgtattgggattg

SEQ ID NO: 4747 - DNA, 781 bp, Homo sapiens
  source 1..781: mol_type = unassigned DNA; mol_type = unassigned DNA
gaagcctgcagcactgttgccaggattcaggggagtgtgacaagggcagcggatgagtgcttccctcctgtcctctgcacatggtgctcccagggaactgcaccggtctcctgctgtgctgctccaggcgcactcgtggctcacagcctctccccagggacatgacatgggggtgttttaacgcagcaccatgttctcttttcgcttttggccacagatgacgtccggttgtttgccttcgtgcgcttcaccaccggggatgccatgagcaagaggtccaagtttgccctcatcacgtggatcggtgagaacgtcagcgggctgcagcgcgccaaaaccgggacggacaagaccctggtgaaggaggtcgtacagaatttcgctaaggagtttgtgatcagtgatcggaaggagctggaggaagatttcatcaagagcgagctgaagaaggcggggggagccaattacgacgcccagacggagtaaccccagcccccgccacaccaccccttgccaaagtcatctgcctgctccccgggggagaggaccgccggcctcagctactagcccaccagcccaccagggagaaaagaagccatgagaggcagcgcccgccaccctgtgtccacagcccccaccttcccgcttcccttagaaccctgccgtgtcctatctcatgacgctcatggaacctctttctttgatcttctttttcttttctccccctcttttttgttctaaagaaaagtcattttgatgcaaggtcctgcctgccatcaga

SEQ ID NO: 4748 - DNA, 713 bp, Homo sapiens
  source 1..713: mol_type = unassigned DNA; mol_type = unassigned DNA
ggaagccgccgccgcgctcgcagcttgcaggcgccgcgtagccgtcgccaccgccgccagcccgtgcgccctcggcgcgtacccgccgcgctcccatccccgccgccggccaggggcgcgctcggccgccccggacagtgtcccgctgcggctccgcggcgatggccaccaagatcgacaaagaggcttgccgggcggcgtacaacctggtgcgcgacgacggctcggccgtcatctggtaggaacttttcattcgtctccacgccccgctccccgggctcgcgcggggcctcgtgcaccgagccggcctccaggcgggacggattcgggcctcccgcgctgtcttcctcgccttattccgggacggcgtgccaggcccccgcgggcttctccgtggccagcgcgtctgttagattgtcctctgcaagcgccgcgtcgcgcggccaccagcgctgatgtgtgtgtgtgtttttttcttctcccaacccaaagggtgacttttaaatatgacggctccaccatcgtccccggcgagcagggagcggagtaccagcacttcatccagcagtgcacagatgacgtccggttgtttgccttcgtgcgcttcaccaccggggatgccatgagcaagaggtccaagtttgccctcatcacgtggatcggtgagaacgtcagcgggctgcagcgcgccaaaaccgggacggacaagaccc

SEQ ID NO: 4749 - DNA, 531 bp, Homo sapiens
  source 1..531: mol_type = unassigned DNA; mol_type = unassigned DNA
caccatcgtccccggcgagcagggagcggagtaccagcacttcatccagcagtgcacaggctggagtgcagtggtacaatctcagctaactgcaacctccgtctcccgggttcaagagattctcctgcctcagcctcctgagtagctgggattacaggcgcccacgaccacgcctggctaattttttgtaattttagtagagatggggttttcaccattttggccaggctggtctctaacttctgaccttaggtgatctgcccaccttggcctctcaaagtgctgggattacaggcgtgagccactgcgcccggccgacggtgtgggttcgaatccctgaacggctgcttcctggctgtgtggtttggaacgagttccttaatctctgggggtcttggtttcctcacctgcactctcacagtgctgttgcgaggataagtgagtcagtatgtataaaatgctcagaacagtgcctgtacaagctacatgattgtttgcgaaataaataaaaagtacaaaattgtgccaggg

SEQ ID NO: 4750 - DNA, 1944 bp, Homo sapiens
  source 1..1944: mol_type = unassigned DNA; mol_type = unassigned DNA
cccgggaccatcccacagcagatccagtggccgccaacgtcaggctggagttgcctccttcgtggatgttggatgtggaagcccaggagccccccaaggggaaatggtcgacgccgcccttcgacccgcgcttccccagccagaaccagatccgtaactgctaccagaacttcctggactaccaccgctgcctcaagaccaggacccgccgcgggaagagcacgcagccctgcgagtactatttccgcgtgtaccactcgctgtgccccatcagctgggtggagagctggaacgagcagatcaagaacgggattttcgccggcaaaatctgactgccccagcgcggcttcctctgaagatgcagtgatcctgcatctttttgtctcgcggagccccgggtctcggttatccacccctacctcccagtgtctaagccacgaataatgcagccaccagccttcgagttccttgtttcccttgctctggtctccacgtgtatgatggggttctcaggcccaggcttcgaccagaggaccctctgccaccaccgtttcttcctgtccttgagctaccttggtgaactcatgaccccaggcccctgctccaccaggatgtcccccaggtcctgccagctgggaagtgccagcatgaacgcctccaacttcgtggaagccagggtcccctgcagctgagggacgccaagcagacacacctgccctccccagccagctcctgtctgtatgggcgagatgactgagagcgcccacgtccctaaggctgtcctgaccctccatgctgcgacaaggacagggaatggtcggtcactatgggcctggtgtctcccctcccccaccacccggtgctgcccagctcaagccagaagctgactttggccgccatggggacatcaggcaaggtctggagacatttttggttggggcagaggcatgctcctggcatcgagtgggtggagaccagagaagccgctcaacatcctgcaatgcatgggacaggccctgcctagaaacaccagctcagcatggcagcagtgcggaggccaggaaaccctgatcgccagtttctaacgccctcaccatttttatttttatttttattttttttgagacagagtttcgctcctgtcacccaggctggagtacaatgatgcgatctcagctcactgcaacctctgcctcccgggttcaagtgattctcctgcctcagcctcccgagtagctgggattacaggcatgcaccaccacgcccagcttattttgtatttttagtagagacggggtttctccgtgttggtcaggctggtctcaaactcctgacctcaggcaatctgcccacctcagcctcccaaagtgctgggattacaggcgtgagccactgcacccggctcaccactagtttttagccctttttgttgggggtggggtgggggcagaggagaggcggatacagaaacttgtgagaatgtgatgaacgctctgaaccccctataaaaaatgtgcatgtaaatatatactctcaacatttaaaagatttcagaaggttcctggaaattccaatgtccacccatgagtcctcagctgagactccctgctccgctgccctctttgtctaagagctgtggcaacagcacctgaatttcagaaacaaaaggccgggcgcggtggctcacacctgtcatcctagcactttgggaggcagaggcaggaggatcgcttgagctcaggagttcgagactagccttagcaacacagtgagacacaattgctacaaaaagattttaaaattagtttgacggggtggcgtgtgcctatggtcccagctactcaggaggctgaggcaggagaattgcttcaatccaggaggtggaggttgcagtgagccgagatggcgccactgcactccagcctgggccacagaccctgtctc

SEQ ID NO: 4751 - DNA, 1663 bp, Homo sapiens
  source 1..1663: mol_type = unassigned DNA; mol_type = unassigned DNA
gcggtgcacgacggctcccattggctggggctcgggcgtcctagccaatccggccgcggggtgcgtttctcctgacccgggtgggaccgcaccccgcggactcagaagcgagcggcaccccgggaccatcccacagcagatccagtggccgccaacgtcaggctggagttgcctccttcgtggatgttggatgtggaagcccaggagccccccaaggggaaatggtcgacgccgcccttcgacccgcgcttccccagccagaaccagatccgtaactgctaccagaacttcctggactaccaccgctgcctcaagaccaggacccgccgcgggaagagcacgcagccctgcgagtactatttccgcgtgtaccactcgctgtgccccatcagctgggtggagagctggaacgagcagatcaagaacgggattttcgccggcaaaatctgactgccccagcgcggcttcctctgaagatgcagtgatcctgcatctttttgtctcgcggagccccgggtctcggttatccacccctacctcccagtgtctaagccacgaataatgccaccagccttcgagttccttgtttcccttgctctggtctccacgtgtatgatggggttctcaggcccaggcttcgaccagaggaccctctgccaccaccgtttcttcctgtccttgagctaccttggtgaactcatgaccccaggcccctgctccaccaggatgtcccccaggtcctgccagctgggaagtgccagcatgaacgcctccaacttcgtggaagccagggtcccctgcagctgagggacgccaagcagacacacctgccctccccagccagctcctgtctgtatgggcgagatgactgagagcgcccacgtccctaaggctgtcctgaccctccatgctgcgacaaggacagggaatggtcggtcactatgggcctggtgtctcccctcccccaccacccggtgctgcccagctcaagccagaagctgactttggccgccatggggacatcaggcaaggtctggagacatttttggttggggcagaggcatgctcctggcatcgagtgggtggagaccagagaagccgctcaacatcctgcaatgcatgggacaggccctgcctagaaacaccagctcagcatggcagcagtgcggaggccaggaaaccctgatcgccagtttctaacgccctcaccatttttatttttatttttattttttttgagacagagtttcgctcctgtcacccaggctggagtacaatgatgcgatctcagctcactgcaacctctgcctcccgggttcaagtgattctcctgcctcagcctcccgagtagctgggattacaggcatgcaccaccacgcccagcttattttgtatttttagtagagacggggtttctccgtgttggtcaggctggtctcaaactcctgacctcaggcaatctgcccacctcagcctcccaaagtgctgggattacaggcgtgagccactgcacccggctcaccactagtttttagccctttttgttgggggtggggtgggggcagaggagaggcggatacagaaacttgtgagaatgtgatgaacgctctgaaccccctataaaaaatgtgcatgtaaatatatactctcaacatttaaaaga

SEQ ID NO: 4752 - DNA, 2083 bp, Homo sapiens
  source 1..2083: mol_type = unassigned DNA; mol_type = unassigned DNA
agaagcgagcggcaccccgggaccatcccacagcagatccagtggccgccaacgtcaggctggagttgcctccttcgtggatgttggatgtggaagcccaggagccccccaaggggaaatggtcgacgccgcccttcgacccgcgcttccccagccagaaccagatccgtaactgctaccagaacttcctggactaccaccgctgcctcaagaccaggacccgccgcgggaagagcacgcagccctgcgagtactatttccgcgtgtaccactcgctgtgccccatcagctgggtggagagctggaacgagcagatcaagaacgggattttcgccggcaaaatctgactgccccagcgcggcttcctctgaagatgcagtgatcctgcatctttttgtctcgcggagccccgggtctcggttatccacccctacctcccagtgtctaagccacgaataatggtagatgcctcgcgttgacagctacgagccagcccagggtccccagttctcaacactgtcccacccagatggctccaaggccaaggagtgccgcttgacaaagccctagggttccagcctggtcctgctgagggagccgtgagaccagtcagcctggggtgctggttttcccaacgggtactccctgagctatcagccttccagaggggctcctaggagggggaagccccatcctctgactgaagcggtcctatgaggccctgttcaaccccagggttcaaaggacacaccctagatgagccatcccccaggatgacgccacctctgagatcttggtctcctggctccgtctctgaccacaacccaagaatggggtgagggcacagggtgtggactcaactacaggagggcttcctgttcatgcaacgtccccagagccttgacgaatgcacagaggcgctggcagaaccacgggggcaggacccctctctgagtcacagaatggagctaagttggtgaggtcacccagccaccagccttcgagttccttgtttcccttgctctggtctccacgtgtatgatggggttctcaggcccaggcttcgaccagaggaccctctgccaccaccgtttcttcctgtccttgagctaccttggtgaactcatgaccccaggcccctgctccaccaggatgtcccccaggtcctgccagctgggaagtgccagcatgaacgcctccaacttcgtggaagccagggtcccctgcagctgagggacgccaagcagacacacctgccctccccagccagctcctgtctgtatgggcgagatgactgagagcgcccacgtccctaaggctgtcctgaccctccatgctgcgacaaggacagggaatggtcggtcactatgggcctggtgtctcccctcccccaccacccggtgctgcccagctcaagccagaagctgactttggccgccatggggacatcaggcaaggtctggagacatttttggttggggcagaggcatgctcctggcatcgagtgggtggagaccagagaagccgctcaacatcctgcaatgcatgggacaggccctgcctagaaacaccagctcagcatggcagcagtgcggaggccaggaaaccctgatcgccagtttctaacgccctcaccatttttatttttatttttattttttttgagacagagtttcgctcctgtcacccaggctggagtacaatgatgcgatctcagctcactgcaacctctgcctcccgggttcaagtgattctcctgcctcagcctcccgagtagctgggattacaggcatgcaccaccacgcccagcttattttgtatttttagtagagacggggtttctccgtgttggtcaggctggtctcaaactcctgacctcaggcaatctgcccacctcagcctcccaaagtgctgggattacaggcgtgagccactgcacccggctcaccactagtttttagccctttttgttgggggtggggtgggggcagaggagaggcggatacagaaacttgtgagaatgtgatgaacgctctgaaccccctataaaaaatgtgcatgtaaatatatactctcaacattt

SEQ ID NO: 4753 - DNA, 1396 bp, Homo sapiens
  source 1..1396: mol_type = unassigned DNA; mol_type = unassigned DNA
ggagttgcctccttcgtggatgttggatgtggaagcccaggagccccccaaggggaaatggtcgacgccgcccttcgacccgcgcttccccagccagaaccagatccgtaactgctaccagaacttcctggactaccaccgctgcctcaagaccaggacccgccgcgggaagagcacgcagccctgcgagtactatttccgcgtgtaccactcgctgtgccccatcagctgggtggagagctggaacgagcagatcaagaacgggattttcgccggcaaaatctgactgccccagcgcggcttcctctgaagatgcagtgatcctgcatctttttgtctcgcggagccccgggtctcggttatccacccctacctcccagtgtctaagccacgaataatgcaggtagatgcctcgcgttgacagctacgagccagcccagggtccccagttctcaacactgtcccacccagatggctccaagggtgaccctagacaagcttcttgacctgtgtgagcccgaggttccccaaggcaaaccaagatggctcagggccccattatcagaggaggacacaccctagatgagccatcccccaggatgacgccacctctgagatcttggtctcctggctccgtctctgaccacaacccaagaatggggtgagggcacagggtgtggactcaactacaggagggcttcctgttcatgcaacgtccccagagccttgacgaatgcacagaggcgctggcagaaccacgggggcaggacccctctctgagtcacagaatggagctaagttggtgaggtcacccagccgccactgccccactgatgcctgagccaggggcaggggcagacctgcccggcctggcctccagcctggtggaccatcacctgtgcaaactccgaacacctcctccaggtgctctggctggctttccctggtgtccagtagccgcctcctgagacccctaatgccagcctcacagtctcagcaacctcccagccaccagccttcgagttccttgtttcccttgctctggtctccacgtgtatgatggggttctcaggcccaggcttcgaccagaggaccctctgccaccaccgtttcttcctgtccttgagctaccttggtgaactcatgaccccaggcccctgctccaccaggatgtcccccaggtcctgccagctgggaagtgccagcatgaacgcctccaacttcgtggaagccagggtcccctgcagctgagggacgccaagcagacacacctgccctccccagccagctcctgtctgtatgggcgagatgactgagagcgcccacgtccctaaggctgtcctgaccctccatgctgcgacaaggacagggaatggtcggtcactatgggcctggt

SEQ ID NO: 4754 - DNA, 690 bp, Homo sapiens
  source 1..690: mol_type = unassigned DNA; mol_type = unassigned DNA
gcaggtagatgcctcgcgttgacagctacgagccagcccagggtccccagttctcaacactgtcccacccagatggctccaaggtgctcctgcctccaatcaccacacctacctctcacctcagtcctttccctactcccctcctgcctggaccatctccccaggctccttccccatcccacccctgatccatcccatctcgggtcctgaggggtcttctttgtaccacccagcgctgactccatcccttcctcccccactctctgggctctccaccactctccatcacgaccccgctcccacctggctcatttcccctcccagaacatcgagatccccatcatgtgagccagcttatttccaacagaatcccctggtgtccacgctttcggcacccgcacccacagccagcctcctgacctccccagagccgtgtctagaacccatttttgccctgttggccagccttcctccttcctcctcctcccatcatcctatcttcactgcctccagacctcatctcagcacattctcacactcccgaccccctctgcagccgccactgccccactgatgcctgagccaggggcaggggcagacctgcccggcctggcctccagcctggtggaccatcacctgtgcaaactccgaacacctcctccaggtgctctggctggctttccctggtgt

SEQ ID NO: 4755 - DNA, 162 bp, Homo sapiens
  source 1..162: mol_type = unassigned DNA; mol_type = unassigned DNA
gacgaatgcacagaggcgctggcagaaccacgggggcaggacccctctctgagtcacagaatggagctaagttggtgaggtcacccaggtaacatcccaagcacagggtgccacacctgtgcagccacagcagcctcctgacctccccagagccgtgtctag

SEQ ID NO: 4756 - DNA, 319 bp, Homo sapiens
  source 1..319: mol_type = unassigned DNA; mol_type = unassigned DNA
gtgatcctgcatctttttgtctcgcggagccccgggtctcggttatccacccctacctcccagtgtctaagccacgaataatgggtgaccctagacaagcttcttgacctgtgtgagcccgaggttccccaaggcaaaccaagatggctcagggccccattatcagaggaggacacaccctagatgagccatcccccaggatgacgccacctctgagatcttggtctcctggctccgtctctgaccacaacccaagaatggggtgagggcacagggtgtggactcaactacaggagggcttcctgttcatgcaacgtcc

SEQ ID NO: 4757 - DNA, 479 bp, Homo sapiens
  source 1..479: mol_type = unassigned DNA; mol_type = unassigned DNA
gcggactcagaagcgagcggcaccccgggaccatcccacagcagatccagtggccgccaacgtcaggctggagttgcctccttcgtggatgttggatgtggaagcccaggagccccccaaggggaaatggtcgacgccgcccttcgacccgcgcttccccagccagaaccagatccgtaactgctaccagaacttcctggactaccaccgctgcctcaagaccaggacccgccgcgggaagagcacgcagccctgcgagtactatttccgcgtgtaccactcgctgtgccccatcagctgggtggagagctggaacgagcagatcaagaacgggattttcgccggcaaaatctgactgccccagcgcggcttcctctgaagatgcagtgatcctgcatctttttgtctcgcggagccccgggtctcggttatccacccctacctcccagtgtctaagccacgaataatggtatgctgtt

SEQ ID NO: 4758 - DNA, 494 bp, Homo sapiens
  source 1..494: mol_type = unassigned DNA; mol_type = unassigned DNA
agaagcgagcggcaccccgggaccatcccacagcagatccagtggccgccaacgtcaggctggagttgcctccttcgtggatgttggatgtggaagcccaggagccccccaaggggaaatggtcgacgccgcccttcgacccgcgcttccccagccagaaccagatccgtaactgctaccagaacttcctgggtgagacctgctcagccaggttatgggaggagcagggtgtgacaagggacggcagggaggggcactcccaccctaagtcccgcggagaccgttagggtgggaggccgggcggggccgggttggtgggggcggggcctggtcgagaaaaggcggggctgagcctggaggggcggggcgaggttggtaggggcgaggcctgatctggaaggtgcggggccgagtcgtgaaggtgcggggcgaggtaggtaggggcagggtctgggtaggaggagcagtgtgagggaggtaggggtcggggcctg

SEQ ID NO: 4759 - DNA, 548 bp, Homo sapiens
  source 1..548: mol_type = unassigned DNA; mol_type = unassigned DNA
atcccacagcagatccagtggccgccaacgtcaggctggtgagggcacgacgggtggggttcaggggcgggggtcaggatggggagacgggtcggagcgagggcgccccctcggccccacggagtccccgtcccgtcccgtctcgcaggagttgcctccttcgtggatgttggatgtggaagcccaggagccccccaaggggaaatggtcgacgccgcccttcgacccgcgcttccccagccagaaccagatccgtaactgctaccagaacttcctgggtgagacctgctcagccaggttatgggaggagcagggtgtgacaagggacggcagggaggggcactcccaccctaagtcccgcggagaccgttagggtgggaggccgggcggggccgggttggtgggggcggggcctggtcgagaaaaggcggggctgagcctggaggggcggggcgaggttggtaggggcgaggcctgatctggaaggtgcggggccgagtcgtgaaggtgcggggcgaggtaggtaggggcagggtctgggtaggagg

SEQ ID NO: 4760 - DNA, 564 bp, Homo sapiens
  source 1..564: mol_type = unassigned DNA; mol_type = unassigned DNA
atatgataaatagtacctggagcgcctacttcacaagaaagcctgagagagtccagttgtactcaaggagagggagaagtagccaggagacagatccggtaggactgtgaaagccatggtgagcctgaatttaaatacattgggaatatgcatgggaatgaggctgttggacgagaactgctcattttcttggcccagtacctatgcaacgaataccagaaggggaacgagacaattgtcaacctgatccacagtacccgcattcacatcatgccttccctgaacccagatggctttgagaaggcagcgtctcagcctggtgaactcaaggactggtttgtgggtcgaagcaatgcccagggaatagatctgaaccggaactttccagacctggataggatagtgtacgtgaatgagaaagaaggtggtccaaataatcatctgttgaaaaatatgaagaaaattgtggatcaaaacacaaagcttgctcctgagaccaaggctgtcattcattggattatggatattccttttgtgctttctgccaatctccatggaggagac

SEQ ID NO: 4761 - DNA, 2421 bp, Homo sapiens
  source 1..2421: mol_type = unassigned DNA; mol_type = unassigned DNA
gcccgtctctccgccggccccctcctcgcagtggtttctcctgcagctcccctgggctccgcggccagtagtgcagcccgtggagccgcggctttgcccgtctcctctgggtggccccagtgcgcgggctgacactcattcagccggggaaggtgaggcgagtagaggctggtgcggaacttgccgcccccagcagcgccggcgggctaagcccagggccgggcagacaaaagaggccgcccgcgtaggaaggcacggccggcggcggcggagcgcagcgatggccgggcgagggggcagcgcgctgctggctctgtgcggggcactggctgcctgcgggtggctcctgggcgccgaagcccaggagcccggggcgcccgcggcgggcatgaggcggcgccggcggctgcagcaagaggacggcatctccttcgagtaccaccgctaccccgagctgcgcgaggcgctcgtgtccgtgtggctgcagtgcaccgccatcagcaggatttacacggtggggcgcagcttcgagggccgggagctcctggtcatcgagctgtccgacaaccctggcgtccatgagcctggtgagcctgaatttaaatacattgggaatatgcatgggaatgaggctgttggacgagaactgctcattttcttggcccagtacctatgcaacgaataccagaaggggaacgagacaattgtcaacctgatccacagtacccgcattcacatcatgccttccctgaacccagatggctttgagaaggcagcgtctcagcctggtgaactcaaggactggtttgtgggtcgaagcaatgcccagggaatagatctgaaccggaactttccagacctggataggatagtgtacgtgaatgagaaagaaggtggtccaaataatcatctgttgaaaaatatgaagaaaattgtggatcaaaacacaaagcttgctcctgagaccaaggctgtcattcattggattatggatattccttttgtgctttctgccaatctccatggaggagaccttgtggccaattatccatatgatgagacgcggagtggtagtgctcacgaatacagctcctccccagatgacgccattttccaaagcttggcccgggcatactcttctttcaacccggccatgtctgaccccaatcggccaccatgtcgcaagaatgatgatgacagcagctttgtagatggaaccaccaacggtggtgcttggtacagcgtacctggagggatgcaagacttcaattaccttagcagcaactgttttgagatcaccgtggagcttagctgtgagaagttcccacctgaagagactctgaagacctactgggaggataacaaaaactccctcattagctaccttgagcagatacaccgaggagttaaaggatttgtccgagaccttcaaggtaacccaattgcgaatgccaccatctccgtggaaggaatagaccacgatgttacatccgcaaaggatggtgattactggagattgcttatacctggaaactataaacttacagcctcagctccaggctatctggcaataacaaagaaagtggcagttccttacagccctgctgctggggttgattttgaactggagtcattttctgaaaggaaagaagaggagaaggaagaattgatggaatggtggaaaatgatgtcagaaactttaaatttttaaaaaggcttctagttagctgctttaaatctatctatataatgtagtatgatgtaatgtggtcttttttttagattttgtgcagttaatacttaacattgatttattttttaatcatttaaatattaatcaactttccttaaaataaatagcctcttaggtaaaaatataagaacttgatatatttcattctcttatatagtattcattttcctacctatattacacaaaaaagtatagaaaagatttaagtaattttgccatcctaggcttaaatgcaatattcctggtattatttacaatgcagaattttttgagtaattctagctttcaaaaattagtgaagttcttttactgtaattggtgacaatgtcacataatgaatgctattgaaaaggttaacagatacagctcggagttgtgagcactctactgcaagacttaaatagttcagtataaattgtcgtttttttcttgtgctgactaactataagcatgatcttgttaatgcatttttgatgggaagaaaaggtacatgtttacaaagaggttttatgaaaagaataaaaattgacttcttgcttgtacatataggagcaatactattatattatgtagtccgttaacactacttaaaagtttagggttttctcttggttgtagagtggcccagaattgcattctgaatgaataaaggttaaaaaaaaatcccc

SEQ ID NO: 4762 - DNA, 437 bp, Homo sapiens
  source 1..437: mol_type = unassigned DNA; mol_type = unassigned DNA
tcctgggcgccgaagcccaggagcccggggcgcccgcggcgggcatgaggcggcgccggcggctgcagcaagaggacggcatctccttcgagtaccaccgctaccccgagctgcgcgaggcgctcgtgtccgtgtggctgcagtgcaccgccatcagcaggatttacacggtggggcgcagcttcgagggccgggagctcctggtcatcgagctgtccgacaaccctggcgtccatgagcctgattgcaagctgtatgaagtggggaccctgattccagcacccagctcatgtttggcacacagcgggcttgaatatacattatgaaataatctacattatggaaaaatactgaatatgcagtgtggaaaaaatgaatccatcaatagctgcataacacagtgtattaaaataaaatgttttattcttcatacattc

SEQ ID NO: 4763 - DNA, 633 bp, Homo sapiens
  source 1..633: mol_type = unassigned DNA; mol_type = unassigned DNA
ataaatagatataattaatgaaaatgttaatagtgccggtctccagaatatctctagatcactgaccttctgattggtggaaaaacctttggagaatgatctttacaggattccatggcagtgagttaatctatttttctctacatgggggcagcagacgaggtgagcctgaatttaaatacattgggaatatgcatgggaatgaggctgttggacgagaactgctcattttcttggcccagtacctatgcaacgaataccagaaggggaacgagacaattgtcaacctgatccacagtacccgcattcacatcatgccttccctgaacccagatggctttgagaaggcagcgtctcagcctggtgaactcaaggactggtttgtgggtcgaagcaatgcccagggaatagatctgaaccggaactttccagacctggataggatagtgtacgtgaatgagaaagaaggtggtccaaataatcatctgttgaaaaatatgaagaaaattgtggatcaaaacacaaagcttgctcctgagaccaaggctgtcattcattggattatggatattccttttgtgctttctgccaatctccatggaggagaccttgtggccaattatccatatgatg

SEQ ID NO: 4764 - DNA, 563 bp, Homo sapiens
  source 1..563: mol_type = unassigned DNA; mol_type = unassigned DNA
gagacacaagagtgggaagagtgcagattggagcagctatccaaaaatacagaaggccagaaggtgagcctgaatttaaatacattgggaatatgcatgggaatgaggctgttggacgagaactgctcattttcttggcccagtacctatgcaacgaataccagaaggggaacgagacaattgtcaacctgatccacagtacccgcattcacatcatgccttccctgaacccagatggctttgagaaggcagcgtctcagcctggtgaactcaaggactggtttgtgggtcgaagcaatgcccagggaatagatctgaaccggaactttccagacctggataggatagtgtacgtgaatgagaaagaaggtggtccaaataatcatctgttgaaaaatatgaagaaaattgtggatcaaaacacaaagcttgctcctgagaccaaggctgtcattcattggattatggatattccttttgtgctttctgccaatctccatggaggagaccttgtggccaattatccatatgatgagacgcggagtggtagtgctcacgaatac

SEQ ID NO: 4765 - DNA, 5023 bp, Homo sapiens
  source 1..5023: mol_type = unassigned DNA; mol_type = unassigned DNA
ggggttggcaacagagcaggtaggtagacctgcatttggttgctggtcacagaaatggagagtgagagatatttctaagtcaggatgccctagtggcagacccccaagtcctcgaacttcagggcagaactgcctgggtgggaactctcccatgtctccttgatttcactgccacctctgctggcgtcctctctcatctccgccgccagcccccgcctcctttctcgggaagcttgggtctccctgggagcgggtctgcccttagggggaggcctctgggctctgtgccctgcagctcggcaggcattcgaggcggacagaaacggggcttggcgccccccgcgtgcacgtgtgctagcccaggcaggagggagcgcctcggcggaggagtcaaggaagagggggagggagaaacgcgccagaacctcggcccgggcgccctcgtcggccgcggaggagctgcagcctccaacaggaaggtgtggtccctgccatgctatctgctctgctcagcgactgaaggtgcccgcatcccagctctgccaggaagcaaaggttgtcacatcttcccaagccaggccagccaggagcgctgcatgcaaattctgccgtgggctaaggcacgctaaccagagccggcggcatggacttcgtcatgaagcaggcccttggaggggccacaaaggacatggggaagatgctggggggagaggaggagaaggaccccgacgcgcagaaaaaggaggaggagcggcaggaggcgctgcggcagcaggaggaggagcgtaaggccaagcacgcgcgcatggaggcggagcgggagaaggtccggcagcagatccgagataagtatgggctgaagaagaaggaggagaaggaagcagaggagaaagcagccctggagcagccctgcgaggggagcctgacccggcccaagaaggccatccctgcgggctgcggggacgaggaggaggaggaagaggagagcatcctggacacggtgctcaaatacctgcccgggccgctgcaggacatgttcaagaagtaaccaggcctcctgccccagcctactccacctgttactacttctttttggttctttcttttctttttattaggttaagtctcaattctgaaggggaaaacctcagttggcctctgcccctcttccctggccaggggcttctccccctcagctctccctcacacctcccttcatcccagggtatccacctgcaccccactcccaagtagcttgaaaaagggaggacagtctttccccagcaggggtcaggggggcccctcaggaagcctaaggtcgtgctagtgtggtgacccccatacattcctccctgctccccactgccaggaggaccactgtccccagccagccaaagtaatgacacattccagccctgcccagcatgctgacctttggcctctaaccctcagtgggcccccaggtcagggcaggggcactgagtggcctggctctgaggaagggagtcaggggaagcctgtcccgggaaggcccaggctgagaggccctggctctggccaggctgggatctgggtgggaggctggggctcttcttcttccatctccttggtgacacccagcccaggggcacccccttccccagcccccacctggagagacatggcccctgccaagctggtcccttcaaatggatcctttgtggactttagctcatttgtggaggaaccccaggtagggacgccccttgttcctcacccccaccccacttaggtcctgggcccccactgccaggctgggcccagcttgctcagtcaaggggctgccaggcccccagaaaacacttggagccatcgggtagcgatggtctatgccatggggaacacctccattggtgtggccaagctgcccccattcctatccacccctctccccaccccgtcctgtccatgcgcttccagggccccacggtccccaggaggacgcttcctggccaaagccccaagcctttggtgagaagccaattcccacttgacagaaggcgtccatccattcatctcattggccaaggacaaactctcctctgggacgtctgggactggcatttgtcccccactcaaattatcaaagctttctgctcagtcagttgtgtggggatggtgagggaagaggggtcacatgagggaggaaactgtatccatgcatgcatgataatgcgtggcagagactgcaacagggattgtgtgttcagagatcatatgcatatgtgtagggctggagcgtgtgtgtgtcttgagattgtgtgtgttgcagtcatcatatctatgtgttacagattgtgtatgttagccttgtgtatgtgtgcttgattgaggtggtgtatttgggttgaaattgtgtcatatgtgtgtgctatccatctcgtgtttagaggctgtatatgttagcttgtgtaagaatgtgttttcaaaacagtgtgtgtattgggagtgatgggtatgtgttaggtatgtgatgggttgtagaagcgtgtgtttgagagaattcagagacatttgaaggctgctgtgtgcatgtttgggggtctgaaaagacagttgtgtgcatggatgtgtgcgtggggagaaagaacgtgggtaagatgtcccttcccagccctgagaccactggtcacagttggccacctccaacgggagaccttgtccttggcctagagtcctcccacccttggggggctcctgcctgaggtcctcagaatcccactgcaatggacccaggcagcgccccaggaagccatgctgggcccccgccagggcctatcccaaaagcaggggccagggagggggcgacttgcctgcccctgaagcccttgttcccattggccccagtttgcattctgcaggttttccattttagtgggttctgcttttatttcagagacagacatgtgtcttctctgtccgtttccaataggtaaagccatatcagttagactgcaatactttaaacacgagacaaaacaatccatatgtttagggaaccagaaaagtcccctggtctgtcccttctttggggagcagggcctcgacagctccagctcccttgacctaccttcctccccgcaccccgcccccaccttgtgcccctgtgtccagccccccagggggcctgtgtctgtgtctgtgcctgtgtctgtgatggggagccgcctcgcacccctgttgtctgcttgtctctttgtgtctgttatcctgggcaggatggtcattctcaaaaaccctggggtcctgggccagagacaggcagggcccagtccaggggccccaggcctccccagtcccagtgtgcgagccccacttggacacaagtgttcagagaggtccccctctgccacttgacagggaccttcaaacctcgacagtgatgcaaggacacagagagtaccagataggtagcagagaccaaggcgcagggtgcttcagatgagcaagagaacccagtcgaaccagataccccaggtgggccggagggaccccagaccttcagagggctgccctggtgttctccacagtgcagtccctctgtattcccagagtgggatcggggctttcagccccaccctgatgcctgccctccaggatggctggtttagtctgggtccatgtcccagacccctctattctgctccaggacagcaggacttcaggtcttcctgggggtggatataggagaaaatttctgcctggcacacacctggctccaaccactgccaagtgatcactcttaggcccaggggaacacaatgactatcattactgatgcagacctggctgtggagagcagctaatgtgtggcccagagagcctgtctgtgtggagcacgtagtgcacagaatacgtgagagttgctctggcaggggcagaatcctcacaggatcgcctgggaggtgaggtgtgtgtgacccactggatgggagggcaatgagtgtgcacatacaaatggggcagtgtgcatgcaacacacttaggggaggagtggccccagaattcagcacgcacacaacacacaagggagagaacccccagatgagaaaataggaaggagcaatcatttgtagatgggtgaaaaaagaatgaggttcaagggagcgtgcaccaggtgaggtgagcgtgtgtgctctcagggaagggcccaggatcccatgcctgggaggagctgccagagagaagcaaaaaggcggctgtggatcgccctgggctgggcaccagtgacaggtcaggatctccaaacatggacgtcctcccctccaaatccagaagctcccagaaggtgtccttaactgcaaagctgtgcagggtactcctccagatggaatcaggaagtcgagacaccatcccaggtgtgtgtaagagagagagagagaacagggaggatacagaagtattgcagcccagatcccctatcagggggacagctggtgggcaaagcagccaccccacagccttgtggctagagtacagtggggtagaccctccagccccaatagccctagtacccagctggcagggttgcccacccctgctgtccacctgctccatcctctagggttccacaggcccctgaccgcacagggaggctggggccagcctggtctcccaggcctgaggacatgcctcccaccaaatgtcccctgctccagtcccactcctgtcaccccacgctctgcactggggagaaaacgggaggtgctcgtgctggccctgggtgggagcggggagtcctggtgagaccccggtgagatggaccatcctgcccccgtgggggatcccctttcccacatccgtgctgtgtcattgttgctctgcttcctttcaatgtgtcagtgcctggggggaggggaggagcaccccctcagcccccctgaacctgaccaaaagccatggctgttgctcccccctttgtatgatgcaaatgctgaaatgtacaaaatcaaccatgacaacaaagaaaaagaccttgtacagc

SEQ ID NO: 4766 - DNA, 565 bp, Homo sapiens
  source 1..565: mol_type = unassigned DNA; mol_type = unassigned DNA
agaaacggggcttggcgccccccgcgtgcacgtgtgctagcccaggcaggagggagcgcctcggcggaggagtcaaggaagagggggagggagaaacgcgccagaacctcggcccgggcgccctcgtcggccgcggaggagctgcagcctccaacaggaaggtgtggtccctgccatgctatctgctctgctcagcgactgaaggtgcccgcatcccagctctgccaggaagcaaagacagactggtggctttcagacagaaaggagctggaccagaaggctggaagatggattcggggcgtactgtgcaagacctttgccagagcctgagcaatttccatctctactcagctggatgggcgtggtgaataaattcattcagttcattgttgctccacagctaacaataaagctgggagctgggtccaaatggtgacttggctgtctaccagctgcttggccatgggcaacccccaccccctctgagccttggtttccgtatctgtaaaatgtacatgatgctccctgttggttgggtcagcctccccagtgttaccaagccacg

SEQ ID NO: 4767 - DNA, 469 bp, Homo sapiens
  source 1..469: mol_type = unassigned DNA; mol_type = unassigned DNA
cgggcgccctcgtcggccgcggaggagctgcagcctccaacagaagggaaaacggacacctgtggaggggaagaaacgtgtccaagatcattcacacagagcgtcagctctggggtcagaacccagctcccaaggctttccgtgtccagaccacctccctcacctggttggccagcctccacctgatgagccgggcaggctgcaagtggcaagttccctgggaaggtgtggtccctgccatgctatctgctctgctcagcgactgaaggtgcccgcatcccagctctgccaggaagcaaagttacagatgagaaaactgaagctcagagagtgaaaggacttgcctaaagacacacagctggttgtcacatcttcccaagccaggccagccaggagcgctgcatgcaaattctgccgtgggctaaggcacgctaaccagagccggcggcatggacttcgtcatgaagca

SEQ ID NO: 4768 - DNA, 557 bp, Homo sapiens
  source 1..557: mol_type = unassigned DNA; mol_type = unassigned DNA
agctggaggcggggagagccttgatcaaagtcaggcaggggagcacagcggcttcctgacgctggacccaggtggggacagagcggccctgtgaagtcaaagagaatgttgctttgttcagctctcactgggaaaggttgtcacatcttcccaagccaggccagccaggagcgctgcatgcaaattctgccgtgggctaaggcacgctaaccagagccggcggcatggacttcgtcatgaagcaggcccttggaggggccacaaaggacatggggaagatgctggggggagaggaggagaaggaccccgacgcgcagaaaaaggaggaggagcggcaggaggcgctgcggcagcaggaggaggagcgtaaggccaagcacgcgcgcatggaggcggagcgggagaaggtccggcagcagatccgagataagtatgggctgaagaagaaggaggagaaggaagcagaggagaaagcagccctggagcagccctgcgaggggagcctgacccggcccaagaaggccatccctgcgggctgcggggacgaggaggaggag

SEQ ID NO: 4769 - DNA, 826 bp, Homo sapiens
  source 1..826: mol_type = unassigned DNA; mol_type = unassigned DNA
catctggaaggggagcggtagaacgtcagggcccggctgaggggcgtgattggagggcgccttcggcagccgcccgcggcagaagccgcggctccagctcgcctggcggaattgcacgcggcggcgggagctggaatagcagaaggaaccacctcgtggagtcgggccggagccctgcagtggctcagacggttgcagggaccgccaggttgtcacatcttcccaagccaggccagccaggagcgctgcatgcaaattctgccgtgggctaaggcacgctaaccagagccggcggcatggacttcgtcatgaagcaggcccttggaggggccacaaaggacatggggaagatgctggggggagaggaggagaaggaccccgacgcgcagaaaaaggaggaggagcggcaggaggcgctgcggcagcaggaggaggagcgtaaggccaagcacgcgcgcatggaggcggagcgggagaaggtccggcagcagatccgagataagtatgggctgaagaagaaggaggagaaggaagcagaggagaaagcagccctggagcagccctgcgaggggagcctgacccggcccaagaaggccatccctgcgggctgcggggacgaggaggaggaggaagaggagagcatcctggacacggtgctcaaatacctgcccgggccgctgcaggacatgttcaagaagtaaccaggcctcctgccccagcctactccacctgttactacttctttttggttctttcttttctttttattaggttaagtctcaattctgaaggggaaaacctcagttggcctctgcccctcttccct

SEQ ID NO: 4770 - DNA, 518 bp, Homo sapiens
  source 1..518: mol_type = unassigned DNA; mol_type = unassigned DNA
agaagccgcggctccagctcgcctggcggaattgcacgcggcggcgggagctggaatagcagaaggaaccacctcgtggagtcgggccggagccctgcagtggctcagacggttgcagggaccgccaggttgtcacatcttcccaagccaggccagccaggagcgctgcatgcaaattctgccgtgggctaaggcacgctaaccagagccggcggcatggacttcgtcatgaagcaggcccttggaggggccacaaaggacatggggaagatgctggggggagaggaggagaaggaccccgacgcgcagaaaaaggaggaggagcggcaggaggcgctgcggcagcaggaggaggagcgtaaggccaagcacgcgcgcatggaggcggagcgggagaaggtccggcagcagatccgagataaggactgaggcttgggaggcactcctggccacctcagccagtgctgcatgatcatgagactcctgctgtctccttgcccaccccgcttcatgcgcgt

SEQ ID NO: 4771 - DNA, 970 bp, Homo sapiens
  source 1..970: mol_type = unassigned DNA; mol_type = unassigned DNA
agtggctcagacggttgcagggaccgccaggtcggtgctggccgagggccgggagggcggagctgggctgtgggcaacagggtcccggctctcgcctcgaggccttggggcagctcgggaagctggggagcacggctttcggggggacagctccccaaggctgcctgggcaccggatggggactgagaggcggtaaaggggacactcccgggtgcgctctccgtggtgctgaaaggacagctccttgcgaggggccgcgagcaggcagctagctgcgaactaagaggaagcgtgggccctagccggagactccgggcagagcccgaacggccggggtcccggagccaggaccgccccggctgcggcggagactcaagtctgaacccagagaacaactttgagctcgcgggagtgggggacgtcgatctaagctacttctggctgtgcttaacccgaagcccgccggagcacgcttcgccccggaggagggagtcgcccccaggggtacagtgcgcactcccggagttgtcacatcttcccaagccaggccagccaggagcgctgcatgcaaattctgccgtgggctaaggcacgctaaccagagccggcggcatggacttcgtcatgaagcaggcccttggaggggccacaaaggacatggggaagatgctggggggagaggaggagaaggaccccgacgcgcagaaaaaggaggaggagcggcaggaggcgctgcggcagcaggaggaggagcgtaaggccaagcacgcgcgcatggaggcggagcgggagaaggtccggcagcagatccgagataagtatgggctgaagaagaaggaggagaaggaagcagaggagaaagcagccctggagcagccctgcgaggggagcctgacccggcccaagaaggccatccctgcgggctgcggggacgaggaggaggaggaagaggagagcatcctggacacgg

SEQ ID NO: 4772 - DNA, 532 bp, Homo sapiens
  source 1..532: mol_type = unassigned DNA; mol_type = unassigned DNA
agacttgaatcataaaaacagaaaaacggccataaggacaaccactgcaggttacccgagtcagcctgtcagatggcggggcccagtcccgaaaacctctaggggctcagatggtcgagcctgagtcggtgcttgggctgggacgggctcggagggagtcggagaggggaaggaagctgaaggcgcgccctgggtccccggcgcactgaaggttgtcacatcttcccaagccaggccagccaggagcgctgcatgcaaattctgccgtgggctaaggcacgctaaccagagccggcggcatggacttcgtcatgaagcaggcccttggaggggccacaaaggacatggggaagatgctggggggagaggaggagaaggaccccgacgcgcagaaaaaggaggaggagcggcaggaggcgctgcggcagcaggaggaggagcgtaaggccaagcacgcgcgcatggaggcggagcgggagaaggtccggcagcagatccgagataagtatgggctgaagaagaaggaggagaa

SEQ ID NO: 4773 - DNA, 567 bp, Homo sapiens
  source 1..567: mol_type = unassigned DNA; mol_type = unassigned DNA
aatctccgccggagccggggaaaggtggcattgccatttctctcttagagaggaggaaactggggactcgagcaggttagggccttgctgaaggtcccatggcaaataaggaaatgacggtggcgttggaaaccagatctgcctgactccaagttccaggctctttccaatgctcctggcttcaatcaaatctgaacaatagggtcaagatgaaggctttaaaatagggaccaaaccgctttcaaaaagctatttggcagcacctacgtgtctgcccagtaaatcgctctcttccatctcctttctcctccagcagggcattgggtcttgacctcagagcgatgggtgcctggtgtctgaaccagggttgtcacatcttcccaagccaggccagccaggagcgctgcatgcaaattctgccgtgggctaaggcacgctaaccagagccggcggcatggacttcgtcatgaagcaggcccttggaggggccacaaaggacatggggaagatgctggggggagaggaggagaaggaccccgacgcgcagaaaaaggaggaggagcggca

SEQ ID NO: 4774 - DNA, 576 bp, Homo sapiens
  source 1..576: mol_type = unassigned DNA; mol_type = unassigned DNA
aatctccgccggagccggggaaaggtggcattgccatttctctcttagagaggaggaaactggggactcgagcaggttgtcacatcttcccaagccaggccagccaggagcgctgcatgcaaattctgccgtgggctaaggcacgctaaccagagccggcggcatggacttcgtcatgaagcaggcccttggaggggccacaaaggacatggggaagatgctggggggagaggaggagaaggaccccgacgcgcagaaaaaggaggaggagcggcaggaggcgctgcggcagcaggaggaggagcgtaaggccaagcacgcgcgcatggaggcggagcgggagaaggtccggcagcagatccgagataagtatgggctgaagaagaaggaggagaaggaagcagaggagaaagcagccctggagcagccctgcgaggggagcctgacccggcccaagaaggccatccctgcgggctgcggggacgaggaggaggaggaagaggagagcatcctggacacggtgctcaaatacctgcccgggccgctgcaggacatgttcaagaagtaaccaggcct

SEQ ID NO: 4775 - DNA, 2082 bp, Homo sapiens
  source 1..2082: mol_type = unassigned DNA; mol_type = unassigned DNA
ggcgggcccgggcgggggcgggcggcgggcggtgccaagcgtggggcgcgggcccgcggcgggagctgtccgcgaaacctagtgctgaagtaggcgcggacgtgcccggtgcctggcgcgtggtagcaggcgcccggtgccccggccggcgaagaccatggcgttcatggtgaagaccatggtgggcggccagctgaagaacctcactgggagcctgggaggcggcgaggataagggagatggggacaagtcggcagccgaagctcagggcatgagccgggaggagtacgaggagtatcagaagcaactcgtggaagagaagatggagcgggatgcacagttcacacagaggaaggcagagcgggccacactgcggagccacttccgagacaaataccggctacccaagaacgagacagatgagagccagatccagatggcaggtggagacgtggagctgccccgggagctggccaagatgatcgaggaggacacagaggaggaggaggagaaggcctcagtccttgggcagctggccagccttcctggcttgaacctgggctcactcaaggacaaggcccaggccacactgggggatctcaagcaatcagctgagaagtgtcacgtcatgtgaccacttccccggggttacccactgggctgggcccccatgagggctaagagtgtgtcaacttccagggacccatactccatttggggctttgtttcccttgccccatcctagttccaagacctttcccatccatgccccaagcctatcttctggtttcttcctctccgctgggagtaaagtccccatcttcactctacccttcaggaccctccccaccagctcagcctgtggaggcctcccaagattgtaggaataggcccatccctctctggccatggccccaagttcctgcacacaggagcacccacagagagacacacacaggacacaaaacccctggcacgttcagagacagaagccacagatacatcccggcacagacagacacacacgaggccagctcccttgcgtgtccagcccctccagacaccaccactcagaaactctgagagagagcatgggcagacaccctcagcagacaggaggcctgagttccagtctccacctttattgttcttgaaagcccctgctctctctgagccttatttcatcatctgtaaaatgggaatgtcctgaatgacttctaaggctctttctggcttgaactgtcagagccaagcccacatccctccttgggcagggcagcagctgctgccacagcctccagcggctgccactgtgggctctgggagccggagcgatgctgtgtgagaggcagagtgccaaggatgaagctggcactgaacagtaagcggctccaggcctcctctgggcccagggcccagccaatttctgttctgttcctgtagaacgctctctggattccatagctggaatctcctctcttagctcagtgaaaaataaaaatcccaaatggtgtgcctaccttcccacttcttactggcttccaggagtcttggagttcatagccccccgagcctgccttaaaggggtgtcctccaccccccacctacagcttcacaggaggggagaaggcatccagtgctaggagtagaagtgtctccagctctgttctcttggggccctgggtgaaggtggggtctggggcttatgaaataggtctgggctttgaggaggatggagcagcctcattatgtggggaagatggggcctctggggcgtcactgagaccacaggtggggccggggctggaccgcagctgtcttgggtgcctgtgcctacacccctcctcaccctagagacggaagatgtgcaaaaagaaagaaggaagggcaactgcattccagccccacactgtgatgactttgagcctgtcctttccctccttgagcctgtcttgcttgtcccctgtaaaatgaacagtccccctctcccccaaatagtaataatacatgtttcaaagggtgaccatttataaagcatatgacaaaccatatcaataaatgtaactcattcttttaaaaaaa

SEQ ID NO: 4776 - DNA, 697 bp, Homo sapiens
  source 1..697: mol_type = unassigned DNA; mol_type = unassigned DNA
tcatgcccaatgattcctctatacagaaatttgccagaccactcagctgcaacaaagcctagtttgttcttatttttagtgagtcttttgcacatattcttcaaataaagtaaaatgtgaaactcaacccacatcaccacctggaatcagggattgctcactccaggttactgcaaccctaactcactctagtgggaccttgactggagaaactccacgatcttcctgaagaagagaaatggatgtttccaaattccacaataagcaatatgtggtgataatgaaaagaatgattcagtcttgacggtgaatggaagacacttacctaacaagtactgctcatttacactcaaattaatcttgaagtagtcttaaaatgtgtaagaagttaaaacttgagaagcaaaaaaatgcctgcaaaaagaagatcattttgtatacagagaaccggatgaatataagcaatgaagatgaacatttattgatcttctacatacaagacttcaccataaggccaggagcagtggctcacaccttgtaatcccagcactttgggaggccaagctgcgttcctttgcctgcaacaggggtcaagatgagttttgcctgacttctttgatgtcctgaactttccgtagtcctttttcttgaatttgttcattataaatatagcttggcatttgtttgatcttttcaa

SEQ ID NO: 4777 - DNA, 655 bp, Homo sapiens
  source 1..655: mol_type = unassigned DNA; mol_type = unassigned DNA
acccatttgataatggtgttcaagcaactggggcattatactcccgaagcttaacgcctgatgatgatgtttttcaatatcttgcacatacctatgcttcaagaaatcccaacatgaagaaaggagacgagtgtaaaaacaaaatgaactttcctaatggtgttacaaatggatactcttggtatccactccaaggtggaatgcaagattacaactacatctgggcccagtgttttgaaattacgttggagctgtcatgctgtaaatatcctcgtgaggagaagcttccatccttttggaataataacaaagcctcattaattgaatatataaagcaggtgcacctaggtgtaaagggtcaagtttttgatcagaatggaaatccattacccaatgtaattgtggaagtccaagacagaaaacatatctgcccctatagaaccaacaaatatggagagtattatctccttctcttgcctgggtcttatataataaatgttacagtccctggacatgatccacacatcacaaagctgcgttcctttgcctgcaacaggggtcaagatgagttttgcctgacttctttgatgtcctgaactttccgtagtcctttttcttgaatttgttcattataaatatagcttggcatttgttt

SEQ ID NO: 4778 - DNA, 6655 bp, Homo sapiens
  source 1..6655: mol_type = unassigned DNA; mol_type = unassigned DNA
ataacacccggccccgccgggcggccgcgggtgggtagaggtgcgcgcctgggacctgaacatggacttcccgtgcctctggctagggctgttgctgcctttggtagctgcgctggatttcaactaccaccgccaggaagggatggaagcgtttttgaagactgttgcccaaaactacagttctgtcactcacttacacagtattgggaaatctgtgaaaggtagaaacctgtgggttcttgttgtggggcggtttccaaaggaacacagaattgggattccagagttcaaatacgtggcaaatatgcatggagatgagactgttgggcgggagctgctgctccatctgattgactatctcgtaaccagtgatggcaaagaccctgaaatcacaaatctgatcaatagtacccggatacacatcatgccttccatgaacccagatggatttgaagccgtcaaaaagcctgactgttattacagcatcggaagggaaaattataaccagtatgacttgaatcgaaatttccccgatgcttttgaatataataatgtctcaaggcagcctgaaactgtggcagtcatgaagtggctgaaaacagagacgtttgtcctctctgcaaacctccatggtggtgccctcgtggccagttacccatttgataatggtgttcaagcaactggggcattatactcccgaagcttaacgcctgatgatgatgtttttcaatatcttgcacatacctatgcttcaagaaatcccaacatgaagaaaggagacgagtgtaaaaacaaaatgaactttcctaatggtgttacaaatggatactcttggtatccactccaaggtggaatgcaagattacaactacatctgggcccagtgttttgaaattacgttggagctgtcatgctgtaaatatcctcgtgaggagaagcttccatccttttggaataataacaaagcctcattaattgaatatataaagcaggtgcacctaggtgtaaagggtcaagtttttgatcagaatggaaatccattacccaatgtaattgtggaagtccaagacagaaaacatatctgcccctatagaaccaacaaatatggagagtattatctccttctcttgcctgggtcttatataataaatgttacagtccctggacatgatccacacatcacaaaggtgattattccggagaaatcccagaacttcagtgctcttaaaaaggatattctacttccattccaagggcaattggattctatcccagtatcaaatccttcatgcccaatgattcctctatacagaaatttgccagaccactcagctgcaacaaagcctagtttgttcttatttttagtgagtcttttgcacatattcttcaaataaagtaaaatgtgaaactcaacccacatcaccacctggaatcagggattgctcactccaggttactgcaaccctaactcactctagtgggaccttgactggagaaactccacgatcttcctgaagaagagaaatggatgtttccaaattccacaataagcaatatgtggtgataatgaaaagaatgattcagtcttgacggtgaatggaagacacttacctaacaagtactgctcatttacactcaaattaatcttgaagtagtcttaaaatgtgtaagaagttaaaacttgagaagcaaaaaaatgcctgcaaaaagaagatcattttgtatacagagaaccggatgaatataagcaatgaagatgaacatttattgatcttctacatacaagacttcaccataaggccaggagcagtggctcacaccttgtaatcccagcactttgggaggccaaggtgggcggatcaccctgaggttaggagttcaaaaccagcctgaccaacatggtgaaaccctgtctctactaaatattagcggggtgtggtggcgggcacctgtaatcgcagcctttcaggaggctgagacaggagaatcgcttgaaccctagaggcggagtttgcagtgagccgagatagtgccattgtactccagcttgggcaacagagtaagactctgtctcaaaaaaaaaaaaacaaaaacaaacaaacaaaaaaaacacctcaccatgagtgctacatgtgaatagatattaagtgccatatataattagttctcagaagaagggagaaatgatcataggactgggaattgttttgcaaacgttctaggagatgtgagagaaaatatgtaaccacatcttagtggcccaagaaaatacaggcctgaagggataagattgtgtctctatagagcttcaaagcatacaggtcaattaagaaagcccctctctctccagagccgtttccctagcttttggcacctggatgccacagtcctccattaggctgatgactccaaagatgtaactctagcctcttgcctgagcttcagactcgcgtcccactgcccacaggacacatccacctggatgtgactcacaggtacctccaacccatcatgtggagatactcatcctgttccccctagagctgctcttcctgctgcattctctctctcaattactgggaccaccaagctaggaacctgggagtcatccttgatactttctcttcctccttaatcctgtgtattcagcaagtaactaaaggttggtgttggccaggcatggtggctcatgcctgtaatcccagcattttgggaggccaaggcgggcggatcacttgaggtcaggagctcaagaccagcctggccaacatggtgaaaccccatctctactaaaaaaaaaaaaaaaattagtcgggcgtggtggtgcatgcctgtaatcccagctactggggaggctgaggcaggagaatcgcttgaacctgggaggcagaggttgcagtgagccgggattgcgccattgtactccagcctgggtgaagaagtgagactctgtcttaaaaaaaaaaattggtgctgataaatattgatgaattctgctctctgctctctatggttgtcaacactgcagagttgaggcctcatatctcacctgcactgctgcaacagcttactggtcccttgctcccagccttctcctcttcagtccatcgtccacacagcactggggaaggggagccacttgaaacaaaagtcaacaactggttgtagttcataaacacagagctgtttgtgtcccctgtatctggaatgccattatgacccactacattttttctttcctacccctcttaaaactcagttcaggtagcagctccactaggaagccttggctgaccataatcccattcaattccatttcacctcttcgcaggcagtctggggttagggaccctttctctttgctccccaaaataaactggttatctctactattggatttacaacattgtattataatcttctccatgtgtgccttctctagtagaatgtgagctctttgaggccaaggtctatttaatttgtttgaaaaattcattgttatatcctcaaagcctagcacatagtaggtactgaatgaatgaatgaacaaggggtgccaggagactgctactcccagtccttcccagaaactgcctagggctttgagtcattttatgaagctaggtcttaatgcgtaggcaacctcccagctcactatgaacgctgacagaagagtgttttcatgtctataatcaagaattccagatacattccttttactgaaccttgaattgatcctaagattggtagtaaaggtattatgttacctcctaacagcactacaaagtacctttttttatcagaaaaaaattttaccattaggactcaatttgaagtactaatgcttctcaagttctccactatgagagttaccctgtattagaccgttacctataagaattaaggggtaaagcactaaacagaaaagaaaaaaaaaatagcaactctggtgagcagatttctttcctttcttccttccttctcctcttcctaccttcctccctcctttccctctcctccccttctctccctttccctccccttcccttccttttcttctttcctccgctcccctccccttccctccccttcccatccttctttctcttttttttacttaatccccagtgtgacagtaatataggctgatttctagaagtgtggtgtattactcatggaaagtgagttgccttggttattactttcaattgaaagttctatgggatctagaaatgagacatactggcatggagagtgagaacgacaaaggaatgaagagctacaggagcatttaggccatttctatgccaagcttattctacatgcacaaaatcatacatgttaataaatataaacaaattggaggcttatttaaaccaattatgaaatctggtaatttgtgcagcagcaatagatgataaccaaaaaaaactcataataatctgaatatcttgatcatttgtatttaaagaagcagtaattatatacttgaaagtacataatatagtattgcaaaaatgactttggtatattacaaattaaaagtatataagatgaaacttgatttgctatcaagccccaagcaatttttcaactgggcattgaattctaacttttctaagatagcaatttttgaagagacacgaacaaaaatctgaattagttcatgagccttaatgtaaatctcttgctgaaatagtttttaaaatcagaatttagttatctatcagactcaaaatcatttaaagactaacaaaacacaatcatgatattctaactgtggtcaaaccaggtacccaagccacctccctgcccaacgcctttccggcttttcccctccctcttgggctggtggttatgctcctccagctctagttcagctataattccttttatagagaaaccaacctgatacacactttcatgatgggagaaaaatgtgggagtgaaatggtatttagaaagcagcagtcaggcacggtggctcatgcctgtaatcccagcactttgggaggctgaggcaggcggatcacttgaggtcaggagctcgagaccagcctggccaacacggtgaaaccccatctctactaaaaaaaaatacaaaaattagccgggcgtggtggcaggcacctgtaatcccagctacttgggaggctgaggcaggagaaatcgcctgaacccagaaggcagaggttgcagtgagccaagatcacatcactgcactgcactccagccggggtgacagagcgaacctctgtctcaaaaaaaaaaaaagaaaaaagaaagaaagaaaaaaggcagaagccctggattcaaatccgccacacattcagtttctttatctgtaaaatggagaccaccccccgccacgctgaacggtgattctgtgactggtaagagatgctacatttttggtgcttgttcaggtggaggaaagatgatagttaacactcaggtaataagtattttgaaggcagtataatataccttcttaaagagtatacctactcaaatgttggtaaatgttgacatgattgaatctaaatggcaaagagtattttagaaaaacattaagtccctgcagataaatgacagtgttgatttggatgcttaattacattcagacatgaactgttggatgtatctgaaatgttaaaagctttttctcaacatttccaaaagtctttccaagaaatcaatgttatgttttgttccagaagcaaatttgcatttgtgatctgtttctaaaaatggtacaagttagctctgtttagaaagtaaaaatatctgatgttagattggaagtatctcttcctggggaatccagaaagataagcatagcatattgtcttactgcaatagataagttgcttattgagaagtctggttgttattctatatggtaacaatacagttgatgtatattttatgatagatcctttatattttcctcatgactttagaagggggaagggggagaaaattatgatgaccagactagttaaagagcattgaaagtccacagtactgtagctaaagtagaagtttgggtttgttatagactttacattatatcaactaataagcagatactgtacagtattgctcaccattttatcatacttttgcatatgaactactccattgccttttatagatgttttatagctgatcttaccagttttcctggtaactttttttatttcttttttttttttttgagacggagtctcgccctaacacccaggttggagtgcagtgccgtgatctcggctcactgcaacctctgcctcccgggttcaagcaattctcctgtctcagcctcccgagtacctgggactaccggtgcctgtctccacgcccggctaattttttgtatttgtagtagagacggggtttcaccgtgttagccaggatggtctcgatctcctgacctcatgatctgcctgcctctgcctggacctcccaaagtgctgggattacaggcgtgagcccccgcgcccagccactttctttaatactataactaagaatttattaaaatgcacaaattgtctaagactgtaaagtttattggggagaggccatgactacctctgaatttagtaaatttaaaatatttctgattctcaataaagaactaatatccatataaa

SEQ ID NO: 4779 - DNA, 2116 bp, Homo sapiens
  source 1..2116: mol_type = unassigned DNA; mol_type = unassigned DNA
gtctagattcttcttggcctctctgagcagcatttcttccttctgcgtatgggacaggaccctttctggaatgggggtcttatgacctacaatcaaacaagaacatggacttcccgtgcctctggctagggctgttgctgcctttggtagctgcgctggatttcaactaccaccgccaggaagggatggaagcgtttttgaagactgttgcccaaaactacagttctgtcactcacttacacagtattgggaaatctgtgaaaggtagaaacctgtgggttcttgttgtggggcggtttccaaaggaacacagaattgggattccagagttcaaatacgtggcaaatatgcatggagatgagactgttgggcgggagctgctgctccatctgattgactatctcgtaaccagtgatggcaaagaccctgaaatcacaaatctgatcaatagtacccggatacacatcatgccttccatgaacccagatggatttgaagccgtcaaaaagcctgactgttattacagcatcggaagggaaaattataaccagtatgacttgaatcgaaatttccccgatgcttttgaatataataatgtctcaaggcagcctgaaactgtggcagtcatgaagtggctgaaaacagagacgtttgtcctctctgcaaacctccatggtggtgccctcgtggccagttacccatttgataatggtgttcaagcaactggggcattatactcccgaagcttaacgcctgatgatgatgtttttcaatatcttgcacatacctatgcttcaagaaatcccaacatgaagaaaggagacgagtgtaaaaacaaaatgaactttcctaatggtgttacaaatggatactcttggtatccactccaaggtggaatgcaagattacaactacatctgggcccagtgttttgaaattacgttggagctgtcatgctgtaaatatcctcgtgaggagaagcttccatccttttggaataataacaaagcctcattaattgaatatataaagcaggtgcacctaggtgtaaagggtcaagtttttgatcagaatggaaatccattacccaatgtaattgtggaagtccaagacagaaaacatatctgcccctatagaaccaacaaatatggagagtattatctccttctcttgcctgggtcttatataataaatgttacagtccctggacatgatccacacatcacaaaggtgattattccggagaaatcccagaacttcagtgctcttaaaaaggatattctacttccattccaagggcaattggattctatcccagtatcaaatccttcatgcccaatgattcctctatacagaaatttgccagaccactcagctgcaacaaagcctagtttgttcttatttttagtgagtcttttgcacatattcttcaaataaagtaaaatgtgaaactcaacccacatcaccacctggaatcagggattgctcactccaggttactgcaaccctaactcactctagtgggaccttgactggagaaactccacgatcttcctgaagaagagaaatggatgtttccaaattccacaataagcaatatgtggtgataatgaaaagaatgattcagtcttgacggtgaatggaagacacttacctaacaagtactgctcatttacactcaaattaatcttgaagtagtcttaaaatgtgtaagaagttaaaacttgagaagcaaaaaaatgcctgcaaaaagaagatcattttgtatacagagaaccggatgaatataagcaatgaagatgaacatttattgatcttctacatacaagacttcaccataaggccaggagcagtggctcacaccttgtaatcccagcactttgggaggccaaggtgggcggatcaccctgaggttaggagttcaaaaccagcctgaccaacatggtgaaaccctgtctctactaaatattagcggggtgtggtggcgggcacctgtaatcgcagcctttcaggaggctgagacaggagaatcgcttgaaccctagaggcggagtttgcagtgagccgagatagtgccattgtactccagcttgggcaacagagtaagactctgtctc

SEQ ID NO: 4780 - DNA, 563 bp, Homo sapiens
  source 1..563: mol_type = unassigned DNA; mol_type = unassigned DNA
atgacttgaatcgaaatttccccgatgcttttgaatataataatgtctcaaggcagcctgaaactgtggcagtcatgaagtggctgaaaacagagacgtttgtcctctctgcaaacctccatggtggtgccctcgtggccagttacccatttgataatggtgttcaagcaactggggcattatactcccgaagcttaacgcctgatgatgatgtttttcaatatcttgcacatacctatgcttcaagaaatcccaacatgaagaaaggagacgagtgtaaaaacaaaatgaactttcctaatggtgttacaaatggatactcttggtatccactccaaggtggaatgcaagattacaactacatctgggcccagtgttttgaaattacgttggagctgtcatgctgtaaatatcctcgtgaggagaagcttccatccttttggaataataacaaagcctcattaattgaatatataaagcaggtgcacctaggtttgtaaaattttcttattaattccctattaatacaaaatagagcatctggcaagacctctgggttgact

SEQ ID NO: 4781 - DNA, 794 bp, Homo sapiens
  source 1..794: mol_type = unassigned DNA; mol_type = unassigned DNA
gctataacacccggccccgccgggcggccgcgggtgggtagagaacatggacttcccgtgcctctggctagggctgttgctgcctttggtagctgcgctggatttcaactaccaccgccaggaagggatggaagcgtttttgaagactgttgcccaaaactacagttctgtcactcacttacacagtattgggaaatctgtgaaaggtagaaacctgtgggttcttgttgtggggcggtttccaaaggaacacagaattgggattccagagttcaaatacgtggcaaatatgcatggagatgagactgttgggcgggagctgctgctccatctgattgactatctcgtaaccagtgatggcaaagaccctgaaatcacaaatctgatcaatagtacccggatacacatcatgccttccatgaacccagatggatttgaagccgtcaaaaagcctgactgttattacagcatcggaagggaaaattataaccagtatgacttgaatcgaaatttccccgatgcttttgaatataataatgtctcaaggcagcctgaaactgtggcagtcatgaagtggctgaaaacagagacgtttgtcctctctgcaaacctccatggtggtgccctcgtggccagttacccatttgataatggtgttcaagcaactggggcattatactcccgaagcttaacgcctgatgatgatgtttttcaatatcttgcacatacctatgcttcaagaaatcccaacatgaagaaaggagacgagtgtaaaaacaaaatgaactttccta

SEQ ID NO: 4782 - DNA, 703 bp, Homo sapiens
  source 1..703: mol_type = unassigned DNA; mol_type = unassigned DNA
gctataacacccggccccgccgggcggccgcgggtgggtagaggtgcgcgcctgggacctgaacatggacttcccgtgcctctggctagggctgttgctgcctttggtagctgcgctggatttcaactaccaccgccaggaagggatggaagcgtttttgaagactgttgcccaaaactacagttctgtcactcacttacacagtattgggaaatctgtgaaagactgttgggcgggagctgctgctccatctgattgactatctcgtaaccagtgatggcaaagaccctgaaatcacaaatctgatcaatagtacccggatacacatcatgccttccatgaacccagatggatttgaagccgtcaaaaagcctgactgttattacagcatcggaagggaaaattataaccagtatgacttgaatcgaaatttccccgatgcttttgaatataataatgtctcaaggcagcctgaaactgtggcagtcatgaagtggctgaaaacagagacgtttgtcctctctgcaaacctccatggtggtgccctcgtggccagttacccatttgataatggtgttcaagcaactggggcattatactcccgaagcttaacgcctgatgatgatgtttttcaatatcttgcacatacctatgcttcaagaaatcccaacatgaagaaaggagacgagtgtaaaaacaaaat

SEQ ID NO: 4783 - DNA, 536 bp, Homo sapiens
  source 1..536: mol_type = unassigned DNA; mol_type = unassigned DNA
ataacacccggccccgccgggcggccgcggaacatggacttcccgtgcctctggctagggctgttgctgcctttggtagctgcgctggatttcaactaccaccgccaggaagggatggaagcgtttttgaagactgttgcccaaaactacagttctgtcactcacttacacagtattgggaaatctgtgaaagactgttgggcgggagctgctgctccatctgattgactatctcgtaaccagtgatggcaaagaccctgaaatcacaaatctgatcaatagtacccggatacacatcatgccttccatgaacccagatggatttgaagccgtcaaaaagcctgactgttattacagcatcggaagggaaaattataaccagtatgacttgaatcgaaatttccccgatgcttttgaatataataatgtctcaaggcagcctgaaactgtggcagtcatgaagtggctgaaaacagagacgtttgtcctctctgcaaacctccatggtggtgccctcgtggccagttacccatttg

SEQ ID NO: 4784 - DNA, 550 bp, Homo sapiens
  source 1..550: mol_type = unassigned DNA; mol_type = unassigned DNA
gggtgggtagaggtgcgcgcctgggacctgaacatggacttcccgtgcctctggctagggctgttgctgcctttggtagctgcgctggatttcaactaccaccgccaggaagggatggaagcgtttttgaagactgttgcccaaaactacagttctgtcactcacttacacagtattgggaaatctgtgaaagaaacctgtgggttcttgttgtggggcggtttccaaaggaacacagaattgggattccagagttcaaatacgtggcaaatatgcatggagatgagactgttgggcgggagctgctgctccatctgattgactatctcgtaaccagtgatggcaaagaccctgaaatcacaaatctgatcaatagtacccggatacacatcatgccttccatgaacccagatggatttgaagccgtcaaaaagcctgactgttattacagcatcggaaggtaaagaggggctggtctatctttacttgaaaacaacacaacacaaaggctcccgacaggcacctgttggccttggcaagaggagatgtg

SEQ ID NO: 4785 - DNA, 454 bp, Homo sapiens
  source 1..454: mol_type = unassigned DNA; mol_type = unassigned DNA
gggtgggtagaggtgcgcgcctgggacctggtgaggctggggaacatggacttcccgtgcctctggctagggctgttgctgcctttggtagctgcgctggatttcaactaccaccgccaggaagggatggaagcgtttttgaagactgttgcccaaaactacagttctgtcactcacttacacagtattgggaaatctgtgaaaggtagaaacctgtgggttcttgttgtggggcggtttccaaaggaacacagaattgggattccagagttcaaatacgtggcaaatatgcatggagatgagactgttgggcgggagctgctgctccatctgattgactatctcgtaaccagtgatggcaaagaccctgaaatcacaaatctgatcaatagtacccggatacacatcatgccttccatgaacccagatggatttgaagccgtcaaaaagcctg

SEQ ID NO: 4786 - DNA, 243 bp, Homo sapiens
  source 1..243: mol_type = unassigned DNA; mol_type = unassigned DNA
agaggtgcgcgcctgggacctgaacatggacttcccgtgcctctggctagggctgttgctgcctttggtagctgcgctggatttcaactaccaccgccaggaagggatggaagcgtttttgaagactgttgcccaaaactacagttctgtcactcacttacacagtattgggaaatctgtgaaagaaacctgtgggttcttgttgtggggcggtttccaaaggaacacagaattgggattcca

SEQ ID NO: 4787 - DNA, 527 bp, Homo sapiens
  source 1..527: mol_type = unassigned DNA; mol_type = unassigned DNA
gtgcaatggcgtgctctcaactcactgcaacctccacttctccggttcaagtgattctcctgcctcaacctgctgaatagctggtattacagcgacacgccaccgcgcccagctaatttttgttatttttagtagagatggggtttcaccatattggcctggctggtcttcgaactcctggcctcctgtgatccgcccacctcagcctcccaaagtattgggattacaggtgtgagccactgctcccagtcttttttttttgtttaatgaactagaatggaagggaaaagaaaagagcattgcaagatggagtgaggaaacccagcaaggcctgtctgtctagattcttcttggcctctctgagcagcatttcttccttctgcgtatgggacaggaccctttctggaatgggggtcttatgacctacaatcaaacaagtatctaacatccaattaaaagaggagtcatggctcaatcctcaagaaagaaacatgattatatggagtctttgccttatgtggacacag

SEQ ID NO: 4788 - DNA, 6636 bp, Homo sapiens
  source 1..6636: mol_type = unassigned DNA; mol_type = unassigned DNA
ccctcatgtgttctcaggttcttcttatttttattcatctctagaacatggacttcccgtgcctctggctagggctgttgctgcctttggtagctgcgctggatttcaactaccaccgccaggaagggatggaagcgtttttgaagactgttgcccaaaactacagttctgtcactcacttacacagtattgggaaatctgtgaaaggtagaaacctgtgggttcttgttgtggggcggtttccaaaggaacacagaattgggattccagagttcaaatacgtggcaaatatgcatggagatgagactgttgggcgggagctgctgctccatctgattgactatctcgtaaccagtgatggcaaagaccctgaaatcacaaatctgatcaatagtacccggatacacatcatgccttccatgaacccagatggatttgaagccgtcaaaaagcctgactgttattacagcatcggaagggaaaattataaccagtatgacttgaatcgaaatttccccgatgcttttgaatataataatgtctcaaggcagcctgaaactgtggcagtcatgaagtggctgaaaacagagacgtttgtcctctctgcaaacctccatggtggtgccctcgtggccagttacccatttgataatggtgttcaagcaactggggcattatactcccgaagcttaacgcctgatgatgatgtttttcaatatcttgcacatacctatgcttcaagaaatcccaacatgaagaaaggagacgagtgtaaaaacaaaatgaactttcctaatggtgttacaaatggatactcttggtatccactccaaggtggaatgcaagattacaactacatctgggcccagtgttttgaaattacgttggagctgtcatgctgtaaatatcctcgtgaggagaagcttccatccttttggaataataacaaagcctcattaattgaatatataaagcaggtgcacctaggtgtaaagggtcaagtttttgatcagaatggaaatccattacccaatgtaattgtggaagtccaagacagaaaacatatctgcccctatagaaccaacaaatatggagagtattatctccttctcttgcctgggtcttatataataaatgttacagtccctggacatgatccacacatcacaaaggtgattattccggagaaatcccagaacttcagtgctcttaaaaaggatattctacttccattccaagggcaattggattctatcccagtatcaaatccttcatgcccaatgattcctctatacagaaatttgccagaccactcagctgcaacaaagcctagtttgttcttatttttagtgagtcttttgcacatattcttcaaataaagtaaaatgtgaaactcaacccacatcaccacctggaatcagggattgctcactccaggttactgcaaccctaactcactctagtgggaccttgactggagaaactccacgatcttcctgaagaagagaaatggatgtttccaaattccacaataagcaatatgtggtgataatgaaaagaatgattcagtcttgacggtgaatggaagacacttacctaacaagtactgctcatttacactcaaattaatcttgaagtagtcttaaaatgtgtaagaagttaaaacttgagaagcaaaaaaatgcctgcaaaaagaagatcattttgtatacagagaaccggatgaatataagcaatgaagatgaacatttattgatcttctacatacaagacttcaccataaggccaggagcagtggctcacaccttgtaatcccagcactttgggaggccaaggtgggcggatcaccctgaggttaggagttcaaaaccagcctgaccaacatggtgaaaccctgtctctactaaatattagcggggtgtggtggcgggcacctgtaatcgcagcctttcaggaggctgagacaggagaatcgcttgaaccctagaggcggagtttgcagtgagccgagatagtgccattgtactccagcttgggcaacagagtaagactctgtctcaaaaaaaaaaaaacaaaaacaaacaaacaaaaaaaacacctcaccatgagtgctacatgtgaatagatattaagtgccatatataattagttctcagaagaagggagaaatgatcataggactgggaattgttttgcaaacgttctaggagatgtgagagaaaatatgtaaccacatcttagtggcccaagaaaatacaggcctgaagggataagattgtgtctctatagagcttcaaagcatacaggtcaattaagaaagcccctctctctccagagccgtttccctagcttttggcacctggatgccacagtcctccattaggctgatgactccaaagatgtaactctagcctcttgcctgagcttcagactcgcgtcccactgcccacaggacacatccacctggatgtgactcacaggtacctccaacccatcatgtggagatactcatcctgttccccctagagctgctcttcctgctgcattctctctctcaattactgggaccaccaagctaggaacctgggagtcatccttgatactttctcttcctccttaatcctgtgtattcagcaagtaactaaaggttggtgttggccaggcatggtggctcatgcctgtaatcccagcattttgggaggccaaggcgggcggatcacttgaggtcaggagctcaagaccagcctggccaacatggtgaaaccccatctctactaaaaaaaaaaaaaaaattagtcgggcgtggtggtgcatgcctgtaatcccagctactggggaggctgaggcaggagaatcgcttgaacctgggaggcagaggttgcagtgagccgggattgcgccattgtactccagcctgggtgaagaagtgagactctgtcttaaaaaaaaaaattggtgctgataaatattgatgaattctgctctctgctctctatggttgtcaacactgcagagttgaggcctcatatctcacctgcactgctgcaacagcttactggtcccttgctcccagccttctcctcttcagtccatcgtccacacagcactggggaaggggagccacttgaaacaaaagtcaacaactggttgtagttcataaacacagagctgtttgtgtcccctgtatctggaatgccattatgacccactacattttttctttcctacccctcttaaaactcagttcaggtagcagctccactaggaagccttggctgaccataatcccattcaattccatttcacctcttcgcaggcagtctggggttagggaccctttctctttgctccccaaaataaactggttatctctactattggatttacaacattgtattataatcttctccatgtgtgccttctctagtagaatgtgagctctttgaggccaaggtctatttaatttgtttgaaaaattcattgttatatcctcaaagcctagcacatagtaggtactgaatgaatgaatgaacaaggggtgccaggagactgctactcccagtccttcccagaaactgcctagggctttgagtcattttatgaagctaggtcttaatgcgtaggcaacctcccagctcactatgaacgctgacagaagagtgttttcatgtctataatcaagaattccagatacattccttttactgaaccttgaattgatcctaagattggtagtaaaggtattatgttacctcctaacagcactacaaagtacctttttttatcagaaaaaaattttaccattaggactcaatttgaagtactaatgcttctcaagttctccactatgagagttaccctgtattagaccgttacctataagaattaaggggtaaagcactaaacagaaaagaaaaaaaaaatagcaactctggtgagcagatttctttcctttcttccttccttctcctcttcctaccttcctccctcctttccctctcctccccttctctccctttccctccccttcccttccttttcttctttcctccgctcccctccccttccctccccttcccatccttctttctcttttttttacttaatccccagtgtgacagtaatataggctgatttctagaagtgtggtgtattactcatggaaagtgagttgccttggttattactttcaattgaaagttctatgggatctagaaatgagacatactggcatggagagtgagaacgacaaaggaatgaagagctacaggagcatttaggccatttctatgccaagcttattctacatgcacaaaatcatacatgttaataaatataaacaaattggaggcttatttaaaccaattatgaaatctggtaatttgtgcagcagcaatagatgataaccaaaaaaaactcataataatctgaatatcttgatcatttgtatttaaagaagcagtaattatatacttgaaagtacataatatagtattgcaaaaatgactttggtatattacaaattaaaagtatataagatgaaacttgatttgctatcaagccccaagcaatttttcaactgggcattgaattctaacttttctaagatagcaatttttgaagagacacgaacaaaaatctgaattagttcatgagccttaatgtaaatctcttgctgaaatagtttttaaaatcagaatttagttatctatcagactcaaaatcatttaaagactaacaaaacacaatcatgatattctaactgtggtcaaaccaggtacccaagccacctccctgcccaacgcctttccggcttttcccctccctcttgggctggtggttatgctcctccagctctagttcagctataattccttttatagagaaaccaacctgatacacactttcatgatgggagaaaaatgtgggagtgaaatggtatttagaaagcagcagtcaggcacggtggctcatgcctgtaatcccagcactttgggaggctgaggcaggcggatcacttgaggtcaggagctcgagaccagcctggccaacacggtgaaaccccatctctactaaaaaaaaatacaaaaattagccgggcgtggtggcaggcacctgtaatcccagctacttgggaggctgaggcaggagaaatcgcctgaacccagaaggcagaggttgcagtgagccaagatcacatcactgcactgcactccagccggggtgacagagcgaacctctgtctcaaaaaaaaaaaaagaaaaaagaaagaaagaaaaaaggcagaagccctggattcaaatccgccacacattcagtttctttatctgtaaaatggagaccaccccccgccacgctgaacggtgattctgtgactggtaagagatgctacatttttggtgcttgttcaggtggaggaaagatgatagttaacactcaggtaataagtattttgaaggcagtataatataccttcttaaagagtatacctactcaaatgttggtaaatgttgacatgattgaatctaaatggcaaagagtattttagaaaaacattaagtccctgcagataaatgacagtgttgatttggatgcttaattacattcagacatgaactgttggatgtatctgaaatgttaaaagctttttctcaacatttccaaaagtctttccaagaaatcaatgttatgttttgttccagaagcaaatttgcatttgtgatctgtttctaaaaatggtacaagttagctctgtttagaaagtaaaaatatctgatgttagattggaagtatctcttcctggggaatccagaaagataagcatagcatattgtcttactgcaatagataagttgcttattgagaagtctggttgttattctatatggtaacaatacagttgatgtatattttatgatagatcctttatattttcctcatgactttagaagggggaagggggagaaaattatgatgaccagactagttaaagagcattgaaagtccacagtactgtagctaaagtagaagtttgggtttgttatagactttacattatatcaactaataagcagatactgtacagtattgctcaccattttatcatacttttgcatatgaactactccattgccttttatagatgttttatagctgatcttaccagttttcctggtaactttttttatttcttttttttttttttgagacggagtctcgccctaacacccaggttggagtgcagtgccgtgatctcggctcactgcaacctctgcctcccgggttcaagcaattctcctgtctcagcctcccgagtacctgggactaccggtgcctgtctccacgcccggctaattttttgtatttgtagtagagacggggtttcaccgtgttagccaggatggtctcgatctcctgacctcatgatctgcctgcctctgcctggacctcccaaagtgctgggattacaggcgtgagcccccgcgcccagccactttctttaatactataactaagaatttattaaaatgcacaaattgtctaagactgtaaagtttattggggagaggccatgactacctctgaatttagtaaatttaaaatatttctgattctcaataaagaactaatatccat

SEQ ID NO: 4789 - DNA, 3556 bp, Homo sapiens
  source 1..3556: mol_type = unassigned DNA; mol_type = unassigned DNA
attccaggatttcacttgtcacactgatgggtgagatgcctttcatattggcataagacactgagcggatgcctcctcttatcttatcaaacagaaacccggcgagtgaatctacccagagctgaagcttcctttgcaacttgggaacaccagggccacagtgactttgtggcttggctttagataaatttgaccatggctgtagaacccagcagctcagaatccattaaaaggagagctgggaggagaatgaagaagatgagcaacatttatgagtccgctgccaacacactgggaatctttaacagcccctgcctgaccaaagttgagctgcgtgtggcgtgcaaaggcatttctgacagagatgccctttccaaaccagacccctgtgtcatcctcaagatgcagtctcatgggcagtggtttgaggttgacaggactgaggtgattcgcacctgcataaacccagtgtactcaaaactgtttactgtggacttttactttgaggaggtgcagcgcctgcggtttgaagtccatgacatcagcagcaaccacaatgggctgaaggaggccgacttccttggtggcatggagtgcacacttggccagattgtttcccagagaaagctgtccaaatccttgctgaagcatgggaacacagcagggaaatcttccatcacggtgattgctgaagaattatctggcaatgacgactatgttgagcttgcattcaatgcacggaaattggatgacaaggatttcttcagtaaatctgacccatttctggaaatttttcgtatgaatgatgatgcaactcagcagctggtgcaccgaactgaggttgtgatgaataacttaagcccagcctggaaatcattcaaagtatctgtaaattctctatgcagcggagacccagaccgccggctaaagtgcatagtatgggactgggactccaatggcaagcatgacttcattggagaattcacctcgacattcaaggagatgagaggagcaatggaagggaaacaggtgcagtgggagtgcatcaatcccaagtacaaagccaagaagaagaattacaagaactcaggcactgtgattctgaatctgtgcaagattcacaagatgcattctttcttggactacatcatgggtggctgccaaatccagtttacagtagctatagatttcactgcctcaaacggggaccccaggaacagctgttccttgcactacatccacccttaccaacccaatgagtatctgaaagctttggtagctgtgggggagatttgccaagactatgacagtgacaaaatgttccctgcctttgggtttggcgccaggatacctccagagtacacggtctctcatgactttgcaatcaactttaatgaagacaacccagaatgtgcaggaattcaaggagttgtggaagcctatcagagctgtcttcctaagctccaactctacggtcccaccaacattgcccccatcatccagaaggttgccaagtcagcgtcagaggaaactaacaccaaggaggcatcgcaatacttcatcctgctgatcctgacagatggtgttatcacagacatggccgacacccgggaggccattgtccatgcctcccacctccccatgtcagtcatcatcgtgggagtagggaacgctgacttcagtgacatgcagatgctggacggtgatgatgggattctgaggtcacccaagggagagcctgttcttcgagacatcgtccagttcgtgcccttcaggaacttcaaacacgcatctccagctgccctggcaaagagcgtgctggctgaagtcccaaaccaagttgtggactattacaatggcaaaggaattaaaccaaaatgttcatcagaaatgtatgaatcttccagaacactagcaccatgaactccccacacagttttacagagttctgaaatactattcctgctaatatttcatatttaatacttctactactcctgtactttaaaaaaccaacaacatatacacatttaaaaatagcacgttttggtgatttttaactatctgacaattttttttgcatgtgtagccctgaggcctggatctgttaagcccttgtattgttaactttttacaaagaaacacagataacaataacttactatttacattacagcatgtcgccttgaaataaaatggtatctgtatccattttttatacaggtttgttgaaattttgctaaatttcttatctttacactctaaagcattttgaaacatttactgaatgttgatagacgaaatatacttggttttatctgctataggatgagagactttttaaaatggcagatgcatggactgtattttgcatgtttaaaataaaaaaagaaaaacccacatggtttttgcagttgttatctctaattcctccctgctgagaatggtctctctactaaagaagaggtttatttacttcttctttctgaggtgagtctttttgaggtaagtctgggtcatctagcccagcacctctcatactttatactgtgtacacaaatcacctgagagtcttattaaaattcagattgtgatacataggtctgtgtgggacccaagattctgcatctttaactaggtcccaggtgatgctaatgcagtccctggactataccaagaggagtgaggatctagactttagggtgtcatgatggagaccatcaaaaacagcgtggcttctagtctgcttgagaatggcacctcttcctgacagtagcacaaaagtcctgcctgtctccagaggtgacagtagaaagtaatgagactgactccagaagctgcacacctcaaatcagtctcgctgctttatactcacacctcttccttagataagactagaaagtgctcctcctggccagtccctgccctcttaaaagtggcatcacacaccactgcatggatggtgtcaatccctagaagtgatctcaaagcgtcttcactggaaccacaacaatagaaacttacacatggcaaatggctatgcagtacagctcccgatatctggtccactaaattgacctttgagcttagtgtgggaatttcttgcctcctttctatcacttctgagaacaaattctataagcagaaatgcctggaattattgtctggggtcgaggtgttttgtttcaatataagctggccagtctggaaccaaaaggacgaatgtttaacttgtataatcttcttgcagggaaacaggcaagtgtttttgcaagcataaaaggcacaaagtggagtttatttttggtcagagagatgaagaagtaaatcacaaggcaaaatttgttgtttgtttgaagaggggagcagtattaacaagcaaataaaatgccttctatgatttccacagttacaattatagatcctaatcttgcaaatacatgtcaccaaatgcacaacattttgggaatgatggtaaaattgtatgactgaaaaaatcataaatatttaagctatattgttttattaataaattgggtacttacagaattcttct

SEQ ID NO: 4790 - DNA, 4184 bp, Homo sapiens
  source 1..4184: mol_type = unassigned DNA; mol_type = unassigned DNA
gctcctgccatacgccagacagttttgtagacacgaaggatccagagattagcaacacctttaccatttttggtgacagttaagcacccatctaagaagttttctttggtgagtgccaaaaagtgtaactcccattccccccacacccgcgccgcgatacgaccgctccaccctagagtggagatggagaccaagcacttggagatctaaatcaagtgtccccaggagctcagttgagcgacaaagctgagcagaaagcccagactgcgggcgcggcaggaccacggagagcgccgccgccaaggcctgggcggggcctgagctcgggttcccggggcaatgctcgtctccgtcagcaacccccagggggcgctcgcgcggaggtttcggaaccagtctcttgccgggttgctgggtgcatgggattcgtcagaaggtggaaatctctctgtgagaagctgccatctccccgccacccgctcgtccccttctctttctgccaccctcctttccttcctccctcgctccactccactccctccctcttttctcagtaccctcctctttactctccgagttaactgagagccgacctgacatctccaacattttcaccctcttcccccacccccatcaccgagaatggagtcagggtttccggagagaccgaactctgctctcagcacctttcccagccgctgttgctaaactgacctcggaggacgagaggggaaggaggtgcgacgccccttacatcagtacaaaactaccacaccaaccacctccacttcaaagccggattttgcatcctgggggcgggacagacctcgtcccgggctgaattctctctccactcttcgagattggcacacccagaatgaagaagatgagcaacatttatgagtccgctgccaacacactgggaatctttaacagcccctgcctgaccaaagttgagctgcgtgtggcgtgcaaaggcatttctgacagagatgccctttccaaaccagacccctgtgtcatcctcaagatgcagtctcatgggcagtggtttgaggttgacaggactgaggtgattcgcacctgcataaacccagtgtactcaaaactgtttactgtggacttttactttgaggaggtgcagcgcctgcggtttgaagtccatgacatcagcagcaaccacaatgggctgaaggaggccgacttccttggtggcatggagtgcacacttggccagattgtttcccagagaaagctgtccaaatccttgctgaagcatgggaacacagcagggaaatcttccatcacggtgattgctgaagaattatctggcaatgacgactatgttgagcttgcattcaatgcacggaaattggatgacaaggatttcttcagtaaatctgacccatttctggaaatttttcgtatgaatgatgatgcaactcagcagctggtgcaccgaactgaggttgtgatgaataacttaagcccagcctggaaatcattcaaagtatctgtaaattctctatgcagcggagacccagaccgccggctaaagtgcatagtatgggactgggactccaatggcaagcatgacttcattggagaattcacctcgacattcaaggagatgagaggagcaatggaagggaaacaggtgcagtgggagtgcatcaatcccaagtacaaagccaagaagaagaattacaagaactcaggcactgtgattctgaatctgtgcaagattcacaagatgcattctttcttggactacatcatgggtggctgccaaatccagtttacagtagctatagatttcactgcctcaaacggggaccccaggaacagctgttccttgcactacatccacccttaccaacccaatgagtatctgaaagctttggtagctgtgggggagatttgccaagactatgacagtgacaaaatgttccctgcctttgggtttggcgccaggatacctccagagtacacggtctctcatgactttgcaatcaactttaatgaagacaacccagaatgtgcaggaattcaaggagttgtggaagcctatcagagctgtcttcctaagctccaactctacggtcccaccaacattgcccccatcatccagaaggttgccaagtcagcgtcagaggaaactaacaccaaggaggcatcgcaatacttcatcctgctgatcctgacagatggtgttatcacagacatggccgacacccgggaggccattgtccatgcctcccacctccccatgtcagtcatcatcgtgggagtagggaacgctgacttcagtgacatgcagatgctggacggtgatgatgggattctgaggtcacccaagggagagcctgttcttcgagacatcgtccagttcgtgcccttcaggaacttcaaacacgcatctccagctgccctggcaaagagcgtgctggctgaagtcccaaaccaagttgtggactattacaatggcaaaggaattaaaccaaaatgttcatcagaaatgtatgaatcttccagaacactagcaccatgaactccccacacagttttacagagttctgaaatactattcctgctaatatttcatatttaatacttctactactcctgtactttaaaaaaccaacaacatatacacatttaaaaatagcacgttttggtgatttttaactatctgacaattttttttgcatgtgtagccctgaggcctggatctgttaagcccttgtattgttaactttttacaaagaaacacagataacaataacttactatttacattacagcatgtcgccttgaaataaaatggtatctgtatccattttttatacaggtttgttgaaattttgctaaatttcttatctttacactctaaagcattttgaaacatttactgaatgttgatagacgaaatatacttggttttatctgctataggatgagagactttttaaaatggcagatgcatggactgtattttgcatgtttaaaataaaaaaagaaaaacccacatggtttttgcagttgttatctctaattcctccctgctgagaatggtctctctactaaagaagaggtttatttacttcttctttctgaggtgagtctttttgaggtaagtctgggtcatctagcccagcacctctcatactttatactgtgtacacaaatcacctgagagtcttattaaaattcagattgtgatacataggtctgtgtgggacccaagattctgcatctttaactaggtcccaggtgatgctaatgcagtccctggactataccaagaggagtgaggatctagactttagggtgtcatgatggagaccatcaaaaacagcgtggcttctagtctgcttgagaatggcacctcttcctgacagtagcacaaaagtcctgcctgtctccagaggtgacagtagaaagtaatgagactgactccagaagctgcacacctcaaatcagtctcgctgctttatactcacacctcttccttagataagactagaaagtgctcctcctggccagtccctgccctcttaaaagtggcatcacacaccactgcatggatggtgtcaatccctagaagtgatctcaaagcgtcttcactggaaccacaacaatagaaacttacacatggcaaatggctatgcagtacagctcccgatatctggtccactaaattgacctttgagcttagtgtgggaatttcttgcctcctttctatcacttctgagaacaaattctataagcagaaatgcctggaattattgtctggggtcgaggtgttttgtttcaatataagctggccagtctggaaccaaaaggacgaatgtttaacttgtataatcttcttgcagggaaacaggcaagtgtttttgcaagcataaaaggcacaaagtggagtttatttttggtcagagagatgaagaagtaaatcacaaggcaaaatttgttgtttgtttgaagaggggagcagtattaacaagcaaataaaatgccttctatgatttccacagttacaattatagatcctaatcttgcaaatacatgtcaccaaatgcacaacattttgggaatgatggtaaaattgtatgactgaaaaaatcataaatatttaagctatattgttttattaataaattgggtacttacagaattcttct

SEQ ID NO: 4791 - DNA, 561 bp, Homo sapiens
  source 1..561: mol_type = unassigned DNA; mol_type = unassigned DNA
agaagggtacaaatcttttttctttctccaaggagaatcttttgagcacaatgaatgaagaagatgagcaacatttatgagtccgctgccaacacactgggaatctttaacagcccctgcctgaccaaagttgagctgcgtgtggcgtgcaaaggcatttctgacagagatgccctttccaaaccagacccctgtgtcatcctcaagatgcagtctcatgggcagtggtttgaggttgacaggactgaggtgattcgcacctgcataaacccagtgtactcaaaactgtttactgtggacttttactttgaggaggtgcagcgcctgcggtttgaagtccatgacatcagcagcaaccacaatgggctgaaggaggccgacttccttggtggcatggagtgcacacttggccagattgtttcccagagaaagctgtccaaatccttgctgaagcatgggaacacagcagggaaatcttccatcacggtgattgctgaagaattatctggcaatgacgactatgttgagcttgcattcaatgcacggaaattggatgacaag

SEQ ID NO: 4792 - DNA, 2503 bp, Homo sapiens
  source 1..2503: mol_type = unassigned DNA; mol_type = unassigned DNA
gagtctagtcctcaactctaaccaaagtaaaggaaactggaaagacacacgctttttcagtcattaatagaaagttgtccagaaacccggcgagtgaatctacccagagctgaagcttcctttgcaacttgggaacaccagggccacagtgactttgtggcttggctttagataaatttgaccatggctgtagaacccagcagctcagaatccattaaaaggagagctgggaggaggctcctgccatacgccagacagttttgtagacacgaaggatccagagattagcaacacctttaccatttttggtgacagttaagcacccatctaagaagttttctttgggagtcagggtttccggagagaccgaactctgctctcagcacctttcccagccgctgttgctaaactgacctcggaggacgagaggggaaggaggtgcgacgccccttacatcagtacaaaactaccacaccaaccacctccacttcaaagccggattttgcatcctgggggcgggacagacctcgtcccgggctgaattctctctccactcttcgagattggcacacccagaatgaagaagatgagcaacatttatgagtccgctgccaacacactgggaatctttaacagcccctgcctgaccaaagttgagctgcgtgtggcgtgcaaaggcatttctgacagagatgccctttccaaaccagacccctgtgtcatcctcaagatgcagtctcatgggcagtggtttgaggttgacaggactgaggtgattcgcacctgcataaacccagtgtactcaaaactgtttactgtggacttttactttgaggaggtgcagcgcctgcggtttgaagtccatgacatcagcagcaaccacaatgggctgaaggaggccgacttccttggtggcatggagtgcacacttggccagattgtttcccagagaaagctgtccaaatccttgctgaagcatgggaacacagcagggaaatcttccatcacggtgattgctgaagaattatctggcaatgacgactatgttgagcttgcattcaatgcacggaaattggatgacaaggatttcttcagtaaatctgacccatttctggaaatttttcgtatgaatgatgatgcaactcagcagctggtgcaccgaactgaggttgtgatgaataacttaagcccagcctggaaatcattcaaagtatctgtaaattctctatgcagcggagacccagaccgccggctaaagtgcatagtatgggactgggactccaatggcaagcatgacttcattggagaattcacctcgacattcaaggagatgagaggagcaatggaagggaaacaggtgcagtgggagtgcatcaatcccaagtacaaagccaagaagaagaattacaagaactcaggcactgtgattctgaatctgtgcaagattcacaagatgcattctttcttggactacatcatgggtggctgccaaatccagtttacagtagctatagatttcactgcctcaaacggggaccccaggaacagctgttccttgcactacatccacccttaccaacccaatgagtatctgaaagctttggtagctgtgggggagatttgccaagactatgacagtgacaaaatgttccctgcctttgggtttggcgccaggatacctccagagtacacggtctctcatgactttgcaatcaactttaatgaagacaacccagaatgtgcaggaattcaaggagttgtggaagcctatcagagctgtcttcctaagctccaactctacggtcccaccaacattgcccccatcatccagaaggttgccaagtcagcgtcagaggaaactaacaccaaggaggcatcgcaatacttcatcctgctgatcctgacagatggtgttatcacagacatggccgacacccgggaggccattgtccatgcctcccacctccccatgtcagtcatcatcgtgggagtagggaacgctgacttcagtgacatgcagatgctggacggtgatgatgggattctgaggtcacccaagggagagcctgttcttcgagacatcgtccagttcgtgcccttcaggaacttcaaacacgcatctccagctgccctggcaaagagcgtgctggctgaagtcccaaaccaagttgtggactattacaatggcaaaggaattaaaccaaaatgttcatcagaaatgtatgaatcttccagaacactagcaccatgaactccccacacagttttacagagttctgaaatactattcctgctaatatttcatatttaatacttctactactcctgtactttaaaaaaccaacaacatatacacatttaaaaatagcacgttttggtgatttttaactatctgacaattttttttgcatgtgtagccctgaggcctggatctgttaagcccttgtattgttaactttttacaaagaaacacagataacaataacttactatttacattaca

SEQ ID NO: 4793 - DNA, 2230 bp, Homo sapiens
  source 1..2230: mol_type = unassigned DNA; mol_type = unassigned DNA
gagtctagtcctcaactctaaccaaagtaaaggaaactggaaagacacacgctttttcagtcattaatagaaagttgtccagaaacccggcgagtgaatctacccagagctgaagcttcctttgcaacttgggaacaccagggccacagtgactttgtggcttggctttagataaatttgaccatggctgtagaacccagcagctcagaatccattaaaaggagagctgggaggagaatgaagaagatgagcaacatttatgagtccgctgccaacacactgggaatctttaacagcccctgcctgaccaaagttgagctgcgtgtggcgtgcaaaggcatttctgacagagatgccctttccaaaccagacccctgtgtcatcctcaagatgcagtctcatgggcagtggtttgaggttgacaggactgaggtgattcgcacctgcataaacccagtgtactcaaaactgtttactgtggacttttactttgaggaggtgcagcgcctgcggtttgaagtccatgacatcagcagcaaccacaatgggctgaaggaggccgacttccttggtggcatggagtgcacacttggccagattgtttcccagagaaagctgtccaaatccttgctgaagcatgggaacacagcagggaaatcttccatcacggtgattgctgaagaattatctggcaatgacgactatgttgagcttgcattcaatgcacggaaattggatgacaaggatttcttcagtaaatctgacccatttctggaaatttttcgtatgaatgatgatgcaactcagcagctggtgcaccgaactgaggttgtgatgaataacttaagcccagcctggaaatcattcaaagtatctgtaaattctctatgcagcggagacccagaccgccggctaaagtgcatagtatgggactgggactccaatggcaagcatgacttcattggagaattcacctcgacattcaaggagatgagaggagcaatggaagggaaacaggtgcagtgggagtgcatcaatcccaagtacaaagccaagaagaagaattacaagaactcaggcactgtgattctgaatctgtgcaagattcacaagatgcattctttcttggactacatcatgggtggctgccaaatccagtttacagtagctatagatttcactgcctcaaacggggaccccaggaacagctgttccttgcactacatccacccttaccaacccaatgagtatctgaaagctttggtagctgtgggggagatttgccaagactatgacagtgacaaaatgttccctgcctttgggtttggcgccaggatacctccagagtacacggtctctcatgactttgcaatcaactttaatgaagacaacccagaatgtgcaggaattcaaggagttgtggaagcctatcagagctgtcttcctaagctccaactctacggtcccaccaacattgcccccatcatccagaaggttgccaagtcagcgtcagaggaaactaacaccaaggaggcatcgcaatacttcatcctgctgatcctgacagatggtgttatcacagacatggccgacacccgggaggccattgtccatgcctcccacctccccatgtcagtcatcatcgtgggagtagggaacgctgacttcagtgacatgcagatgctggacggtgatgatgggattctgaggtcacccaagggagagcctgttcttcgagacatcgtccagttcgtgcccttcaggaacttcaaacacgcatctccagctgccctggcaaagagcgtgctggctgaagtcccaaaccaagttgtggactattacaatggcaaaggaattaaaccaaaatgttcatcagaaatgtatgaatcttccagaacactagcaccatgaactccccacacagttttacagagttctgaaatactattcctgctaatatttcatatttaatacttctactactcctgtactttaaaaaaccaacaacatatacacatttaaaaatagcacgttttggtgatttttaactatctgacaattttttttgcatgtgtagccctgaggcctggatctgttaagcccttgtattgttaactttttacaaagaaacacagataacaataacttactatttacattacagcatgtcgccttgaaataaaatggtatctgtatccattttttatacaggtttgttgaaattttgcta

SEQ ID NO: 4794 - DNA, 700 bp, Homo sapiens
  source 1..700: mol_type = unassigned DNA; mol_type = unassigned DNA
agaacagaagtgtatttggctcatggttttggagtctgggaagtccaagagcatagcaccagcacctacaagggtcatctcatggcagaagtatggaaggcacaagcaaacatgcatctccagctgccctggcaaagagcgtgctggctgaagtcccaaaccaagttgtggactattacaatggcaaaggaattaaaccaaaatgttcatcagaaatgtatgaatcttccagaacactagcaccatgaactccccacacagttttacagagttctgaaatactattcctgctaatatttcatatttaatacttctactactcctgtactttaaaaaaccaacaacatatacacatttaaaaatagcacgttttggtgatttttaactatctgacaattttttttgcatgtgtagccctgaggcctggatctgttaagcccttgtattgttaactttttacaaagaaacacagataacaataacttactatttacattacagcatgtcgccttgaaataaaatggtatctgtatccattttttatacaggtttgttgaaattttgctaaatttcttatctttacactctaaagcattttgaaacatttactgaatgttgatagacgaaatatacttggttttatctgctataggatgagagactttttaaaatggcagatgcatggactgtattttgcatg

SEQ ID NO: 4795 - DNA, 2312 bp, Homo sapiens
  source 1..2312: mol_type = unassigned DNA; mol_type = unassigned DNA
gggtctcacagaatgaggctttgaagcctgtcctcctaactcttggcctgctgctctttctttgtaactgtcagtgaggtagttattataattaagctataattgccatgcctacctttaagctccattcatcagaaccctaagcctttaggactatcagcacattcaaaaaatgtctgtcatcactgttgctttggtcaatgtgcagtgaggccacctgggtgtctaactggtattgtattgtccttgtctccctcacctcttcacccccccccatcatcatggggcatctgactgcagcaatacttcatcctgctgatcctgacagatggtgttatcacagacatggccgacacccgggaggccattgtccatgcctcccacctccccatgtcagtcatcatcgtgggagtagggaacgctgacttcagtgacatgcagatgctggacggtgatgatgggattctgaggtcacccaagggagagcctgttcttcgagacatcgtccagttcgtgcccttcaggaacttcaaacacgcatctccagctgccctggcaaagagcgtgctggctgaagtcccaaaccaagttgtggactattacaatggcaaaggaattaaaccaaaatgttcatcagaaatgtatgaatcttccagaacactagcaccatgaactccccacacagttttacagagttctgaaatactattcctgctaatatttcatatttaatacttctactactcctgtactttaaaaaaccaacaacatatacacatttaaaaatagcacgttttggtgatttttaactatctgacaattttttttgcatgtgtagccctgaggcctggatctgttaagcccttgtattgttaactttttacaaagaaacacagataacaataacttactatttacattacagcatgtcgccttgaaataaaatggtatctgtatccattttttatacaggtttgttgaaattttgctaaatttcttatctttacactctaaagcattttgaaacatttactgaatgttgatagacgaaatatacttggttttatctgctataggatgagagactttttaaaatggcagatgcatggactgtattttgcatgtttaaaataaaaaaagaaaaacccacatggtttttgcagttgttatctctaattcctccctgctgagaatggtctctctactaaagaagaggtttatttacttcttctttctgaggtgagtctttttgaggtaagtctgggtcatctagcccagcacctctcatactttatactgtgtacacaaatcacctgagagtcttattaaaattcagattgtgatacataggtctgtgtgggacccaagattctgcatctttaactaggtcccaggtgatgctaatgcagtccctggactataccaagaggagtgaggatctagactttagggtgtcatgatggagaccatcaaaaacagcgtggcttctagtctgcttgagaatggcacctcttcctgacagtagcacaaaagtcctgcctgtctccagaggtgacagtagaaagtaatgagactgactccagaagctgcacacctcaaatcagtctcgctgctttatactcacacctcttccttagataagactagaaagtgctcctcctggccagtccctgccctcttaaaagtggcatcacacaccactgcatggatggtgtcaatccctagaagtgatctcaaagcgtcttcactggaaccacaacaatagaaacttacacatggcaaatggctatgcagtacagctcccgatatctggtccactaaattgacctttgagcttagtgtgggaatttcttgcctcctttctatcacttctgagaacaaattctataagcagaaatgcctggaattattgtctggggtcgaggtgttttgtttcaatataagctggccagtctggaaccaaaaggacgaatgtttaacttgtataatcttcttgcagggaaacaggcaagtgtttttgcaagcataaaaggcacaaagtggagtttatttttggtcagagagatgaagaagtaaatcacaaggcaaaatttgttgtttgtttgaagaggggagcagtattaacaagcaaataaaatgccttctatgatttccacagttacaattatagatcctaatcttgcaaatacatgtcaccaaatgcacaacattttgggaatgatggtaaaattgtatgactgaaaaaatcataaatatttaagctatattgttttattaataaattgggtacttacagaattcttctaagagtt

SEQ ID NO: 4796 - DNA, 318 bp, Homo sapiens
  source 1..318: mol_type = unassigned DNA; mol_type = unassigned DNA
tccaaagttaccagaggaaggctgaattttatgaaacccggcgagtgaatctacccagagctgaagcttcctttgcaacttgggaacaccagggccacagtgactttgtggcttggctttagataaatttgaccatggctgtagaacccagcagctcagaatccattaaaaggagagctgggaggaggctcctgccatacgccagacagttttgtagacacgaaggatccagagattagcaacacctttaccatttttggtgacagttaagcacccatctaagaagttttctttggtgagtgccaaaaagtgtaactc

SEQ ID NO: 4797 - DNA, 447 bp, Homo sapiens
  source 1..447: mol_type = unassigned DNA; mol_type = unassigned DNA
ctggaaataagaaaagctctgagggtctccaaagttaccagaggaaggctgaattttatgagtctagtcctcaactctaaccaaagtaaaggaaactggaaagacacacgctttttcagtcattaatagaaagttgtccagaaacccggcgagtgaatctacccagagctgaagcttcctttgcaacttgggaacaccagggccacagtgactttgtggcttggctttagataaatttgaccatggctgtagaacccagcagctcagaatccattaaaaggagagctgggaggaggctcctgccatacgccagacagttttgtagacacgaaggatccagagattagcaacacctttaccatttttggtgacagttaagcacccatctaagaagttttctttgggtttccggagagaccgaactctgctctcagcacctttcccagc

SEQ ID NO: 4798 - DNA, 577 bp, Homo sapiens
  source 1..577: mol_type = unassigned DNA; mol_type = unassigned DNA
atcaaacagaaacccggcgagtgaatctacccagagctgaagcttcctttgcaacttgggaacaccagggccacagtgactttgtggcttggctttagataaatttgaccatggctgtagaacccagcagctcagaatccattaaaaggagagctgggaggagcacctttcccagccgctgttgctaaactgacctcggaggacgagaggggaaggaggtgcgacgccccttacatcagtacaaaactaccacaccaaccacctccacttcaaagccggattttgcatcctgggggcgggacagacctcgtcccgggctgaattctctctccactcttcgagattggcacacccagaatgaagaagatgagcaacatttatgagtccgctgccaacacactgggaatctttaacagcccctgcctgaccaaagttgagctgcgtgtggcgtgcaaaggcatttctgacagagatgccctttccaaaccagacccctgtgtcatcctcaagatgcagtctcatgggcagtggtttgaggttgacaggactgaggtgattcgcacctgcataaacccag

SEQ ID NO: 4799 - DNA, 550 bp, Homo sapiens
  source 1..550: mol_type = unassigned DNA; mol_type = unassigned DNA
gttggagagccagtgacatcccaggcttttgcccaaatgtccttgagttctacaccctgagccttgaaatgcagcttttctggggctgacttcccaggatcggtggtgctgtactttcaggagatggtgtttgctggccagtgaagcacaaaatcagagtgaatgtggttcacatacagctttatgtaggtgcatcaacgagcctggaactaggtgccgggtgccctctaagacaccaagagctattttggaaatagaaagggaacaagtatataaaaatggaagatccagaaatacaaggaatgaagaagatgagcaacatttatgagtccgctgccaacacactgggaatctttaacagcccctgcctgaccaaagttgagctgcgtgtggcgtgcaaaggcatttctgacagagatgccctttccaaaccagacccctgtgtcatcctcaagatgcagtctcatgggcagtggtttgaggttgacaggactgaggtgattcgcacctgcataaacccagtgtactcaaaactgtttactgtggactt

SEQ ID NO: 4800 - DNA, 2120 bp, Homo sapiens
  source 1..2120: mol_type = unassigned DNA; mol_type = unassigned DNA
aatgctcaccctgactcattcagggaaggatccaaggtttttgatgcagggcactgactctctgcctgtttttccccttcatcatctgctccccttaaaaaatggtatcaactgcattgaaacccggcgagtgaatctacccagagctgaagcttcctttgcaacttgggaacaccagggccacagtgactttgtggcttggctttagataaatttgaccatggctgtagaacccagcagctcagaatccattaaaaggagagctgggaggagaatgaagaagatgagcaacatttatgagtccgctgccaacacactgggaatctttaacagcccctgcctgaccaaagttgagctgcgtgtggcgtgcaaaggcatttctgacagagatgccctttccaaaccagacccctgtgtcatcctcaagatgcagtctcatgggcagtggtttgaggttgacaggactgaggtgattcgcacctgcataaacccagtgtactcaaaactgtttactgtggacttttactttgaggaggtgcagcgcctgcggtttgaagtccatgacatcagcagcaaccacaatgggctgaaggaggccgacttccttggtggcatggagtgcacacttggccagattgtttcccagagaaagctgtccaaatccttgctgaagcatgggaacacagcagggaaatcttccatcacggtgattgctgaagaattatctggcaatgacgactatgttgagcttgcattcaatgcacggaaattggatgacaaggatttcttcagtaaatctgacccatttctggaaatttttcgtatgaatgatgatgcaactcagcagctggtgcaccgaactgaggttgtgatgaataacttaagcccagcctggaaatcattcaaagtatctgtaaattctctatgcagcggagacccagaccgccggctaaagtgcatagtatgggactgggactccaatggcaagcatgacttcattggagaattcacctcgacattcaaggagatgagaggagcaatggaagggaaacaggtgcagtgggagtgcatcaatcccaagtacaaagccaagaagaagaattacaagaactcaggcactgtgattctgaatctgtgcaagattcacaagatgcattctttcttggactacatcatgggtggctgccaaatccagtttacagtagctatagatttcactgcctcaaacggggaccccaggaacagctgttccttgcactacatccacccttaccaacccaatgagtatctgaaagctttggtagctgtgggggagatttgccaagactatgacagtgacaaaatgttccctgcctttgggtttggcgccaggatacctccagagtacacggtctctcatgactttgcaatcaactttaatgaagacaacccagaatgtgcaggaattcaaggagttgtggaagcctatcagagctgtcttcctaagctccaactctacggtcccaccaacattgcccccatcatccagaaggttgccaagtcagcgtcagaggaaactaacaccaaggaggcatcgcaatacttcatcctgctgatcctgacagatggtgttatcacagacatggccgacacccgggaggccattgtccatgcctcccacctccccatgtcagtcatcatcgtgggagtagggaacgctgacttcagtgacatgcagatgctggacggtgatgatgggattctgaggtcacccaagggagagcctgttcttcgagacatcgtccagttcgtgcccttcaggaacttcaaacacgcatctccagctgccctggcaaagagcgtgctggctgaagtcccaaaccaagttgtggactattacaatggcaaaggaattaaaccaaaatgttcatcagaaatgtatgaatcttccagaacactagcaccatgaactccccacacagttttacagagttctgaaatactattcctgctaatatttcatatttaatacttctactactcctgtactttaaaaaaccaacaacatatacacatttaaaaatagcacgttttggtgatttttaactatctgacaattttttttgcatgtgtagccctga

SEQ ID NO: 4801 - DNA, 1958 bp, Homo sapiens
  source 1..1958: mol_type = unassigned DNA; mol_type = unassigned DNA
ttgcaggttgacaggactgaggtgattcgcacctgcataaacccagtgtactcaaaactgtttactgtggacttttactttgaggaggtgcagcgcctgcggtttgaagtccatgacatcagcagcaaccacaatgggctgaaggaggccgacttccttggtggcatggagtgcacacttggccagattgtttcccagagaaagctgtccaaatccttgctgaagcatgggaacacagcagggaaatcttccatcacggtgattgctgaagaattatctggcaatgacgactatgttgagcttgcattcaatgcacggaaattggatgacaaggatttcttcagtaaatctgacccatttctggaaatttttcgtatgaatgatgatgcaactcagcagctggtgcaccgaactgaggttgtgatgaataacttaagcccagcctggaaatcattcaaagtatctgtaaattctctatgcagcggagacccagaccgccggctaaagtgcatagtatgggactgggactccaatggcaagcatgacttcattggagaattcacctcgacattcaaggagatgagaggagcaatggaagggaaacaggtgcagtgggagtgcatcaatcccaagtacaaagccaagaagaagaattacaagaactcaggcactgtgattctgaatctgtgcaagattcacaagatgcattctttcttggactacatcatgggtggctgccaaatccagtttacagtagctatagatttcactgcctcaaacggggaccccaggaacagctgttccttgcactacatccacccttaccaacccaatgagtatctgaaagctttggtagctgtgggggagatttgccaagactatgacagtgacaaaatgttccctgcctttgggtttggcgccaggatacctccagagtacacggtctctcatgactttgcaatcaactttaatgaagacaacccagaatgtgcaggaattcaaggagttgtggaagcctatcagagctgtcttcctaagctccaactctacggtcccaccaacattgcccccatcatccagaaggttgccaagtcagcgtcagaggaaactaacaccaaggaggcatcgcaatacttcatcctgctgatcctgacagatggtgttatcacagacatggccgacacccgggaggccattgtccatgcctcccacctccccatgtcagtcatcatcgtgggagtagggaacgctgacttcagtgacatgcagatgctggacggtgatgatgggattctgaggtcacccaagggagagcctgttcttcgagacatcgtccagttcgtgcccttcaggaacttcaaacacgcatctccagctgccctggcaaagagcgtgctggctgaagtcccaaaccaagttgtggactattacaatggcaaaggaattaaaccaaaatgttcatcagaaatgtatgaatcttccagaacactagcaccatgaactccccacacagttttacagagttctgaaatactattcctgctaatatttcatatttaatacttctactactcctgtactttaaaaaaccaacaacatatacacatttaaaaatagcacgttttggtgatttttaactatctgacaattttttttgcatgtgtagccctgaggcctggatctgttaagcccttgtattgttaactttttacaaagaaacacagataacaataacttactatttacattacagcatgtcgccttgaaataaaatggtatctgtatccattttttatacaggtttgttgaaattttgctaaatttcttatctttacactctaaagcattttgaaacatttactgaatgttgatagacgaaatatacttggttttatctgctataggatgagagactttttaaaatggcagatgcatggactgtattttgcatgtttaaa

SEQ ID NO: 4802 - DNA, 5431 bp, Homo sapiens
  source 1..5431: mol_type = unassigned DNA; mol_type = unassigned DNA
acaccagcggctggacattgagaggatcacagcagtggaaaaagacacaagcacctagccgttgagaggaacgcactggcctaagaacatactgacagacgccggtaggccagcagggcggcaggccatcaacccgcggaaggacacggactttggccagggcggtataaggagcctaaaggacgtcatacccatgggccagacctaacattcctttctgctgatcccaagtttttagacaaagtttcccttccttaaccaattgcgaatcagaaaatcctcgaatccaccaatgacctataccagtaaagatgtcatctggccaatttgtgtgaaaaaagagaataattctcatccaaaccgcctgtctctggaaataagaaaagctctgagggtctccaaagttaccagaggaaggctgaattttatggtgattgataatatttccaagcttatggagaaaaaaatatcattagtcttttccatggtagaaaagagtaaagcctgtaacaaaaaaagtgatacagtggatgggatgatgagacccttgaaataagcaaggatggaccagaaactggtaacactcacccatggaatttcattatgaagtcgtggcaagggccaagccgacctggatttgaaacccatctcttcaacgatgtagattttgacaacatatttgatttctctgggcctcagtttgttatctgcacaaaagggagatatgagtggttacgttattggattgtcatgaacattaaataggataatgtcaaatcattcagccaagtttctagcatatagtacaggttcaaatattatcttttttttcccaccaacctcttttccaggaaaatgcaaagctactctttagccaaattttaaaacaggggatatttattttgggaatcattaatacccatctgccccttttttggtccattggacatattgaaatgaatgattaatacttatcacttcatggtgtacacattgttttgtttcttatatccagagtctagtcctcaactctaaccaaagtaaaggaaactggaaagacacacgctttttcagtcattaatagaaagttgtccagaaacccggcgagtgaatctacccagagctgaagcttcctttgcaacttgggaacaccagggccacagtgactttgtggcttggctttagataaatttgaccatggctgtagaacccagcagctcagaatccattaaaaggagagctgggaggaggctcctgccatacgccagacagttttgtagacacgaaggatccagagattagcaacacctttaccatttttggtgacagttaagcacccatctaagaagttttctttggtgagtgccaaaaagtgtaactcccattccccccacacccgcgccgcgatacgaccgctccaccctagagtggagatggagaccaagcacttggagatctaaatcaagtgtccccaggagctcagttgagcgacaaagctgagcagaaagcccagactgcgggcgcggcaggaccacggagagcgccgccgccaaggcctgggcggggcctgagctcgggttcccggggcaatgctcgtctccgtcagcaacccccagggggcgctcgcgcggaggtttcggaaccagtctcttgccgggttgctgggtgcatgggattcgtcagaaggtggaaatctctctgtgagaagctgccatctccccgccacccgctcgtccccttctctttctgccaccctcctttccttcctccctcgctccactccactccctccctcttttctcagtaccctcctctttactctccgagttaactgagagccgacctgacatctccaacattttcaccctcttcccccacccccatcaccgagaatggagtcagggtttccggagagaccgaactctgctctcagcacctttcccagccgctgttgctaaactgacctcggaggacgagaggggaaggaggtgcgacgccccttacatcagtacaaaactaccacaccaaccacctccacttcaaagccggattttgcatcctgggggcgggacagacctcgtcccgggctgaattctctctccactcttcgagattggcacacccagaatgaagaagatgagcaacatttatgagtccgctgccaacacactgggaatctttaacagcccctgcctgaccaaagttgagctgcgtgtggcgtgcaaaggcatttctgacagagatgccctttccaaaccagacccctgtgtcatcctcaagatgcagtctcatgggcagtggtttgaggttgacaggactgaggtgattcgcacctgcataaacccagtgtactcaaaactgtttactgtggacttttactttgaggaggtgcagcgcctgcggtttgaagtccatgacatcagcagcaaccacaatgggctgaaggaggccgacttccttggtggcatggagtgcacacttggccagattgtttcccagagaaagctgtccaaatccttgctgaagcatgggaacacagcagggaaatcttccatcacggtgattgctgaagaattatctggcaatgacgactatgttgagcttgcattcaatgcacggaaattggatgacaaggatttcttcagtaaatctgacccatttctggaaatttttcgtatgaatgatgatgcaactcagcagctggtgcaccgaactgaggttgtgatgaataacttaagcccagcctggaaatcattcaaagtatctgtaaattctctatgcagcggagacccagaccgccggctaaagtgcatagtatgggactgggactccaatggcaagcatgacttcattggagaattcacctcgacattcaaggagatgagaggagcaatggaagggaaacaggtgcagtgggagtgcatcaatcccaagtacaaagccaagaagaagaattacaagaactcaggcactgtgattctgaatctgtgcaagattcacaagatgcattctttcttggactacatcatgggtggctgccaaatccagtttacagtagctatagatttcactgcctcaaacggggaccccaggaacagctgttccttgcactacatccacccttaccaacccaatgagtatctgaaagctttggtagctgtgggggagatttgccaagactatgacagtgacaaaatgttccctgcctttgggtttggcgccaggatacctccagagtacacggtctctcatgactttgcaatcaactttaatgaagacaacccagaatgtgcaggaattcaaggagttgtggaagcctatcagagctgtcttcctaagctccaactctacggtcccaccaacattgcccccatcatccagaaggttgccaagtcagcgtcagaggaaactaacaccaaggaggcatcgcaatacttcatcctgctgatcctgacagatggtgttatcacagacatggccgacacccgggaggccattgtccatgcctcccacctccccatgtcagtcatcatcgtgggagtagggaacgctgacttcagtgacatgcagatgctggacggtgatgatgggattctgaggtcacccaagggagagcctgttcttcgagacatcgtccagttcgtgcccttcaggaacttcaaacacgcatctccagctgccctggcaaagagcgtgctggctgaagtcccaaaccaagttgtggactattacaatggcaaaggaattaaaccaaaatgttcatcagaaatgtatgaatcttccagaacactagcaccatgaactccccacacagttttacagagttctgaaatactattcctgctaatatttcatatttaatacttctactactcctgtactttaaaaaaccaacaacatatacacatttaaaaatagcacgttttggtgatttttaactatctgacaattttttttgcatgtgtagccctgaggcctggatctgttaagcccttgtattgttaactttttacaaagaaacacagataacaataacttactatttacattacagcatgtcgccttgaaataaaatggtatctgtatccattttttatacaggtttgttgaaattttgctaaatttcttatctttacactctaaagcattttgaaacatttactgaatgttgatagacgaaatatacttggttttatctgctataggatgagagactttttaaaatggcagatgcatggactgtattttgcatgtttaaaataaaaaaagaaaaacccacatggtttttgcagttgttatctctaattcctccctgctgagaatggtctctctactaaagaagaggtttatttacttcttctttctgaggtgagtctttttgaggtaagtctgggtcatctagcccagcacctctcatactttatactgtgtacacaaatcacctgagagtcttattaaaattcagattgtgatacataggtctgtgtgggacccaagattctgcatctttaactaggtcccaggtgatgctaatgcagtccctggactataccaagaggagtgaggatctagactttagggtgtcatgatggagaccatcaaaaacagcgtggcttctagtctgcttgagaatggcacctcttcctgacagtagcacaaaagtcctgcctgtctccagaggtgacagtagaaagtaatgagactgactccagaagctgcacacctcaaatcagtctcgctgctttatactcacacctcttccttagataagactagaaagtgctcctcctggccagtccctgccctcttaaaagtggcatcacacaccactgcatggatggtgtcaatccctagaagtgatctcaaagcgtcttcactggaaccacaacaatagaaacttacacatggcaaatggctatgcagtacagctcccgatatctggtccactaaattgacctttgagcttagtgtgggaatttcttgcctcctttctatcacttctgagaacaaattctataagcagaaatgcctggaattattgtctggggtcgaggtgttttgtttcaatataagctggccagtctggaaccaaaaggacgaatgtttaacttgtataatcttcttgcagggaaacaggcaagtgtttttgcaagcataaaaggcacaaagtggagtttatttttggtcagagagatgaagaagtaaatcacaaggcaaaatttgttgtttgtttgaagaggggagcagtattaacaagcaaataaaatgccttctatgatttccacagttacaattatagatcctaatcttgcaaatacatgtcaccaaatgcacaacattttgggaatgatggtaaaattgtatgactgaaaaaatcataaatatttaagctatattgttttattaataaattgggtacttacagaattct

SEQ ID NO: 4803 - DNA, 2657 bp, Homo sapiens
  source 1..2657: mol_type = unassigned DNA; mol_type = unassigned DNA
gcgcccggcaggcgttcagggaagcgcggccacgcctgggccggccaccatttcccgggcgccgcggcggcgccgactcgcgggcagcggcccctcagtgcgcccagccgggcccccgaacgccgggagcatgagcgcgggctcggagcgcggggcggcggcaacccccgggggtttgcccgcgccctgcgcctcgaaggtggagctgcggctcagctgccggcacctgctggaccgcgacccgctcaccaagtccgaccccagcgtggcgttgctgcagcaggcgcagggccagtgggtgcaggtgggcagaaccgaggtggtccggagcagcctgcatcccgtgttctccaaggtcttcacggtggactactacttcgaggaggtgcagaggctgcgctttgaggtgtacgacacgcatgggcccagcggcttcagctgtcaggaggacgatttcctggggggcatggagtgcaccctggggcagccagcccaaaagtggcttctgcaagtcgtgatgagagtgtctgttgatgtgctgggccctgctggacactgcgctaagcacttcctgtgctgcacggaatcctcacaccttgccaggacgggtccttcttttttattgaggtatgatgacctctgcctcccctgggcgactgctggcgccgtgaggtggtggacgtgcaggggtggccacacgcagggatggcagattgtggcccagaagaaggtgacccgcccgctgctgctcaagtttggcaggaacgctggcaagtccaccatcacggtgatcgccgaggacatctcggggaacaacggctacgtggagctctccttccgggccaggaagctggacgacaaggacctcttcagcaagtccgaccccttcctggagctctacagggtcaacgacgaccagggcttgcagctggtgtacaggacggaggtggtgaagaacaacctgaacccggtgtgggaggccttcaaagtctctctgagttccctctgcagctgcgaggagacaaggcctctaaagtgcctggtctgggattacgactctcgaggaaagcacgacttcatcggagaattctctaccaccttcgaggagatgcagaaggcctttgaggaggggcaggcccagtgggactgtgtgaaccccaaatacaagcagaagagacgcagttataagaactcaggagtggtcgtcctggctgacctcaagttccacagggtgtactccttcctggactatatcatgggcggctgccagatccacttcaccgtggccattgacttcaccgcctccaatggagacccgcggaacagctgctccctgcactacatcaacccctaccagccgaacgagtacctgaaggcactggtgtccgtgggcgagatctgccaggactatgacagtgacaagaggttttccgctttggggtttggagcccggatccctcccaagtatgaggtgtcccatgactttgccatcaatttcaaccctgaggacgatgagtgtgaaggcatccagggcgtggtggaggcctaccagaactgcctgcccagggtccagctctacggccccaccaacgtggcgcccatcatctccaaggtggcacgcgtggcggcggccgaggagagcaccgggaaagcctctcaatactacatcctgctgatcctgacggacggcgtggtgaccgacatggccgacacacgggaggccattgtgcgtgcctcacgcctgcccatgtccatcatcatcgtgggcgtgggcaacgccgacttcaccgacatgcaggtcctggacggcgacgacggcgtcctgcgctccccacggggtgagcccgcgctccgggacatcgtacagttcgtgcccttccgggagctcaagaacgcatcccctgcggcgctggccaagtgcgtgctggccgaggtcccgaagcaggtggtggagtactacagccacagaggcctgcccccgagaagcctgggtgtccctgccggagaggccagcccaggctgcacaccgtgaagatgtggagggcgtagggtgggggcagtgaggaatgggtccgtacagcctctgtctgcaacatgcttggggtcccttaagctccctccgacctcccagaagcctccagtccccaccaggccccactcccagtcctcctgggatcctgctggcttgggcccggctctggggcccccaaggccgaagggtgacaaaatacaggcccccatgcctggccctgcctgagccaggtgggtggagggagggagatcatgagggacttggagggagctgggagttcatccacgggagaccctgccccgatgagaaggggcagggactgggggctctgctttgcgtctaacctttgtgggggagggccagcaaggcagtccccccacgcccgagaaagcctgggggacccagacacctgtccccacagtcaaagcctggggacccagacatcctgtccccacagtcagcctcctgtccctgctggtgcccccacacccacctaccctgtgctttttgccgtcgggcctctgcacctgggtccatggggtctgcggggtctgcggggtctgcctggcctgtgggttctgccggtggggcttcaggagtaataaagtgtcaccctatccttgta

SEQ ID NO: 4804 - DNA, 576 bp, Homo sapiens
  source 1..576: mol_type = unassigned DNA; mol_type = unassigned DNA
ttcagggaagcgcggccacgcctgggccggccaccatttcccgggcgccgcggcggcgccgactcgcgggcagcggcccctcagtgcgcccagccgggcccccgaacgccgggagcatgagcgcgggctcggagcgcggggcggcggcaacccccgggggtttgcccgcgccctgcgcctcgaaggtggagctgcggctcagctgccggcacctgctggaccgcgacccgctcaccaagtccgaccccagcgtggcgttgctgcagcaggcgcagggccagtgggtgcaggtgggcagaaccgaggtggtccggagcagcctgcatcccgtgttctccaaggtcttcacggtggactactacttcgaggaggtgcagaggctgcgctttgaggtgtacgacacgcatgggcccagcggcttcagctgtcaggaggacgatttcctggggggcatggagtgcaccctggggcaggtatgatgacctctgcctcccctgggcgactgctggcgccgtgaggtggtggacgtgcaggggtggccacacgcagggatggcagattgtggcccagaagaag

SEQ ID NO: 4805 - DNA, 2409 bp, Homo sapiens
  source 1..2409: mol_type = unassigned DNA; mol_type = unassigned DNA
gcgcggccacgcctgggccggccaccatttcccgggcgccgcggcggcgccgactcgcgggcagcggcccctcagtgcgcccagccgggcccccgaacgccgggagcatgagcgcgggctcggagcgcggggcggcggcaacccccgggggtttgcccgcgccctgcgcctcgaaggtggagctgcggctcagctgccggcacctgctggaccgcgacccgctcaccaagtccgaccccagcgtggcgttgctgcagcaggcgcagggccagtgggtgcaggtgggcagaaccgaggtggtccggagcagcctgcatcccgtgttctccaaggtcttcacggtggactactacttcgaggaggtgcagaggctgcgctttgaggtgtacgacacgcatgggcccagcggcttcagctgtcaggaggacgatttcctggggggcatggagtgcaccctggggcagattgtggcccagaagaaggtgacccgcccgctgctgctcaagtttggcaggaacgctggcaagtccaccatcacggtgatcgccgaggacatctcggggaacaacggctacgtggagctctccttccgggccaggaagctggacgacaaggacctcttcagcaagtccgaccccttcctggagctctacagggtcaacgacgaccagggcttgcagctggtgtacaggacggaggtggtgaagaacaacctgaacccggtgtgggaggccttcaaagtctctctgagttccctctgcagctgcgaggagacaaggcctctaaagtgcctggtctgggattacgactctcgaggaaagcacgacttcatcggagaattctctaccaccttcgaggagatgcagaaggcctttgaggaggggcaggcccagtgggactgtgtgaaccccaaatacaagcagaagagacgcagttataagaactcaggagtggtcgtcctggctgacctcaagttccacagggtgtactccttcctggactatatcatgggcggctgccagatccacttcaccgtggccattgacttcaccgcctccaatggagacccgcggaacagctgctccctgcactacatcaacccctaccagccgaacgagtacctgaaggcactggtgtccgtgggcgagatctgccaggactatgacagtgacaagaggttttccgctttggggtttggagcccggatccctcccaagtatgaggtgtcccatgactttgccatcaatttcaaccctgaggacgatgagtgtgaaggcatccagggcgtggtggaggcctaccagaactgcctgcccagggtccagctctacggccccaccaacgtggcgcccatcatctccaaggtggcacgcgtggcggcggccgaggagagcaccgggaaagcctctcaatactacatcctgctgatcctgacggacggcgtggtgaccgacatggccgacacacgggaggccattgtgcgtgcctcacgcctgcccatgtccatcatcatcgtgggcgtgggcaacgccgacttcaccgacatgcaggtcctggacggcgacgacggcgtcctgcgctccccacggggtgagcccgcgctccgggacatcgtacagttcgtgcccttccgggagctcaagaacgcatcccctgcggcgctggccaagtgcgtgctggccgaggtcccgaagcaggtggtggagtactacagccacagaggcctgcccccgagaagcctgggtgtccctgccggagaggccagcccaggctgcacaccgtgaagatgtggagggcgtagggtgggggcagtgaggaatgggtccgtacagcctctgtctgcaacatgcttggggtcccttaagctccctccgacctcccagaagcctccagtccccaccaggccccactcccagtcctcctgggatcctgctggcttgggcccggctctggggcccccaaggccgaagggtgacaaaatacaggcccccatgcctggccctgcctgagccaggtgggtggagggagggagatcatgagggacttggagggagctgggagttcatccacgggagaccctgccccgatgagaaggggcagggactgggggctctgctttgcgtctaacctttgtgggggagggccagcaaggcagtccccccacgcccgagaaagcctgggggacccagacacctgtccccacagtcaaagcctggggacccagacatcctgtccccacagtcagcctcctgtccctgctggtgcccccacacccacctaccctgtgctttttgccgtcgggcctctgcacctgggtccatggggtctgcggggtctgcggggtctgcctggcctgtgggttctgccggtggggcttcaggagtaataaagtgtcaccctatccttgta

SEQ ID NO: 4806 - DNA, 550 bp, Homo sapiens
  source 1..550: mol_type = unassigned DNA; mol_type = unassigned DNA
cgacgaccagggcttgcagctggtgtacaggacggaggtggtgaagaacaacctgaacccggtgtgggaggccttcaaagtctctctgagttccctctgcagctgcgaggagacaaggcctctaaagtgcctggtctgggattacgactctcgaggaaagcacgacttcatcggagaattctctaccaccttcgaggagatgcagaaggcctttgaggaggggcaggcccagtgggactgtgtgaaccccaaatacaagcagaagagacgcagttataagaactcaggagtggtcgtcctggctgacctcaagttccacagggtgtactccttcctggactatatcatgggcggctgccagatccacttcaccacaaaacgtgaacgaggagaaactggagtgagcgtttgagtgaaccagccacagtctctacgtgtcatccaaggagcccggcacagaccccgtgtcacccccatgtcacccgcagaccccgcgtcacccatagatacgcacaccccgtgtcacccccatagcacccccgtgtcaccc

SEQ ID NO: 4807 - DNA, 519 bp, Homo sapiens
  source 1..519: mol_type = unassigned DNA; mol_type = unassigned DNA
ttccacagggtgtactccttcctggactatatcatgggcggctgccagatccacttcaccacaaaacgtgaacgaggagaaactggagtggccattgacttcaccgcctccaatggagacccgcggaacagctgctccctgcactacatcaacccctaccagccgaacgagtacctgaaggcactggtgtccgtgggcgagatctgccaggactatgacagtgacaagaggttttccgctttggggtttggagcccggatccctcccaagtatgaggtgtcccatgactttgccatcaatttcaaccctgaggacgatgagtgtgaaggcatccagggcgtggtggaggcctaccagaactgcctgcccagggtccagctctacggccccaccaacgtggcgcccatcatctccaaggtggcacgcgtggcggcggccgaggagagcaccgggaaagcctctcaatactacatcctgctgatcctgacggacggcgtggtgaccgacatggccgacaca

SEQ ID NO: 4808 - DNA, 682 bp, Homo sapiens
  source 1..682: mol_type = unassigned DNA; mol_type = unassigned DNA
gacagtgacaagaggttttccgctttggggtttggagcccggatccctcccaagtatgaggtgtcccatgactttgccatcaatttcaaccctgaggacgatgagtgtgaagcaatactacatcctgctgatcctgacggacggcgtggtgaccgacatggccgacacacgggaggccattgtgcgtgcctcacgcctgcccatgtccatcatcatcgtgggcgtgggcaacgccgacttcaccgacatgcaggtcctggacggcgacgacggcgtcctgcgctccccacggggtgagcccgcgctccgggacatcgtacagttcgtgcccttccgggagctcaagaacgcatcccctgcggcgctggccaagtgcgtgctggccgaggtcccgaagcaggtggtggagtactacagccacagaggcctgcccccgagaagcctgggtgtccctgccggagaggccagcccaggctgcacaccgtgaagatgtggagggcgtagggtgggggcagtgaggaatgggtccgtacagcctctgtctgcaacatgcttggggtcccttaagctccctccgacctcccagaagcctccagtccccaccaggccccactcccagtcctcctgggatcctgctggcttgggcccggctctggggcccccaaggccgaagggtgacaaa

SEQ ID NO: 4809 - DNA, 672 bp, Homo sapiens
  source 1..672: mol_type = unassigned DNA; mol_type = unassigned DNA
cagctgagccctcggtccctctcctggacacgaagctcccgccctagtggggccccacgcaatactacatcctgctgatcctgacggacggcgtggtgaccgacatggccgacacacgggaggccattgtgcgtgcctcacgcctgcccatgtccatcatcatcgtgggcgtgggcaacgccgacttcaccgacatgcaggtcctggacggcgacgacggcgtcctgcgctccccacggggtgagcccgcgctccgggacatcgtacagttcgtgcccttccgggagctcaagaacgcatcccctgcggcgctggccaagtgcgtgctggccgaggtcccgaagcaggtggtggagtactacagccacagaggcctgcccccgagaagcctgggtgtccctgccggagaggccagcccaggctgcacaccgtgaagatgtggagggcgtagggtgggggcagtgaggaatgggtccgtacagcctctgtctgcaacatgcttggggtcccttaagctccctccgacctcccagaagcctccagtccccaccaggccccactcccagtcctcctgggatcctgctggcttgggcccggctctggggcccccaaggccgaagggtgacaaaatacaggcccccatgcctggccctgcctgagccaggtgggtgg

SEQ ID NO: 4810 - DNA, 488 bp, Homo sapiens
  source 1..488: mol_type = unassigned DNA; mol_type = unassigned DNA
gttcgtgcccttccgggagctcaagaaccagagaacagcacaaggggctcctgggatccaccacgcggcttcccccgttgctgccaacctctgcgacccggcgagacacgcacagcacacacgcatcccctgcggcgctggccaagtgcgtgctggccgaggtcccgaagcaggtggtggagtactacagccacagaggcctgcccccgagaagcctgggtgtccctgccggagaggccagcccaggctgcacaccgtgaagatgtggagggcgtagggtgggggcagtgaggaatgggtccgtacagcctctgtctgcaacatgcttggggtcccttaagctccctccgacctcccagaagcctccagtccccaccaggccccactcccagtcctcctgggatcctgctggcttgggcccggctctggggcccccaaggccgaagggtgacaaaatacaggcccccatgcctggccctgcctgagcc

SEQ ID NO: 4811 - DNA, 517 bp, Homo sapiens
  source 1..517: mol_type = unassigned DNA; mol_type = unassigned DNA
aggactttgagcacctgaaacaccctccaccgttttgaaacttgtcgaatctacacaaaagcagagaacagcacaaggggctcctgggatccaccacgcggcttcccccgttgctgccaacctctgcgacccggcgagacacgcacagcacacacgcatcccctgcggcgctggccaagtgcgtgctggccgaggtcccgaagcaggtggtggagtactacagccacagaggcctgcccccgagaagcctgggtgtccctgccggagaggccagcccaggctgcacaccgtgaagatgtggagggcgtagggtgggggcagtgaggaatgggtccgtacagcctctgtctgcaacatgcttggggtcccttaagctccctccgacctcccagaagcctccagtccccaccaggccccactcccagtcctcctgggatcctgctggcttgggcccggctctggggcccccaaggccgaagggtgacaaaatacaggcccccatgcctggccctgcctg

SEQ ID NO: 4812 - DNA, 552 bp, Homo sapiens
  source 1..552: mol_type = unassigned DNA; mol_type = unassigned DNA
ggtgataaagactaaaatggattggacagaacttaaaagtaaaatatatgcttcttctgtaaaggatggctcccagtattttgtgcttctgattgttacagatggtgttatctcagatatggcccagactaaggagtccatagttaatgcctcaaaacttccaatgtcaataattatagtaggtgttggaccagcagaatttgatgcaatggtcgaattggatggagatgatgtaagagtctcctctagaggaaaatatgctgaaagagacattgtgcagaactgtgaaattgaatgaaaagaggccaacagcttctctctacctgctctcagggataattaccagaaaaatggtcaaaaggctgacagcagcaggggagaagagattcataaaccttcaatacaatctgatagcctgttggtcttgactcaggacagactgaggagaaagtgttcacaagatgccaggatcttatgtcagctctgaaatttcctttgactaaacatgctaaacaaaacaatacaaaacaaaacaataaaaaagattatttt

SEQ ID NO: 4813 - DNA, 3489 bp, Homo sapiens
  source 1..3489: mol_type = unassigned DNA; mol_type = unassigned DNA
accctcaacccccatccccgcctgacgggagctagccctcagtccgcccgagctgtggttgtgggcgccggacaagtccaaggcgcctcctcccaatatggacagccgctacaacagcactgcgggcatcggggacttgaaccagctgagcgctgccatcccggccacgcgggtggaggtgtccgtgtcctgcagaaatcttcttgacagagacacattttctaaatctgatccaatttgtgtcttatatgtacaaggagttggaaataaagaatggagagagtttggaagaactgaagtaattgataatactttaaatcctgattttgtaagaaagtttattctggactacttttttgaagaaagagagaatcttcgttttgacttgtatgatgttgattcaaagagccccaacttatccaaacatgactttctgggacaagtgttttgtacattgggagagatcgttggttcacagggaagtcgcctggaaaaaccaatagtaggaattccagggaagaaatgtggtacaatcatacttacagcagaggaattaaactgttgcagggatgccgttttgatgcaattttgtgcgaacaaattggacaagaaggacttctttggaaaatcagatcctttccttgtattttatcgaagtaatgaagatggcagttttacaatttgtcacaagacagaagttgtcaaaaacactctaaatccagtatggcaagcattcaagatctcagtcagagcattatgtaatggagactatgacagaacaatcaaagtagaggtgtatgactgggaccgagatggaagtcatgatttcattggagaatttacaacaagctatagggaactttctagagggcagtcacaattcaacgtatatgaggtggtgaatcccaaaaagaaaggaaaaaagaaaaaatatactaattctggaacagtaactttactctctttcttggtagaaacagaagtttcattccttgactacattaagggagggacgcaaatcaatttcacagtggctattgattttacagcatcaaacggcaaccctgctcagcccacttccctccactacatgaatccttaccaactgaatgcctatggtatggcactaaaagcagtgggagaaattgttcaagattatgacagtgataaaatgtttccagctctaggatttggtgcaaaactgcctccagatggaaggatatctcacgaatttgctttgaatgggaatcctcaaaacccctactgtgatggcattgagggggtcatggaggcttattacaggagtctgaaatctgtacaactatatgggcccaccaactttgctcctgtaattaatcatgtagcaagatatgcttcttctgtaaaggatggctcccagtattttgtgcttctgattgttacagatggtgttatctcagatatggcccagactaaggagtccatagttaatgcctcaaaacttccaatgtcaataattatagtaggtgttggaccagcagaatttgatgcaatggtcgaattggatggagatgatgtaagagtctcctctagaggaaaatatgctgaaagagacattgtgcagtttgtgccattcagggattatattgacagaagtggaaaccacatactgagcatggctagattggctaaagatgtcctagctgagatccctgagcagtttctctcctatatgagagcccgaggaatcaagccatcacctgcgcctcccccatacaccccacctacacatgtgttacagactcaaatatgactgtgctctgaaatgctaatgtcaactacaaatcaaaagtgctgagttaatgctttgtgcctggtgctctgtaatgaaccaggcaatgagatagttttctcagtttggtttcagcagttaatgtgctttcttggatccaaatttaaatatcttcctaaaccaaaactgtaaatatggttgttgcatgagcaacagaaaaaattgtttaaatgcttgaagcaaagtatggatgtcttctctaaatctttctttctttttttttttaacagaaacagctaatttccaatgtattgttgggaaaaagcacaaactgtgtttttaactcaaatattgtcttcgactgctatgtgtataggaaagcagtctctgtatcaatgtttacatgttactactttttaaatttcaatacttttataactgttcttaaaaataagagttttaaatactgaatcctttgtcttctaaattgcaatagctataatcacaagagcaatatctctttgaatgactgtctggacaaacacaattgcaaataagggaagggaaaaatgcttttctatttttcagtaactggattgtcttaagaaactacatctgcttaataaacaatttctcagcaatgtttgctgggtatgggagtttaagcccggcagatgtgtctcctggttgaacatgcatttttcatggagtttgggttctaaatttagactgcagttggtttgtattttgtaacactaagtagaaattataaaaagtcaaacattgtgatctataaatgcacagaaaatactttgtaaaaagtagcatccttatataataatgctatttagaaagactgaaaccaagactatttaactgtgaactatgtagcagatgttttaaactttttattccattatatcttgtctagatattttaattcaaagggatactggctctcttgatcggaatttcttgttatcaccattccacgttgccacacaaggtgcacaggctggaagtcttttgtgaaattcccagttaaatatatacaactatgtgacttagtgcacaacacatttgtgaaataacctactcctatatactgacctgcctgtccacgaataattgtaaagggtttttgcatgtacagtttttacaagaattacagttttgtgaagttgtgtctaaattaaagcatttctttagaacaaatggccttaaattctcacggaattcctggaaatgattgtgaattgccttcaaataatagaaaagtgtatttatttgtgtgtgtgtgtgtgtcaaaaatgtaactgctttataatattttttccttacctatatattctatttaatacttggtttatttctactgtacattgttttctttgtcccaagttgacctagggtgacttttataagcatgaaactattttactggaaagaaaaatatatacatccacatatctaacagtatcaatgttatataactatgtaataattgttgatttttaattatgtattaaaatctttaaatcataactatttgctttgtacgtttcatgtatgaatgacaatagtttgatgatttcctttactgatcttaaatatttatgccactacagtgtattacctacagatttttaaatttagctttatttatcaacccaaaaaacaaataaataagatcaatattcttttcttcttgtcaaaca

SEQ ID NO: 4814 - DNA, 2875 bp, Homo sapiens
  source 1..2875: mol_type = unassigned DNA; mol_type = unassigned DNA
aaagtgctcagcagaaaggaggccctagagtgggtagctcctttctgctgctggtcaaccccatccttaccaggcatccatcccatcggcccaggaatctgtctgcctcctgctgctcttcttggcacctgggctcagcactgactttgctccaagattagagcggaagccaacagcagggagaagccaggcagtgggagtaggcacttctgagcctgtgagggcaggagctcttcctgggcccccaagggtacagggatgcctgagcttgcagctgtggtttgggcaactgcagctgtgtggggaaatgcgagggggcagctcctgcctgctccatggagcaggagtggcctgggaggtctgagtctgtagccgtggcttggatgactgcagtgcacctggggagctcctaccccaactcggaaaaggcagagctcccacttgtccctggctcccacacgctccccggagcatgcagccccggctgtgcctccttgctgcagccagcgtgatggcagcgtaaggctgtctggagcagctgctgccatcaatagttgataaagaaataaggacgcaaatcaatttcacagtggctattgattttacagcatcaaacggcaaccctgctcagcccacttccctccactacatgaatccttaccaactgaatgcctatggtatggcactaaaagcagtgggagaaattgttcaagattatgacagtgataaaatgtttccagctctaggatttggtgcaaaactgcctccagatggaaggatatctcacgaatttgctttgaatgggaatcctcaaaacccctactgtgatggcattgagggggtcatggaggcttattacaggagtctgaaatctgtacaactatatgggcccaccaactttgctcctgtaattaatcatgtagcaagatatgcttcttctgtaaaggatggctcccagtattttgtgcttctgattgttacagatggtgttatctcagatatggcccagactaaggagtccatagttaatgcctcaaaacttccaatgtcaataattatagtaggtgttggaccagcagaatttgatgcaatggtcgaattggatggagatgatgtaagagtctcctctagaggaaaatatgctgaaagagacattgtgcagtttgtgccattcagggattatattgacagaagtggaaaccacatactgagcatggctagattggctaaagatgtcctagctgagatccctgagcagtttctctcctatatgagagcccgaggaatcaagccatcacctgcgcctcccccatacaccccacctacacatgtgttacagactcaaatatgactgtgctctgaaatgctaatgtcaactacaaatcaaaagtgctgagttaatgctttgtgcctggtgctctgtaatgaaccaggcaatgagatagttttctcagtttggtttcagcagttaatgtgctttcttggatccaaatttaaatatcttcctaaaccaaaactgtaaatatggttgttgcatgagcaacagaaaaaattgtttaaatgcttgaagcaaagtatggatgtcttctctaaatctttctttctttttttttttaacagaaacagctaatttccaatgtattgttgggaaaaagcacaaactgtgtttttaactcaaatattgtcttcgactgctatgtgtataggaaagcagtctctgtatcaatgtttacatgttactactttttaaatttcaatacttttataactgttcttaaaaataagagttttaaatactgaatcctttgtcttctaaattgcaatagctataatcacaagagcaatatctctttgaatgactgtctggacaaacacaattgcaaataagggaagggaaaaatgcttttctatttttcagtaactggattgtcttaagaaactacatctgcttaataaacaatttctcagcaatgtttgctgggtatgggagtttaagcccggcagatgtgtctcctggttgaacatgcatttttcatggagtttgggttctaaatttagactgcagttggtttgtattttgtaacactaagtagaaattataaaaagtcaaacattgtgatctataaatgcacagaaaatactttgtaaaaagtagcatccttatataataatgctatttagaaagactgaaaccaagactatttaactgtgaactatgtagcagatgttttaaactttttattccattatatcttgtctagatattttaattcaaagggatactggctctcttgatcggaatttcttgttatcaccattccacgttgccacacaaggtgcacaggctggaagtcttttgtgaaattcccagttaaatatatacaactatgtgacttagtgcacaacacatttgtgaaataacctactcctatatactgacctgcctgtccacgaataattgtaaagggtttttgcatgtacagtttttacaagaattacagttttgtgaagttgtgtctaaattaaagcatttctttagaacaaatggccttaaattctcacggaattcctggaaatgattgtgaattgccttcaaataatagaaaagtgtatttatttgtgtgtgtgtgtgtgtcaaaaatgtaactgctttataatattttttccttacctatatattctatttaatacttggtttatttctactgtacattgttttctttgtcccaagttgacctagggtgacttttataagcatgaaactattttactggaaagaaaaatatatacatccacatatctaacagtatcaatgttatataactatgtaataattgttgatttttaattatgtattaaaatctttaaatcataa

SEQ ID NO: 4815 - DNA, 1036 bp, Homo sapiens
  source 1..1036: mol_type = unassigned DNA; mol_type = unassigned DNA
gaacaagtgccaaagaagcaacaactggttttaaaagattaatttgtggtgccgaaggtgataaagactaaaatggattggacagaacttaaaagtaaaatatatgcttcttctgtaaaggatggctcccagtattttgtgcttctgattgttacagatggtgttatctcagatatggcccagactaaggagtccatagttaatgcctcaaaacttccaatgtcaataattatagtaggtgttggaccagcagaatttgatgcaatggtcgaattggatggagatgatgtaagagtctcctctagaggaaaatatgctgaaagagacattgtgcagtttgtgccattcagggattatattgacagaagtggaaaccacatactgagcatggctagattggctaaagatgtcctagctgagatccctgagcagtttctctcctatatgagagcccgaggaatcaagccatcacctgcgcctcccccatacaccccacctacacatgtgttacagactcaaatatgactgtgctctgaaatgctaatgtcaactacaaatcaaaagtgctgagttaatgctttgtgcctggtgctctgtaatgaaccaggcaatgagatagttttctcagtttggtttcagcagttaatgtgctttcttggatccaaatttaaatatcttcctaaaccaaaactgtaaatatggttgttgcatgagcaacagaaaaaattgtttaaatgcttgaagcaaagtatggatgtcttctctaaatctttctttctttttttttttaacagaaacagctaatttccaatgtattgttgggaaaaagcacaaactgtgtttttaactcaaatattgtcttcgactgctatgtgtataggaaagcagtctctgtatcaatgtttacatgttactactttttaaatttcaatacttttataactgttcttaaaaataagagttttaaatactgaatcctttgtcttctaaattgcaatagctataatcacaagagcaatatctctttgaatgactg

SEQ ID NO: 4816 - DNA, 1757 bp, Homo sapiens
  source 1..1757: mol_type = unassigned DNA; mol_type = unassigned DNA
ggtgatggcttcacagggagatacatgagtcaacatttatcgaatgatggatgcactttaagtgcagttcattatatatgttatacctcactgaagtggaaacaaattggataaatcttcttgacagagacacattttctaaatctgatccaatttgtgtcttatatgtacaaggagttggaaataaagaatggagagagtttggaagaactgaagtaattgataatactttaaatcctgattttgtaagaaagtttattctggactacttttttgaagaaagagagaatcttcgttttgacttgtatgatgttgattcaaagagccccaacttatccaaacatgactttctgggacaagtgttttgtacattgggagagatcgttggttcacagggaagtcgcctggaaaaaccaatagtaggaattccagggaagaaatgtggtacaatcatacttacagcagaggaattaaactgttgcagggatgccgttttgatgcaattttgtgcgaacaaattggacaagaaggacttctttggaaaatcagatcctttccttgtattttatcgaagtaatgaagatggcagttttacaatttgtcacaagacagaagttgtcaaaaacactctaaatccagtatggcaagcattcaagatctcagtcagagcattatgtaatggagactatgacagaacaatcaaagtagaggtgtatgactgggaccgagatggaagtcatgatttcattggagaatttacaacaagctatagggaactttctagagggcagtcacaattcaacgtatatgaggtggtgaatcccaaaaagaaaggaaaaaagaaaaaatatactaattctggaacagtaactttactctctttcttggtagaaacagaagtttcattccttgactacattaagggagggacgcaaatcaatttcacagtggctattgattttacagcatcaaacggcaaccctgctcagcccacttccctccactacatgaatccttaccaactgaatgcctatggtatggcactaaaagcagtgggagaaattgttcaagattatgacagtgataaaatgtttccagctctaggatttggtgcaaaactgcctccagatggaaggatatctcacgaatttgctttgaatgggaatcctcaaaacccctactgtgatggcattgagggggtcatggaggcttattacaggagtctgaaatctgtacaactatatgggcccaccaactttgctcctgtaattaatcatgtagcaagatatgcttcttctgtaaaggatggctcccagtattttgtgcttctgattgttacagatggtgttatctcagatatggcccagactaaggagtccatagttaatgcctcaaaacttccaatgtcaataattatagtaggtgttggaccagcagaatttgatgcaatggtcgaattggatggagatgatgtaagagtctcctctagaggaaaatatgctgaaagagacattgtgcagtttgtgccattcagggattatattgacagaagtggaaaccacatactgagcatggctagattggctaaagatgtcctagctgagatccctgagcagtttctctcctatatgagagcccgaggaatcaagccatcacctgcgcctcccccatacaccccacctacacatgtgttacagactcaaatatgactgtgctctgaaatgctaatgtcaactacaaatcaaaagtgctgagtt

SEQ ID NO: 4817 - DNA, 376 bp, Homo sapiens
  source 1..376: mol_type = unassigned DNA; mol_type = unassigned DNA
tttctttgtctgtaaaatgcacacttaatcaagttttgtatgagaaatgaatgaagacatgaagggatcaacatgctttctgtcttttcatagcacattttgctacttcatacatcttgatttccttgttgtccacattgttttagtatttggctaaaatgtactgaataaatgatcatattttctcttaaagcaatggtcgaattggatggagatgatgtaagagtctcctctagaggaaaatatgctgaaagagacattgtgcagtttgtgccattcagggattatattgacagaagtggaaaccacatactgagcatggctagattggctaaagatgtcctagctgagatccctgagcagtttctctcctata

SEQ ID NO: 4818 - DNA, 412 bp, Homo sapiens
  source 1..412: mol_type = unassigned DNA; mol_type = unassigned DNA
atctctttcaattgatcttcatggagatttacttttttactgttgttttgttttgttttgcctataaatttctacagaatgggaatcctcaaaacccctactgtgatggcattgagggggtcatggaggcttattacaggagtctgaaatctgtacaactatatgggcccaccaactttgctcctgtaattaatcatgtagcaagatatgcttcttctgtaaaggatggctcccagtattttgtgcttctgattgttacagatggtgttatctcagatatggcccagactaaggagtccatagttaatgcctcaaaacttccaatgtcaataattatagtaggtgttggaccagcagaatttgatgcaatggtcgaattggatggagatgatgtaagagtctcctctagagg

SEQ ID NO: 4819 - DNA, 542 bp, Homo sapiens
  source 1..542: mol_type = unassigned DNA; mol_type = unassigned DNA
tgtgcgaacaaattggacaagaaggacttctttggaaaatcagatcctttccttgtattttatcgaagtaatgaagatggcagttttacaatttgtcacaagacagaagttgtcaaaaacactctaaatccagtatggcaagcattcaagatctcagtcagagcattatgtaatggagactatgacagaacaatcaaagtagaggtgtatgactgggaccgagatggaagtcatgatttcattggagaatttacaacaagctatagggaactttctagagggcagtcacaattcaacgtatatgagagtgcttgttcctcaaattatctggaagaattgcggaattcttcaaatctcaagatcaaacattacctttctcctccaaacaacctgctccatatttaatagaataaccattgaaccatctgaaaaatttgtgatcttgccagtgacgcccaacatccttactggtgcatgttttcctgtagaatttgttcaattagggctttctgaaatacacaataaataatacgtggaatgaa

SEQ ID NO: 4820 - DNA, 549 bp, Homo sapiens
  source 1..549: mol_type = unassigned DNA; mol_type = unassigned DNA
cacaatgccccaccgtccccaactctcaagtggccgacagtgggcagtccagaagctgggaccagactcatctgcccgagggcacagtaggagggacggagggatctcccaagagctccgagggcgagaaatcttcttgacagagacacattttctaaatctgatccaatttgtgtcttatatgtacaaggagttggaaataaagaatggagagagtttggaagaactgaagtaattgataatactttaaatcctgattttgtaagaaagtttattctggactacttttttgaagaaagagagaatcttcgttttgacttgtatgatgttgattcaaagagccccaacttatccaaacatgactttctgggacaagtgttttgtacattgggagagatcgttggttcacagggaagtcgcctggaaaaaccaatagtaggaattccagggaagaaatgtggtacaatcatacttacagcagaggaattaaactgttgcagggatgccgttttgatgcaattttgtgcgaacaaattggacaagaaggac

SEQ ID NO: 4821 - DNA, 2068 bp, Homo sapiens
  source 1..2068: mol_type = unassigned DNA; mol_type = unassigned DNA
atctggagccgctgccgccggcggccactgtcagggcgcgagcggctggagcgcacgcagggctggagcgagtgcagccgccgccgccgccgacaccgcggcacatgggccggccccgccgctgccgtcgcccctagccccagcagccctggtctcgcagcctcctgcggctctggtcgcccgaccagccatgtctctcggcggagcctccgagcgcagcgtcccggccaccaagattgaaattaccgtgtcctgccggaacctgctagaccttgataccttctccaagtccgaccccatggtggtgctttacacgcagagccgggccagccaggagtggcgggagttcggacggaccgaggtgattgataacacgctgaacccagacttcgtgcgcaaattcgtcctcgactatttctttgaggaaaagcaaaatctgcgcttcgatgtgtacaacgtggactccaaaaccaacatctccaaaccgaaggatttcctgggacaagcgttcctggccctgggagaggtgattggaggccagggcagccgagtagagcgaaccctcacgggtgtaccaggcaagaagtgtgggaccatattgctgactgcagaagagcttagcaattgtcgggacattgccaccatgcagctgtgtgcaaacaagctggacaagaaggacttctttgggaaatcagaccccttccttgtgttctacaggagcaatgaggatggcacgttcaccatctgccacaagacagaggttgtgaaaaacacgctgaatcctgtgtggcagcccttcagcatccctgtgcgggctctgtgcaatggagactatgacagaacggtgaagattgatgtgtacgactgggaccgggatggaagccacgatttcattggtgagttcaccaccagctaccgggagctgagcaaggcccagaaccagttcacagtatatgaggttcttaaccctcggaagaaatgtaagaagaagaaatatgtcaactcaggaactgtgacgctgctctccttctctgtggactctgaattcacttttgttgattacatcaagggagggacacagctgaacttcacagtagccattgacttcacggcttccaatgggaatcctctgcagcctacctccctgcactacatgagtccctaccagctcagcgcctatgccatggccctcaaggcagtgggagagatcatccaggactatgacagtgataagctcttcccagcttatggctttggggccaagctgcccccagagggacggatctcccaccagttccccctgaacaacaatgatgaggaccccaactgtgcgggcatcgagggtgtgctggagagctatttccagagcctgcgcacagtgcagctctatgggcccacctactttgctcctgtcatcaaccaagtggccagggctgcagccaagatctctgatggctcccagtactatgttctgctcatcatcactgatggggtcatctctgacatgacgcagaccaaggaggccatcgtcagcgcctcctcattgcccatgtctatcattatcgtcggtgtaggaccagccatgtttgaggcaatggaagagttggacggtgatgatgtgcgcgtgtcctctaggggacgctacgcagagcgggacatcgttcagttcgtcccattccgagactatgttgaccggtcggggaaccaggtgttgagcatggcccgactggccaaggatgtgctggccgagatcccggagcagctgctgtcctatatgcgcaccagagacatccagcctcggcccccaccccctgccaaccccagcccgatcccagctccagagcagccctgaggattccacatatccaatgcctcacagtctgcaagcctgctcacccactgcttctgctttaagccagaggcacctggaaccctggacttcactgggagggccaacttggaggatcagtgctggctgacaagccctccgcctccttgcctgcagagggcctggcactatcaccacctctctgccttcatgccaataataaagctgatctttattcca

SEQ ID NO: 4822 - DNA, 1751 bp, Homo sapiens
  source 1..1751: mol_type = unassigned DNA; mol_type = unassigned DNA
ggcggccactgtcagggcgcgagcggctggagcgcacgcagggctggagcgagtgcagccgccgccgccgccgacaccgcggcacatgggccggccccgccgctgccgtcgcccctagccccagcagccctggtctcgcagcctcctgcggctctggtcgcccgaccagccatgtctctcggcggagcctccgagcgcagcgtcccggccaccaagattgaaattaccgtgtcctgccggaacctgctagaccttgataccttctccaagtccgaccccatggtggtgctttacacgcagagccgggccagccaggagtggcgggagttcggacggaccgaggtgattgataacacgctgaacccagacttcgtgcgcaaattcgtcctcgactatttctttgaggaaaagcaaaatctgcgcttcgatgtgtacaacgtggactccaaaaccaacatctccaaaccgaaggatttcctgggacaagcgttcctggccctgggagaggtgattggaggccagggcagccgagtagagcgaaccctcacgggtgtaccaggcaagaagtgtgggaccatattgctgactgcagaagagcttagcaattgtcgggacattgccaccatgcagctgtgtgcaaacaagctggacaagaaggacttctttgggaaatcagaccccttccttgtgttctacaggagcaatgaggatggcacgttcaccatctgccacaagacagaggttgtgaaaaacacgctgaatcctgtgtggcagcccttcagcatccctgtgcgggctctgtgcaatggagactatgacagaacggtgaagattgatgtgtacgactgggaccgggatggaagccacgatttcattggtgagttcaccaccagctaccgggagctgagcaaggcccagaaccagttcacagtatatgaggttcttaaccctcggaagaaatgtaagaagaagaaatatgtcaactcaggaactgtgacgctgctctccttctctgtggactctgaattcacttttgttgattacatcaagggagggacacagctgaacttcacagtagccattgacttcacggcttccaatgggaatcctctgcagcctacctccctgcactacatgagtccctaccagctcagcgcctatgccatggccctcaaggcagtgggagagatcatccaggactatgacagtgataagctcttcccagcttatggctttggggccaagctgcccccagagggacggatctcccaccagttccccctgaacaacaatgatgaggaccccaactgtgcgggcatcgagggtgtgctggagagctatttccagagcctgcgcacagtgcagctctatgggcccacctactttgctcctgtcatcaaccaagtggccagggctgcagccaagatctctgatggctcccagtactatgttctgctcatcatcactgatggggtcatctctgacatgacgcagaccaaggaggccatcgtcagcgcctcctcattgcccatgtctatcattatcgtcggtgtaggaccagccatgtttgaggcaatggaagagttggacggtgatgatgtgcgcgtgtcctctaggggacgctacgcagagcgggacatcgttcaggaaggttgctgcagccttggcacatccgtggtgtaggtcgggaggtccccaaggcccctgccctctagtggagacaaccaacaataaataatcacacaaagaaa

SEQ ID NO: 4823 - DNA, 584 bp, Homo sapiens
  source 1..584: mol_type = unassigned DNA; mol_type = unassigned DNA
actgtcagggcgcgagcggctggagcgcacgcagggctggagcgagtgcagccgccgccgccgccgacaccgcggcacatgggccggccccgccgctgccgtcgcccctagccccagcagccctggtctcgcagcctcctgcggctctggtcgcccgaccagccatgtctctcggcggagcctccgagcgcagcgtcccggccaccaagattgaaattaccgtgtcctgccggaacctgctagaccttgataccttctccaagtccgaccccagtaggcggctccaggaccgggagggggaacttggggtctgggcgcgactcaggggcgggtggagtcggggccaggggtgggagccgacctgacgtccttccctccccgcccccacctgcagtggtggtgctttacacgcagagccgggccagccaggagtggcgggagttcggacggaccgaggtgattgataacacgctgaacccagacttcgtgcgcaaattcgtcctcgactatttctttgaggaaaagcaaaatctgcgcttcgatgtgtgaggccccgcctggaattctggcttggcccgcccccg

SEQ ID NO: 4824 - DNA, 588 bp, Homo sapiens
  source 1..588: mol_type = unassigned DNA; mol_type = unassigned DNA
ccagaaccagttcacagtatatgaggttcttaaccctcggaagaaatgtaagaagaagaaatatgtcaactcaggaactgacacagctgaacttcacagtagccattgacttcacggcttccaatgggaatcctctgcagcctacctccctgcactacatgagtccctaccagctcagcgcctatgccatggccctcaaggcagtgggagagatcatccaggactatgacagtgataagctcttcccagcttatggctttggggccaagctgcccccagagggacggatctcccaccagttccccctgaacaacaatgatgaggaccccaactgtgcgggcatcgagggtgtgctggagagctatttccagagcctgcgcacagtgcagctctatgggcccacctactttgctcctgtcatcaaccaagtggccagggctgcagccaagatctctgatggctcccagtactatgttctgctcatcatcactgatggggtcatctctgacatgacgcagaccaaggaggccatcgtcagcgcctcctcattgcccatgtctatcattatcgtcggtgtaggaccagcca

SEQ ID NO: 4825 - DNA, 1742 bp, Homo sapiens
  source 1..1742: mol_type = unassigned DNA; mol_type = unassigned DNA
ggcggccactgtcagggcgcgagcggctggagcgcacgcagggctggagcgagtgcagccgccgccgccgccgacaccgcggcacatgggccggccccgccgctgccgtcgcccctagccccagcagccctggtctcgcagcctcctgcggctctggtcgcccgaccagccatgtctctcggcggagcctccgagcgcagcgtcccggccaccaagattgaaattaccgtgtcctgccggaacctgctagaccttgataccttctccaagtccgaccccatggtggtgctttacacgcagagccgggccagccaggagtggcgggagttcggacggaccgaggtgattgataacacgctgaacccagacttcgtgcgcaaattcgtcctcgactatttctttgaggaaaagcaaaatctgcgcttcgatgtgtacaacgtggactccaaaaccaacatctccaaaccggaggatttcctgggacaagcgttcctggccctgggagaggtgattggaggccagggcagccgagtagagcgaaccctcacgggtgtaccaggcaagaagtgtgggaccatattgctgactgcagaagagcttagcaattgtcgggacattgccaccatgcagctgtgtgcaaacaagctggacaagaaggacttctttgggaaatcagaccccttccttgtgttctacaggagcaatgaggatggcacgttcaccatctgccacaagacagaggttgtgaaaaacacgctgaatcctgtgtggcagcccttcagcatccctgtgcgggctctgtgcaatggagactatgacagaacggtgaagattgatgtgtacgactgggaccgggatggaagccacgatttcattggtgagttcaccaccagctaccgggagctgagcaaggcccagaaccagttcacagtatatgaggttcttaaccctcggaagaaatgtaagaagaagaaatatgtcaactcaggaactgtgacgctgctctccttctctgtggactctgaattcacttttgttgattacatcaagggagggacacagctgaacttcacagtagccattgacttcacggcttccaatgggaatcctctgcagcctacctccctgcactacatgagtccctaccagctcagcgcctatgccatggccctcaaggcagtgggagagatcatccaggactatgacagtgataagctcttcccagcttatggctttggggccaagctgcccccagagggacggatctcccaccagttccccctgaacaacaatgatgaggaccccaactgtgcgggcatcgagggtgtgctggagagctatttccagagcctgcgcacagtgcagctctatgggcccacctactttgctcctgtcatcaaccaagtggccagggctgcagccaagatctctgatggctcccagtactatgttctgctcatcatcactgatggggtcatctctgacatgacgcagaccaaggaggccatcgtcagcgcctcctcattgcccatgtctatcattatcgtcggtgtaggaccagccatgtttgaggcaatggaagagttggacggtgatgatgtgcgcgtgtcctctaggggacgctacgcagagcgggacatcgttcaggaaggttgctgcagccttggcacatccgtggtgtaggtcgggaggtccccaaggcccctgccctctagtggagacaaccaacaataaataatcac

SEQ ID NO: 4826 - DNA, 2091 bp, Homo sapiens
  source 1..2091: mol_type = unassigned DNA; mol_type = unassigned DNA
gtgactgggtggggctgcctcacttctgcctgatttgggaagcgctgcaaggacaaccggctggggtccttgcgcgccgcggctcagggaggagcaccgactgcgccgcaccctgagagatggttggtgccatgtggaaggtgattgtttcgctggtcctgttgatgcctggcccctgtgatgggctgtttcgctccctatacagaagtgtttccatgccacctaagggagactcaggacagccattatttctcaccccttacattgaagctgggaagatccaaaaaggaagagaattgagtttggtcggccctttcccaggactgaacatgaagagttatgccggcttcctcaccgtgaataagacttacaacagcaacctcttcttctggttcttcccagctcagatacagccagaagatgccccagtagttctctggctacagggtgggccgggaggttcatccatgtttggactctttgtggaacatgggccttatgttgtcacaagtaacatgaccttgcgtgacagagacttcccctggaccacaacgctctccatgctttacattgacaatccagtgggcacaggcttcagttttactgatgatacccacggatatgcagtcaatgaggacgatgtagcacgggatttatacagtgcactaattcagtttttccagatatttcctgaatataaaaataatgacttttatgtcactggggagtcttatgcagggaaatatgtgccagccattgcacacctcatccattccctcaaccctgtgagagaggtgaagatcaacctgaacggaattgctattggagatggatattctgatcccgaatcaattatagggggctatgcagaattcctgtaccaaattggcttgttggatgagaagcaaaaaaagtacttccagaagcagtgccatgaatgcatagaacacatcaggaagcagaactggtttgaggcctttgaaatactggataaactactagatggcgacttaacaagtgatccttcttacttccagaatgttacaggatgtagtaattactataactttttgcggtgcacggaacctgaggatcagctttactatgtgaaatttttgtcactcccagaggtgagacaagccatccacgtggggaatcagacttttaatgatggaactatagttgaaaagtacttgcgagaagatacagtacagtcagttaagccatggttaactgaaatcatgaataattataaggttctgatctacaatggccaactggacatcatcgtggcagctgccctgacagagcgctccttgatgggcatggactggaaaggatcccaggaatacaagaaggcagaaaaaaaagtttggaagatctttaaatctgacagtgaagtggctggttacatccggcaagcgggtgacttccatcaggtaattattcgaggtggaggacatattttaccctatgaccagcctctgagagcttttgacatgattaatcgattcatttatggaaaaggatgggatccttatgttggataaactaccttcccaaaagagaacatcagaggttttcattgctgaaaagaaaatcgtaaaaacagaaaatgtcataggaataaaaaaattatcttttcatatctgcaagatttttttcatcaataaaaattatccttgaaacaagtgagcttttgtttttggggggagatgtttactacaaaattaacatgagtacatgagtaagaattacattatttaacttaaaggatgaaaggtatggatgatgtgacactgagacaagatgtataaatgaaattttagggtcttgaataggaagttttaatttcttctaagagtaagtgaaaagtgcagttgtaacaaacaaagctgtaacatctttttctgccaataacagaagtttggcatgccgtgaaggtgtttggaaatattattggataagaatagctcaattatcccaaataaatggatgaagctataatagttttggggaaaagattctcaaatgtataaagtcttagaacaaaagaattctttgaaataaaaatattatatataaaagtaa

SEQ ID NO: 4827 - DNA, 1739 bp, Homo sapiens
  source 1..1739: mol_type = unassigned DNA; mol_type = unassigned DNA
agcgctgcaaggacaaccggctggggtccttgcgcgccgcggctcagggaggagcaccgactgcgccgcgtaagtgccgcctgccctgcgtgggtcgtgccagctcagcgggacaggtcctcgcctcggtccctcggacttagggagcgcggggcagaccctgagagatggttggtgccatgtggaaggtgattgtttcgctggtcctgttgatgcctggcccctgtgatgggctgtttcgctccctatacagaagtgtttccatgccacctaagggagactcaggacagccattatttctcaccccttacattgaagctgggaagatccaaaaaggaagagaattgagtttggtcggccctttcccaggactgaacatgaagagttatgccggcttcctcaccgtgaataagacttacaacagcaacctcttcttctggttcttcccagctcagatacagccagaagatgccccagtagttctctggctacagggtgggccgggaggttcatccatgtttggactctttgtggaacatgggccttatgttgtcacaagtaacatgaccttgcgtgacagagacttcccctggaccacaacgctctccatgctttacattgacaatccagtgggcacaggcttcagttttactgatgatacccacggatatgcagtcaatgaggacgatgtagcacgggatttatacagtgcactaattcagtttttccagatatttcctgaatataaaaataatgacttttatgtcactggggagtcttatgcagggaaatatgtgccagccattgcacacctcatccattccctcaaccctgtgagagaggtgaagatcaacctgaacggaattgctattggagatggatattctgatcccgaatcaattatagggggctatgcagaattcctgtaccaaattggcttgttggatgagaagcaaaaaaagtacttccagaagcagtgccatgaatgcatagaacacatcaggaagcagaactggtttgaggcctttgaaatactggataaactactagatggcgacttaacaagtgatccttcttacttccagaatgttacaggatgtagtaattactataactttttgcggtgcacggaacctgaggatcagctttactatgtgaaatttttgtcactcccagaggtgagacaagccatccacgtggggaatcagacttttaatgatggaactatagttgaaaagtacttgcgagaagatacagtacagtcagttaagccatggttaactgaaatcatgaataattataaggttctgatctacaatggccaactggacatcatcgtggcagctgccctgacagagcgctccttgatgggcatggactggaaaggatcccaggaatacaagaaggcagaaaaaaaagtttggaagatctttaaatctgacagtgaagtggctggttacatccggcaagcgggtgacttccatcaggtaattattcgaggtggaggacatattttaccctatgaccagcctctgagagcttttgacatgattaatcgattcatttatggaaaaggatgggatccttatgttggataaactaccttcccaaaagagaacatcagaggttttcattgctgaaaagaaaatcgtaaaaacagaaaatgtcataggaataaaaaaattatcttttcatatctgcaagatttttttcatcaataaaaattatccttgaaacaa

SEQ ID NO: 4828 - DNA, 679 bp, Homo sapiens
  source 1..679: mol_type = unassigned DNA; mol_type = unassigned DNA
aaagtacttccagaagcagtgccatgaatgcatagaacacatcaggaagcagaactggtttgaggcctttgaagaacctgaggatcagctttactatgtgaaatttttgtcactcccagaggtgagacaagccatccacgtggggaatcagacttttaatgatggaactatagttgaaaagtacttgcgagaagatacagtacagtcagttaagccatggttaactgaaatcatgaataattataaggttctgatctacaatggccaactggacatcatcgtggcagctgccctgacagagcgctccttgatgggcatggactggaaaggatcccaggaatacaagaaggcagaaaaaaaagtttggaagatctttaaatctgacagtgaagtggctggttacatccggcaagcgggtgacttccatcaggtaattattcgaggtggaggacatattttaccctatgaccagcctctgagagcttttgacatgattaatcgattcatttatggaaaaggatgggatccttatgttggataaactaccttcccaaaagagaacatcagaggttttcattgctgaaaagaaaatcgtaaaaacagaaaatgtcataggaataaaaaaattatcttttcatatctgcaagatttttttcatcaataaaaattatccttgaaa

SEQ ID NO: 4829 - DNA, 561 bp, Homo sapiens
  source 1..561: mol_type = unassigned DNA; mol_type = unassigned DNA
attatagggggctatgcagaattcctgtaccaaattggcttgttggatgagaagcaaaaaaagtacttccagaagcagtgccatgaatgcatagaacacatcaggaagcagaactggtttgaggcctttgaagttctgatctacaatggccaactggacatcatcgtggcagctgccctgacagagcgctccttgatgggcatggactggaaaggatcccaggaatacaagaaggcagaaaaaaaagtttggaagatctttaaatctgacagtgaagtggctggttacatccggcaagcgggtgacttccatcaggtaattattcgaggtggaggacatattttaccctatgaccagcctctgagagcttttgacatgattaatcgattcatttatggaaaaggatgggatccttatgttggataaactaccttcccaaaagagaacatcagaggttttcattgctgaaaagaaaatcgtaaaaacagaaaatgtcataggaataaaaaaattatcttttcatatctgcaagatttttttcatcaataaaaattatccttg

SEQ ID NO: 4830 - DNA, 2213 bp, Homo sapiens
  source 1..2213: mol_type = unassigned DNA; mol_type = unassigned DNA
gctcctttcgcttttcgctcgctgcactccaagccccggaacacccgcgtccgcacactaagggcaccaccgctctcccacctctgcgctgtcagatgtcaggcgcggaggtgctctgggcaccgaggtgctggcgaaccaaacaagtatcaccccggacgcctgcccccattccgagagagcgggcgggatggccacaggctgcaatacagtgacacgatcacagctcactgctacagcctctacctcctgggcttaatccatcctccctcctcagcctcccaagcagctgggactacaggtgattttgatatgctgctaaggtttgataagagaaatgagattcagagaacagattatattgttgaagagcttgactggaaatgatccaaacggaaacattggctcttcctggggttccagcctgctgtcttgacaggaactataccatcagctctcctgggtctcttacatgccaagtcatcctgcagatctgggactcactccgtaatcagcttgattgctgtaagttgaacacgtcagtggcatgggcaccagctgcacaaccctaggagccaccaaacacagtatattctatataaatgttgctgccaggagccccagttcaaactacaataccctgagagatggttggtgccatgtggaaggtgattgtttcgctggtcctgttgatgcctggcccctgtgatgggctgtttcgctccctatacagaagtgtttccatgccacctaagggagactcaggacagccattatttctcaccccttacattgaagctgggaagatccaaaaaggaagagaattgagtttggtcggccctttcccaggactgaacatgaagagttatgccggcttcctcaccgtgaataagacttacaacagcaacctcttcttctggttcttcccagctcagatacagccagaagatgccccagtagttctctggctacagggtgggccgggaggttcatccatgtttggactctttgtggaacatgggccttatgttgtcacaagtaacatgaccttgcgtgacagagacttcccctggaccacaacgctctccatgctttacattgacaatccagtgggcacaggcttcagttttactgatgatacccacggatatgcagtcaatgaggacgatgtagcacgggatttatacagtgcactaattcagtttttccagatatttcctgaatataaaaataatgacttttatgtcactggggagtcttatgcagggaaatatgtgccagccattgcacacctcatccattccctcaaccctgtgagagaggtgaagatcaacctgaacggaattgctattggagatggatattctgatcccgaatcaattatagggggctatgcagaattcctgtaccaaattggcttgttggatgagaagcaaaaaaagtacttccagaagcagtgccatgaatgcatagaacacatcaggaagcagaactggtttgaggcctttgaaatactggataaactactagatggcgacttaacaagtgatccttcttacttccagaatgttacaggatgtagtaattactataactttttgcggtgcacggaacctgaggatcagctttactatgtgaaatttttgtcactcccagaggtgagacaagccatccacgtggggaatcagacttttaatgatggaactatagttgaaaagtacttgcgagaagatacagtacagtcagttaagccatggttaactgaaatcatgaataattataaggttctgatctacaatggccaactggacatcatcgtggcagctgccctgacagagcgctccttgatgggcatggactggaaaggatcccaggaatacaagaaggcagaaaaaaaagtttggaagatctttaaatctgacagtgaagtggctggttacatccggcaagcgggtgacttccatcaggtaattattcgaggtggaggacatattttaccctatgaccagcctctgagagcttttgacatgattaatcgattcatttatggaaaaggatgggatccttatgttggataaactaccttcccaaaagagaacatcagaggttttcattgctgaaaagaaaatcgtaaaaacagaaaatgtcataggaataaaaaaattatcttttcatatctgcaagatttttttcatcaataaaaattatccttg

SEQ ID NO: 4831 - DNA, 874 bp, Homo sapiens
  source 1..874: mol_type = unassigned DNA; mol_type = unassigned DNA
atctaatcactccatttcatccagactgagatagatggctcacatttttgttgttattgttttctgtaatccttgggtaaattttttttcccccactaggaagagaattgagtttggtcggccctttcccaggactgaacatgaagagttatgccggcttcctcaccgtgaataagacttacaacagcaacctcttcttctggttcttcccagctcagatacagccagaagatgccccagtagttctctggctacagggtgggccgggaggttcatccatgtttggactctttgtggaacatgggccttatgttgtcacaagtaacatgaccttgcgtgacagagacttcccctggaccacaacgctctccatgctttacattgacaatccagtgggcacaggcttcagttttactgatgatacccacggatatgcagtcaatgaggacgatgtagcacgggatttatacagtgcactaattcagtttttccagatatttcctgaatataaaaataatgacttttatgtcactggggagtcttatgcagggaaatatgtgccagccattgcacacctcatccattccctcaaccctgtgagagaggtgaagatcaacctgaacggaattgctattggagatggatattctgatcccgaatcaattatagggggctatgcagaattcctgtaccaaattggcttgttggatgagaagcaaaaaaagtacttccagaagcagtgccatgaatgcatagaacacatcaggaagcagaactggtttgaggcctttgaaatactggataaactactagatggcgacttaacaagtgatccttcttacttccagaatgttacaggatgtagtaattacta

SEQ ID NO: 4832 - DNA, 525 bp, Homo sapiens
  source 1..525: mol_type = unassigned DNA; mol_type = unassigned DNA
aaaagacttgactgcatgataagaagacaccagcatatgaggcacagcctcattcaaagaaccaaagatgatcagtactttgctcatagtggagagtggttactgaggtctggggaggttttgtaggatttagtcacagccctgtaacacagagaggatttggatacagccagaagatgccccagtagttctctggctacagggtgggccgggaggttcatccatgtttggactctttgtggaacatgggccttatgttgtcacaagtaacatgaccttgcgtgacagagacttcccctggaccacaacgctctccatgctttacattgacaatccagtgggcacaggcttcagttttactgatgatacccacggatatgcagtcaatgaggacgatgtagcacgggatttatacagtgcactaattcagtttttccagatatttcctgaatataaaaataatgacttttatgtcactggggagtcttatgcagggaaatatgtgccagccattgcacacctcat

SEQ ID NO: 4833 - DNA, 553 bp, Homo sapiens
  source 1..553: mol_type = unassigned DNA; mol_type = unassigned DNA
gactcactctagttgaaagccctgggggaaggaacaaactctgcagcctgactgctgtgtttaatcccagctctcctctactagctggaagagaattgagtttggtcggccctttcccaggactgaacatgaagagttatgccggcttcctcaccgtgaataagacttacaacagcaacctcttcttctggttcttcccagctcagatacagccagaagatgccccagtagttctctggctacagggtgggccgggaggttcatccatgtttggactctttgtggaacatgggccttatgttgtcacaagtaacatgaccttgcgtgacagagacttcccctggaccacaacgctctccatgctttacattgacaatccagtgggcacaggcttcagttttactgatgatacccacggatatgcagtcaatgaggacgatgtagcacgggatttatacagtgcactaattcagtttttccagatatttcctgaatataaaaataatgacttttatgtcactggggagtcttatgcagggaaatatgtgccagc

SEQ ID NO: 4834 - DNA, 696 bp, Homo sapiens
  source 1..696: mol_type = unassigned DNA; mol_type = unassigned DNA
acacccgcgtccgcacactaagggcaccaccgctctcccacctctgcgctgtcagatgtcaggcgcggaggtgctctgggcaccgaggtgctggcgaaccaaacaagtatcaccccggacgcctgcccccattccgagagagcgggcgggatggccacaggcttgattgctgtaagttgaacacgtcagtggcatgggcaccagctgcacaaccctaggagccaccaaacacagtatattctatataaatgttgctgccaggagccccagttcaaactacaataccctgagagatggttggtgccatgtggaaggtgattgtttcgctggtcctgttgatgcctggcccctgtgatgggctgtttcgctccctatacagaagtgtttccatgccacctaagggagactcaggacagccattatttctcaccccttacattgaagctgggaagatccaaaaaggaagagaattgagtttggtcggccctttcccaggactgaacatgaagagttatgccggcttcctcaccgtgaataagacttacaacagcaacctcttcttctggttcttcccagctcagatacagccagaagatgccccagtagttctctggctacagggtgggccgggaggttcatccatgtttggactctttgtggaacatgggccttatgttgtcacaagtaacatgacct

SEQ ID NO: 4835 - DNA, 528 bp, Homo sapiens
  source 1..528: mol_type = unassigned DNA; mol_type = unassigned DNA
gtcagatgtcaggcgcggaggtgctctgggcaccgaggtgctggcgaaccaaacaagtatcaccccggacgcctgcccccattccgagagagcgggcgggatggccacagatccaaacggaaacattggctcttcctggggttccagcctgctgtcttgacaggaactataccatcagctctcctgggtctcttacatgccaagtcatcctgcagatctgggactcactccgtaatcagcttgattgctgtaagttgaacacgtcagtggcatgggcaccagctgcacaaccctaggagccaccaaacacagtatattctatataaatgttgctgccaggagccccagttcaaactacaataccctgagagatggttggtgccatgtggaaggtgattgtttcgctggtcctgttgatgcctggcccctgtgatgggctgtttcgctccctatacagaagtgtttccatgccacctaagggagactcaggacagccattatttctcaccccttacattgaagctggga

SEQ ID NO: 4836 - DNA, 571 bp, Homo sapiens
  source 1..571: mol_type = unassigned DNA; mol_type = unassigned DNA
aaacaaagaaaatcaagtctgcgaggagcgagggtttgctcccctctgctccggatttgggtgtccagggtagcgggcgcggcacggcaaacaggtgattttgatatgctgctaaggtttgataagagaaatgagattcagagaacagattatattgttgaagagcttgactggaaatgatccaaacggaaacattggctcttcctggggttccagcctgctgtcttgacaggaactataccatcagctctcctgggtctcttacatgccaagtcatcctgcagatctgggactcactccgtaatcagcttgattgctgtaagttgaacacgtcagtggcatgggcaccagctgcacaaccctaggagccaccaaacacagtatattctatataaatgttgctgccaggagccccagttcaaactacaataccctgagagatggttggtgccatgtggaaggtgattgtttcgctggtcctgttgatgcctggcccctgtgatgggctgtttcgctccctatacagaagtgtttccatgccacctaagggagactcaggacagccattatt

SEQ ID NO: 4837 - DNA, 524 bp, Homo sapiens
  source 1..524: mol_type = unassigned DNA; mol_type = unassigned DNA
aaagaaaatcaagtctgcgaggagcgagggtttgctcccctctgctccggatttgggtgtccagggtagcgggcgcggcacggcaaacaggtcggggcgctctgcttcaccccaaccttctccgccccgccagcccccgctccagctgcgccagaaagtgcgagcctgcccgctcctttcgcttttcgctcgctgcactccaagccccggaacacccgcgtccgcacactaagggcaccaccgctctcccacctctgcgctgtcagatgtcaggcgcggaggtgctctgggcaccgaggtgctggcgaaccaaacaagtatcaccccggacgcctgcccccattccgagagagcgggcgggatggccacaggcttgattgctgtaagttgaacacgtcagtggcatgggcaccagctgcacaaccctaggagccaccaaacacagtatattctatataaatgttgctgccaggagccccagttcaaactacaataccctgagagatggttggtgccatgtggaa

SEQ ID NO: 4838 - DNA, 2687 bp, Homo sapiens
  source 1..2687: mol_type = unassigned DNA; mol_type = unassigned DNA
cagagaggaaagtgacagaagacgtgcggagggagacgcagagacagaggagaggccggcagccacccagtctcgggggagcacttagctcccccgccccggctcccaccctgtccggggggctcctgaagccctcagccccaaccccgggctccccatggaagccagctgtgccccaggaggagcaggaggaggtggagtcggctgaatgcccacggtgcgcccggggcccctgagcccatcccgctcctagccgctgccctaaggcccccgcgcgccccgcgccccccacccggggccgcgccgcctccgtccgcccctcccccggggcttcgccccggacctgccccccgcccgtttgccagcgctcaggcaggagctctggactgggcgcgccgccgccctggagtgagggaagcccagtggaagggggtcccgggagccggctgcgatggacgccgtcttggaacccttcccggccgacaggctgttccccggatccagcttcctggacttgggggatctgaacgagtcggacttcctcaacaatgcgcactttcctgagcacctggaccactttacggagaacatggaggacttctccaatgacctgttcagcagcttctttgatgaccctgtgctggatgagaagagccctctattggacatggaactggactcccctacgccaggcatccaggcggagcacagctactccctgagcggcgactcagcgccccagagcccccttgtgcccatcaagatggaggacaccacccaagatgcagagcatggagcatgggcgctgggacacaaactgtgctccatcatggtgaagcaggagcagagcccggagctgcccgtggaccctctggctgccccctcggccatggctgccgcggccgccatggccaccaccccgctgctgggcctcagccccttgtccaggctgcccatcccccaccaggccccgggagagatgactcagctgccagtgatcaaagcagagcctctggaggtgaaccagttcctcaaagtgacaccggaggacctggtgcagatgcctccgacgccccccagcagccatggcagtgacagcgacggctcccagagtccccgctctctgcccccctccagccctgtcaggcccatggcgcgctcctccacggccatctccacctccccactcctcactgcccctcacaaattacaggggacatcagggccactgctcctgacagaggaggagaagcggaccctgattgctgagggctaccccatccccacaaaactccccctcaccaaagccgaggagaaggccttgaagagagtccggaggaaaatcaagaacaagatctcagcccaggagagccgtcgtaagaagaaggagtatgtggagtgtctagaaaagaaggtggagacatttacatctgagaacaatgaactgtggaagaaggtggagaccctggagaatgccaacaggaccctgctccagcagctgcagaaactccagactctggtcaccaacaagatctccagaccttacaagatggccgccacccagactgggacctgcctcatggtggcagccttgtgctttgttctggtgctgggctccctcgtgccctgccttcccgagttctcctccggctcccagactgtgaaggaagaccccctggccgcagacggcgtctacacggccagccagatgccctcccgaagcctcctattctacgatgacggggcaggcttatgggaagatggccgcagcaccctgctgcccatggagcccccagatggctgggaaatcaaccccggggggccggcagagcagcggccccgggaccacctgcagcatgatcacctggacagcacccacgagaccaccaagtacctgagtgaggcctggcctaaagacggtggaaacggcaccagccccgacttctcccactccaaggagtggttccacgacagggatctgggccccaacaccaccatcaaactctcctaggccatgccaagacccaggacataggacggacccctggtacccagaagaggagttcttgctcactaacccggatccgcctcgtgcccctgcctcctggagcttcccattccaggagaaaaggctccacttcccagcccttccttgcccctgacatttggactcttcccttgggccgaccactctgttctcattctccttcccaccaacatccatccgtccttctcagacaaaccactcactgggtaccccacctcctctctcatatgcccaacacgaccactgcctccctgcccccacacctgcacccaaacagacacatcaacgcaccccactcacagacaccccttaccccacccccactgtacagagaccaagaacagaaattgtttgtaaataatgaaccttattttttattattgccaatcccctaagatattgtattttacaaatctccctcttcccttcgcccctcccttgttttatattttatgaagttagtgcgggctttgctgctccctggcccaggaaagagggactacctgaccctcacctggcacccccctgctgctgcccaagccgctgggcctttttaattgccaaactgctctcttcatcagctcagcacatgctttaagaaagcaaaaccaaaaaaaaaaaaaaaaagatgcagcatcaa

SEQ ID NO: 4839 - DNA, 561 bp, Homo sapiens
  source 1..561: mol_type = unassigned DNA; mol_type = unassigned DNA
ggcgcgctgaggctgcttctggtcagggaaaccattctcctacaccgaccccagcaggcagctgcgcccccagagctttaccctgtctctgcactgaccttggggaaggaatttagggaggggtaaaacaaggctagagctggtaccattactgccccgggagagtcccctctgccgccaccagagacagccaccaaagcgccccacgcactttcctgagcacctggaccactttacggagaacatggaggacttctccaatgacctgttcagcagcttctttgatgaccctgtgctggatgagaagagccctctattggacatggaactggactcccctacgccaggcatccaggcggagcacagctactccctgagcggcgactcagcgccccagagcccccttgtgcccatcaagatggaggacaccacccaagatgcagagcatggagcatgggcgctgggacacaaactgtgctccatcatggtgaagcaggagcagagcccggagctgcccgtggaccctctggctgccccctcggccatggctgccgcggccgc

SEQ ID NO: 4840 - DNA, 438 bp, Homo sapiens
  source 1..438: mol_type = unassigned DNA; mol_type = unassigned DNA
tggcagtccgtgtcccacaatgtcagggctggtgcaagctcatgctcagctgaactcatgatgtccaagtggagctgatgtgcaacgttgctaactcggtttcccctgctctccccagaggacctggtgcagatgcctccgacgccccccagcagccatggcagtgacagcgacggctcccagagtccccgctctctgcccccctccagccctgtcaggcccatggcgcgctcctccacggccatctccacctccccactcctcactgcccctcacaaattacaggggacatcagggccactgctcctgacagaggaggagaagcggaccctgattgctgagggctaccccatccccacaaaactccccctcaccaaagccgaggagaaggccttgaagagagtccggaggaaaatcaagaacaagatctcagcccag

SEQ ID NO: 4841 - DNA, 528 bp, Homo sapiens
  source 1..528: mol_type = unassigned DNA; mol_type = unassigned DNA
atctccacctccccactcctcactgcccctcacaaattacaggggacatcagggccactgctcctgacagaggaggagaagcggaccctgattgctgagggctaccccatccccacaaaactccccctcaccaaagccgaggagaaggccttgaagagagtccggaggaaaatcaagaacaagatctcagcccaggagagccgtcgtaagaagaaggagtatgtggagtgtctagaaaagaaggtggagacatttacatctgagaacaatgaactgtggaagaaggtggagaccctggagaatgccaacagcttctccagcgggatccagccactcctctgttccctgattggcctggagaatcccacctgaccccccaccccacccctctgtctctggctggggttcctttctggcccaaagtaggtccaagcccttgtagttatttcgccacctgctgtacattgtgggaactgcaacccctacgtgcccgtttgggtggagagagattaaacatttgcccaccaa

SEQ ID NO: 4842 - DNA, 765 bp, Homo sapiens
  source 1..765: mol_type = unassigned DNA; mol_type = unassigned DNA
gagactgatgtggagatatataaataaacgaagtgccgtgataaaagcaaacacagcaataaagcaaaaatggctgggcacggtggcccatgcctgtaatcccaacactttgggaggccgaagcgggtggatcacctgaggtcaggagttccagacaagcctggcaaaaccccgtctctactaaaaatacaaaaattagccggcatggtggcgcacgcctgtagtctcagctagtcaggaggctaaggcaggagaatcacttgaacctcggaggcggaggttgcagtgagtcgcaaacgcaccactgcactccagcctgggtgaaagagcgagactctgtctcaaaacaaaacaaaacaaaaaacctaacaaaaacaatagctaccatttactagacactcactacataccaggcactgtgccaaacagctccttcttatcagctcagggtgctgggggtgccagggagggaaggtcagtgaaactgtggcaggtgtcggttaagcaaaagaaggctggcatctgtgcagctgggggcaggccttccctcctccaacccccttggccaggagcatcacagggcaggcctgagcttccacaaggtggcagccttgtgctttgttctggtgctgggctccctcgtgccctgccttcccgagttctcctccggctcccagactgtgaaggaagaccccctggccgcagacggcgtctacacggccagccagatgccctcccgaagcctcctattctacgatgacgggg

SEQ ID NO: 4843 - DNA, 1817 bp, Homo sapiens
  source 1..1817: mol_type = unassigned DNA; mol_type = unassigned DNA
aaaaatacaaaaattagccggcatggtggcgcacgcctgtagtctcagctagtcaggaggctaaggcaggagaatcacttgaacctcggaggcggaggttgcagtgagtcgcaaacgcaccactgcactccagcctgggtgaaagagcgagactctgtctcaaaacaaaacaaaacaaaaaacctaacaaaaacaatagctaccatttactagacactcactacataccaggcactgtgccaaacagctccttcttatcagctcagggtgctgggggtgccagggagggaaggtcagtgaaactgtggcaggtgtcggttaagcaaaagaaggctggcatctgtgcagctgggggcaggccttccctcctccaacccccttggccaggagcatcacagggcaggcctgagcttccacaaggtgacccagccagtcaccatgaggcaggccccaggcgccaggccactctgcagaggagccacgcaggaggtgacctttcctatcttgactgaaacgggcacctggcgtggaggccaagtctggagccagccccctaggagagctccaggaggcagagatgcctgcggggtcaaagcctgccagctgactgctgtgccctcctcaggaccctgctccagcagctgcagaaactccagactctggtcaccaacaagatctccagaccttacaagatggccgccacccagactgggacctgcctcatggtggcagccttgtgctttgttctggtgctgggctccctcgtgccctgccttcccgagttctcctccggctcccagactgtgaaggaagaccccctggccgcagacggcgtctacacggccagccagatgccctcccgaagcctcctattctacgatgacggggcaggcttatgggaagatggccgcagcaccctgctgcccatggagcccccagatggctgggaaatcaaccccggggggccggcagagcagcggccccgggaccacctgcagcatgatcacctggacagcacccacgagaccaccaagtacctgagtgaggcctggcctaaagacggtggaaacggcaccagccccgacttctcccactccaaggagtggttccacgacagggatctgggccccaacaccaccatcaaactctcctaggccatgccaagacccaggacataggacggacccctggtacccagaagaggagttcttgctcactaacccggatccgcctcgtgcccctgcctcctggagcttcccattccaggagaaaaggctccacttcccagcccttccttgcccctgacatttggactcttcccttgggccgaccactctgttctcattctccttcccaccaacatccatccgtccttctcagacaaaccactcactgggtaccccacctcctctctcatatgcccaacacgaccactgcctccctgcccccacacctgcacccaaacagacacatcaacgcaccccactcacagacaccccttaccccacccccactgtacagagaccaagaacagaaattgtttgtaaataatgaaccttattttttattattgccaatcccctaagatattgtattttacaaatctccctcttcccttcgcccctcccttgttttatattttatgaagttagtgcgggctttgctgctccctggcccaggaaagagggactacctgaccctcacctggcacccccctgctgctgcccaagccgctgggcctttttaattgccaaactgctctcttcatcagctcagcacatgctttaagaaagcaaaaccaaaaaaaaaaaaaaaaa

SEQ ID NO: 4844 - DNA, 7412 bp, Homo sapiens
  source 1..7412: mol_type = unassigned DNA; mol_type = unassigned DNA
gtttgtgtctggagccgtagcggcaagtgggcttgcggctaagggattttcctgggatgagagcgggtcttctgccttcattttggatgcacatcccgctttagccccggcagcctttggtccggctcgtgtccctggggattctcggatctccgaggacaccggacgggagcgcttggccatcctctctccggcagaggagcagacgtttgctttccaagtgcaaaactacagacacgcgcgcgcacacacgcaagcacacgcggagagagaggaaccttgccggtccgaggcagctctgcgcgtcccctcctgcgcttagcatcctcggcccagcgcggcccgcaccgccatggaggtgctggagagcggggagcagggcgtgctgcagtgggaccgcaagctgagcgagctgtcagagcccggggacggcgaggccctcatgtaccacacgcacttctcagaacttctggatgagttttcccagaacgtcttgggtcagctcctgaatgatcctttcctctcagagaagagtgtgtcaatggaggtggaaccttccccgacgtccccggcgcctctcatccaggctgagcacagctactccctgtgcgaggagcctcgggcccagtcgcccttcacccacattaccaccagtgacagcttcaatgacgatgaggtggaaagtgagaaatggtacctgtctacagacttcccttcaacatccatcaagacagagccagttacagacgaaccacccccaggactcgttccgtctgtcactctgaccatcacagccatctccaccccgttggaaaaggaggaacctcctctggaaatgaacactggggttgattcctcgtgccagaccattattcctaaaattaagctggagcctcatgaagtggatcagtttctaaacttctctcctaaagaagccccagtggaccacctgcatttgccgcccacccctccgagcagtcacggcagtgactcagagggcagcctgagtcccaacccacgcctgcaccccttcagcctgcctcagacccacagcccctccagagctgcaccccgggccccctccgccctctccagctcccctctcctcacggctcctcataaactgcagggatcaggccctctggtcctgacagaggaggagaagaggaccctgatcgctgagggctatcccatccccaccaaattgcccctgtcaaaatcagaggagaaggccctgaagaaaattcggaggaagatcaagaataagatttctgctcaggaaagtaggagaaagaagaaagaatacatggacagcctggagaaaaaagtggagtcttgttcaactgagaacttggagcttcggaagaaggtagaggttctagagaacactaataggactctccttcagcaactccagaagcttcagactttggtgatgggcaaggtttctcgaacctgcaagttagctggcacgcagactggcacctgcctcatggttgtggtgctgtgctttgccgttgcattcggcagcttctttcaaggctacgggccctatccttctgccaccaagatggctctgcccagccagcattccctgcaggagccctacacagcctccgtggtgagatccagaaacctgctgatctacgaggaacattctcccccagaggagtcatccagcccgggctcggctggggagctggggggctgggatagaggttcctccctgctcagggtgtcagggctggagtccaggccggatgtggatcttccccatttcattatctcgaatgagaccagcctggagaagtcagtgcttttggagctgcagcagcacctggtcagcgccaaactggaggggaatgaaacactaaaagttgtagaactcgacagaagagtgaacaccactttctaaagaggctgcctgcaccccctccctttcccttaactctacttttacatccccaaaccacctttgtcatcagcttttcctctttgccactggatcttcatggagacatgggcaagcattagtggcttcagattggagaccagcctgggacttccctgcagtgagagagcatctccccctggtccatgcccctcctgtgcagaagggagcctgcatccctcccttcctttctcttactgccataggaaattattttaggggttggaggtgggacaagcaggcttgtttccaccaatagtgccaaaaagatattgcctaatgtgcacctgtgaggtgtaaccccccgctttggagacgagatggctcttgttcagtcaagaccccagactctggccacaaaaatgccataatgcctgttggtatttggcaaagcactgacccgtgtcctccgttgctcgcactggggtctctggtgtgaacacccccgacagcagccctccgcccactctgccccctgggagccctcgctggatcgtctcgtctcctgcagcagcactggcaggcgagggctctcgttcatattctcaggccgcaagtgcaatgcctgaggggatcaggcttttctactccaggcaaacctgccccatcttgtcgcttttaggacctcccacaacctggttccccacacatccatagttctgcctccccagcttctcctccccagttgtaaatagtatttattagcttgccgaggcttcctgctagcaaccacactgaagagatcgatgcctcctttcaagctagccaagttttctgcgagccttcagagctaggagggcaccctaggctctgggatcccgtgtctttccagacaatgttttgtttcctttcctttgttttttcttttaactggaataattaccattgaaaaagaagttcctttgagcatgtatgtgtctgcctctaggatgagctcagagcgagagatgacacaatgcctcactcaggccccgggctccctggccacaagctttttctatcctgttttcatgacagagaaggggaagccctgttctgacaacagacatttcagacaaccttgctggctttccacacctgcctggccccctcctccctccacacttccactttgtcctcctcgtcccctacctcaacaaagcagggtggggtaggtgacatttgtgtatccacattcttacctttggtagtcaggtttggctactttgcagctcgcccaaagagatacaacctaatccccaacctacttttagtttttttgttttttttttatggttaaaagtaacttttgtagtttaaaaaaatctttcctctttcatataaataagaagtggaaattgcctttttattgtgtaatgtagaaaaccctcaagtgttttttccgagcttgggaaagattttgtgtaggaaatgtgcatagagtttgtattttatttttattagcagctgaaatgcctttggttttggcttctctctctccctctctctctctgtctctccttctctctctccccccaccacccacccccacacacgtcatctgcattgttattggagcctgtacttagagggattaagcccacaccctggcttccattccatatcaggtacaggatttgatgttattaacatttgtcgtcatacctcataagtcggtccctgccttgtctgtctaggcccatttggggctccctgtgagtgattcccctctctctgctatgctggagacggttccagcctggaaagcggccaagttcatcttctcactgtgagtggaagctggatcgggcccccgtagtcctggcagccctgttgtctggagggttcttgttgtccctcccattagccagggcggagactgtctgagctgtgcaggaggagggttgctagtaggttctgcttctgcttctctctgctccactgtctgcagcccagatcctgttgggcctggctggtgtctggtaaccatgggcctccactgacccatccctctcttttaaactgtcaggtcattatcaggcataggcagcctatagggcccaaagaaggcaaaaagataagatttactcaagtagcatttgggcaatgaggaaggaaaggtttcaaatttaggggcagaagtgagagaatgagccaacccatgtacctgctgcaactgaaccagactgggttttcaaggctcccagacgtagagtaggaaacgtgctcttctaaatgaggagggagaagataaaggaaacttctagcccctgtccttagtgctttgaggattttattttctcccttactacgcttgcttgacgtcactctctctcgacctccaaacagcaggactctttctctgggaaaccatccttccaaaacggaatctatgtagacaatgggacgttaggcagagagctcagatggcccttttaagggggctccaagaaccaacatcactgctcttttagataaacctctgccctccactccttgcttgagtgggttaaaggaactaacagttgtccctttaggaggacaaaatggggtcaagaggacacagaagagttgtatagcaccagattggttccaaatagttaatggatgtgtgcacattttctgttcagggattaagaccagaatatcagtggatttgttttccccaccaagtggcctcttagactagtcattaacttatgattagctctaaagatttcaaatagtggcagacagtgtcttctgaatgtaagttttgagaaatacgagtctgtcagagcggccataagccataaagagtcaatctcttaattatatttttcatcatgtaaacaagtttcccatttccctttcttagattgcaccagtgaaggagatgttttgcaaagattcagagaactaatttttcactggataagacctgagtaacccagaccccccaccgtggttcttttcacagccctcgactttgcacttaaaaagggatattgtaaatgaaaggctgcagtgccagttttaagaaagaatttctgtgaagtgtgaggactctggagtctagctcacataaagagagtgttatataaaaatccgacagctgaactaggttgctcttttttggcagggagtggggatgagatttgacaccaatatgggcaaaattagataaccttttggttaatataaatgattttgatttggaggcctaatttgtagattgtgaaagcagcttttagtttaacttattcacagaccccttataattaccatgtttttttttttcttcctaaatctcttggttcagcttgtgaatcttacgtgcccgtaaagttgggatgttgaattggctcttctttgttctggcagtgagtcaagtgtccagcattttttcataagtgttttttaaaattgttctccagcattttatggctcctccctcccatgtcctcagacccagcaaaagcgtagaggcagaattagaggcctctccaggccagctcctctgcccacatgtcatacaaggtgtgaatttgagcacagtccagaaatggagacatcccacccccagttgaataatggcccattcatgccaaccttgccaacacggagagggcagagatgcactagaagaccttcatcctccccttcctctgccccaagtcactacagttggttctattgaagccagtctttaagaaacctgggttaaagacaccagcacttctgcttgctgggctggctggacctgtgaagccatgggcaggtagtgccctcttgagagtcattttatttggccaccttcaggtgagactatccatagacacatgctaggataggccccgctgggagggcagttacaggagagagtaggtggtggtgacgtgagggctgtgaaggatccagagacaagacttagatgtttcgttcattcactcactcattcagttactcctaagacttttcagtttcataaggaagagtgttgcctgaggccctagggaatattggggaatagaagggattgaggaaacattaataatagttattcaaaagacccaaatgcttatacttctctctcccttcttctctctctgacacacacacacacacacacacacacacacacacacacgtgcacattcctcccttacatgctcatttgtgccttaaatgtgccttataggtaaatccaggatgactgaggaatccctcgtcactgggagattttgtatatattcttttattattagattgagttgggtgtggggaaaaatttttttctgaaggctcaaaagtggtttcctaaaagtgagccactatcagatttgcacatcaggagaaaagaaatagggttacgtccattaggaaaatcccagtttgcaggagtgcaatcacatcaaaaaaacaaccagccaggattaaaggtattataaatcctcatagcggaacatttctcagggcaaaggaacctggctcatttgaagattaatgttccatgcctttgtggtcaaagggtcagcacttaacacaggaaaaaactaggtgttgttttgttttgttattttggacaacataaaattcaggaatgttttatttagccttggtttctagaaggaagggaaataatatttcttgagcatttactagggtgttgcgtgctgtgctaagtaaattttaagtctttcagttttatagatacggaaaacaagggtgactctttaccacaggatgaataaagaactaagtaatatgggaaatgcagcaatttctggactagctgagccgattccttcctgtgagcacactgtaagctttcaagttctctgggcaggaattacagcacctgtcccctgcaatggccctgctgtgtgatgctcatcgcttcccttcgtgctggagcagtcccccaggtgtccatctcctatctttttgttccaatcttctgtgagttccagctagcaggctttacatctggggaaaggaaaaccaggggttttagctctgttctctgctcccatccttcgctcaccagctgagtgagaacatgaactttttgcaccatgtacccatggcttacactacttagaaaatcaccttttcagataaaacagtttatgagttcatagagaacaccagcactctttgacaaaactgtgagtgaccctttttaaacaatgctgagcaggccctgagctataatcaacggtgagctttaatgtctatgctgacagttaggttttgctctcttttgtaacaggttacgtagaccagcagtgtttaaatctaaatacgttgtgagtctgttatctgtcctatcgcgttttttaaatgactttttattctttatcatagctaagtaaataccaaaaaaaaaaaaaagctttgtaggacacttgtacttagtttgggaaaaaaaaataaattgaaattgttatgcttttgtatttccatttcttgcaaataaatattttttcttaaatagtaa

SEQ ID NO: 4845 - DNA, 2360 bp, Homo sapiens
  source 1..2360: mol_type = unassigned DNA; mol_type = unassigned DNA
gtccctcaaagtttgtgtctggagccgtagcggcaagtgggcttgcggctaagggattttcctgggatgagagcgggtcttctgccttcattttggatgcacatcccgctttagccccggcagcctttggtccggctcgtgtccctggggattctcggatctccgaggacaccggacgggagcgcttggccatcctctctccggcagaggagcagacgtttgctttccaagtgcaaaactacagacacgcgcgcgcacacacgcaagcacacgcggagagagaggaaccttgccggtccgaggcagctctgcgcgtcccctcctgcgcttagcatcctcggcccagcgcggcccgcaccgccatggaggtgctggagagcggggagcagggcgtgctgcagtgggaccgcaagctgagcgagctgtcagagcccggggacggcgaggccctcatgtaccacacgcacttctcagaacttctggatgagttttcccagaacgtcttgggtcagctcctgaatgatcctttcctctcagagaagagtgtgtcaatggaggtggaaccttccccgacgtccccggcgcctctcatccaggctgagcacagctactccctgtgcgaggagcctcgggcccagtcgcccttcacccacattaccaccagtgacagcttcaatgacgatgaggtggaaagtgagaaatggtacctgtctacagacttcccttcaacatccatcaagacagagccagttacagacgaaccacccccaggactcgttccgtctgtcactctgaccatcacagccatctccaccccgttggaaaaggaggaacctcctctggaaatgaacactggggttgattcctcgtgccagaccattattcctaaaattaagctggagcctcatgaagtggatcagtttctaaacttctctcctaaagaagccccagtggaccacctgcatttgccgcccacccctccgagcagtcacggcagtgactcagagggcagcctgagtcccaacccacgcctgcaccccttcagcctgcctcagacccacagcccctccagagctgcaccccgggccccctccgccctctccagctcccctctcctcacggctcctcataaactgcagggatcaggccctctggtcctgacagaggaggagaagaggaccctgatcgctgagggctatcccatccccaccaaattgcccctgtcaaaatcagaggagaaggccctgaagaaaattcggaggaagatcaagaataagatttctgctcaggaaagtaggagaaagaagaaagaatacatggacagcctggagaaaaaagtggagtcttgttcaactgagaacttggagcttcggaagaaggtagaggttctagagaacactaataggactctccttcagcaactccagaagcttcagactttggtgatgggcaaggtttctcgaacctgcaagttagctggcacgcagactggcacctgcctcatggttgtggtgctgtgctttgccgttgcattcggcagcttctttcaaggctacgggccctatccttctgccaccaagatggctctgcccagccagcattccctgcaggagccctacacagcctccgtgggtaagacagcatgtggcaagttgggcagggtcttgttttatttccctagagctgggtttctcagtcttccaaaaggaatcttctgtgaaagtccaatgtttaaaaagtggtaaaagtggagcttctccctttgaagaggcaagtgggggttcccctggggcccctcatccactggactgcggcatcactgggaattctccagagcttgacagagcacagtttgcaaactgctgttctagactgtgttccctgatccattctgacatctaatttttgagttctgataagggagagggaagcagatgagggaaagagtctgtcgctttctgtgacgttttaagagaactgctgtgtttctgcctccactgagtggaattgtatgagtaatgtaatgcaatgtatatagtaagggcttgtaaagtgaaattaaataaacagcaaggtcagggccgggcgtggtggctcacgcctgtaaccccagcactttgggaggccgaggcgggcagatcacgaggtcaggagattgagactatcctggctaacactgtgaaaccccatcgccactaaaaaatacaaaaaaattagccgggcgtggtggcaggtacctgtagtcccagctactggggaggctgaggcaggagaatattgtgaacctgggaggcggagtttgcagtgagccgagatcgcaccactgcactccagcctagacgacagagcgagactccatc

SEQ ID NO: 4846 - DNA, 1105 bp, Homo sapiens
  source 1..1105: mol_type = unassigned DNA; mol_type = unassigned DNA
ggagccgtagcggcaagtgggcttgcggctaagggattttcctgggatgagagcgggtcttctgccttcattttggatgcacatcccgctttagccccggcagcctttggtccggctcgtgtccctggggattctcggatctccgaggacaccggacgggagcgcttggccatcctctctccggcagaggagcagacgtttgctttccaagtgcaaaactacagacacgcgcgcgcacacacgcaagcacacgcggagagagaggaaccttgccggtccgaggcagctctgcgcgtcccctcctgcgcttagcatcctcggcccagcgcggcccgcaccgccatggaggtgctggagagcggggagcagggcgtgctgcagtgggaccgcaagctgagcgagctgtcagagcccggggacggcgaggccctcatgtaccacacgcacttctcagaacttctggatgagttttcccagaacgtcttgggtcagctcctgaatgatcctttcctctcagagaagagtgtgtcaatggaggtggaaccttccccgacgtccccggcgcctctcatccaggctgagcacagctactccctgtgcgaggagcctcgggcccagtcgcccttcacccacattaccaccagtgacagcttcaatgacgatgaggtggaaagtgagaaatggtacctgtctacagacttcccttcaacatccatcaagacagagccagttacagacgaaccacccccaggactcgttccgtctgtcactctgaccatcacagccatctccaccccgttggaaaaggaggaacctcctctggaaatgaacactggggttgattcctcgtgccagaccattattcctaaaattaagctggagcctcatgaagtggatcagtttctaaacttctctcctaaagaaggtctgtctgccctccctgtgtccctttgggttatggatatggtctctgggtctacagagagggaatatggcgagagagctgggatgagtttgtaccacagatgttgtagctggctttatgaaatagctctgttcttaaaaaataaaaattttgcttccaaataaaaattttgcaagctaa

SEQ ID NO: 4847 - DNA, 776 bp, Homo sapiens
  source 1..776: mol_type = unassigned DNA; mol_type = unassigned DNA
gatgggcccactctggcccgatcctggcaccagcaatgggatgttgacctgtctgctgagtcttggagcccaccactgccaaggacacccagctggagctaatttgctgggctgagtcatagcatctgcacttctcagaacttctggatgagttttcccagaacgtcttgggtcagctcctgaatgatcctttcctctcagagaagagtgtgtcaatggaggtggaaccttccccgacgtccccggcgcctctcatccaggctgagcacagctactccctgtgcgaggagcctcgggcccagtcgcccttcacccacattaccaccagtgacagcttcaatgacgatgaggtggaaagtgagaaatggtacctgtctacagacttcccttcaacatccatcaagacagagccagttacagacgaaccacccccaggactcgttccgtctgtcactctgaccatcacagccatctccaccccgttggaaaaggaggaacctcctctggaaatgaacactggggttgattcctcgtgccagaccattattcctaaaattaagctggagcctcatgaagtggatcagtttctaaacttctctcctaaagaaggtctgtctgccctccctgtgtccctttgggttatggatatggtctctgggtctacagagagggaatatggcgagagagctgggatgagtttgtaccacagatgttgtagctggctttatgaaatagctctgttcttaaaaaataaaaattttgcttccaaataaaaa

SEQ ID NO: 4848 - DNA, 719 bp, Homo sapiens
  source 1..719: mol_type = unassigned DNA; mol_type = unassigned DNA
aaccttccccgacgtccccggcgcctctcatccaggctgagcacagctactccctgtgcgaggagcctcgggcccagtcgcccttcacccacattaccaccagtgacagcttcaatgacgatatgttacataaatagtaaatggatgtacggtccgccctccctgtgcttgggttttgcatcctatgaatactgtattttcaatccacgtttatttgaaaaaaatctgcttgtgagtggacccgcatggttcaaaacccgtgttgttcaaggaccaactgcgtatgtgtttttctcatatgaggtggaaagtgagaaatggtacctgtctacagacttcccttcaacatccatcaagacagagccagttacagacgaaccacccccaggactcgttccgtctgtcactctgaccatcacagccatctccaccccgttggaaaaggaggaacctcctctggaaatgaacactggggttgattcctcgtgccagaccattattcctaaaattaagctggagcctcatgaagtggatcagtttctaaacttctctcctaaagaaggtctgtctgccctccctgtgtccctttgggttatggatatggtctctgggtctacagagagggaatatggcgagagagctgggatgagtttgtaccacagatgttgtagctggctttatgaaatagctctgttcttaaaaaataaaaattttgcttc

SEQ ID NO: 4849 - DNA, 596 bp, Homo sapiens
  source 1..596: mol_type = unassigned DNA; mol_type = unassigned DNA
ggagccgtagcggcaagtgggcttgcggctaagggattttcctgggatgagagcgggtcttctgccttcattttggatgcacatcccgctttagccccggcagcctttggtccggctcgtgtccctggggattctcggatctccgaggacaccggacgggagcgcttggccatcctctctccggcagaggagcagacgtttgctttccaagtgcaaaactacagacacgcgcgcgcacacacgcaagcacacgcggagagagaggaaccttgccggtccgaggcagctctgcgcgtcccctcctgcgcttagcatcctcggcccagcgcggcccgcaccgccatggaggtgctggagagcggggagcagggcgtgctgcagtgggaccgcaagctgagcgagctgtcagagcccggggacggcgaggccctcatgtaccacacggtacatgtctgttgtgaacagctcattcctgtaaaatgctgctcatcattgctgcaagtcagtgcaacaaactgtgcatatgaattactgttgaaagaggtattggtttagcagcacaaatgattgggttatatttctctcaaactaaggga

SEQ ID NO: 4850 - DNA, 7133 bp, Homo sapiens
  source 1..7133: mol_type = unassigned DNA; mol_type = unassigned DNA
acagacacgcgcgcgcacacacgcaagcacacgcggagagagaggaaccttgccggtccgaggcagctctgcgcgtcccctcctgcgcttagcatcctcggcccagcgcggcccgcaccgccatggaggtgctggagagcggggagcagggcgtgctgcagtgggaccgcaagctgagcgagctgtcagagcccggggacggcgaggccctcatgtaccacacgcacttctcagaacttctggatgagttttcccagaacgtcttgggtcagctcctgaatgatcctttcctctcagagaagagtgtgtcaatggaggtggaaccttccccgacgtccccggcgcctctcatccaggctgagcacagctactccctgtgcgaggagcctcgggcccagtcgcccttcacccacattaccaccagtgacagcttcaatgacgatgaggtggaaagtgagaaatggtacctgtctacagacttcccttcaacatccatctgtcactctgaccatcacagccatctccaccccgttggaaaaggaggaacctcctctggaaatgaacactggggttgattcctcgtgccagaccattattcctaaaattaagctggagcctcatgaagtggatcagtttctaaacttctctcctaaagaagccccagtggaccacctgcatttgccgcccacccctccgagcagtcacggcagtgactcagagggcagcctgagtcccaacccacgcctgcaccccttcagcctgcctcagacccacagcccctccagagctgcaccccgggccccctccgccctctccagctcccctctcctcacggctcctcataaactgcagggatcaggccctctggtcctgacagaggaggagaagaggaccctgatcgctgagggctatcccatccccaccaaattgcccctgtcaaaatcagaggagaaggccctgaagaaaattcggaggaagatcaagaataagatttctgctcaggaaagtaggagaaagaagaaagaatacatggacagcctggagaaaaaagtggagtcttgttcaactgagaacttggagcttcggaagaaggtagaggttctagagaacactaataggactctccttcagcaactccagaagcttcagactttggtgatgggcaaggtttctcgaacctgcaagttagctggcacgcagactggcacctgcctcatggttgtggtgctgtgctttgccgttgcattcggcagcttctttcaaggctacgggccctatccttctgccaccaagatggctctgcccagccagcattccctgcaggagccctacacagcctccgtggtgagatccagaaacctgctgatctacgaggaacattctcccccagaggagtcatccagcccgggctcggctggggagctggggggctgggatagaggttcctccctgctcagggtgtcagggctggagtccaggccggatgtggatcttccccatttcattatctcgaatgagaccagcctggagaagtcagtgcttttggagctgcagcagcacctggtcagcgccaaactggaggggaatgaaacactaaaagttgtagaactcgacagaagagtgaacaccactttctaaagaggctgcctgcaccccctccctttcccttaactctacttttacatccccaaaccacctttgtcatcagcttttcctctttgccactggatcttcatggagacatgggcaagcattagtggcttcagattggagaccagcctgggacttccctgcagtgagagagcatctccccctggtccatgcccctcctgtgcagaagggagcctgcatccctcccttcctttctcttactgccataggaaattattttaggggttggaggtgggacaagcaggcttgtttccaccaatagtgccaaaaagatattgcctaatgtgcacctgtgaggtgtaaccccccgctttggagacgagatggctcttgttcagtcaagaccccagactctggccacaaaaatgccataatgcctgttggtatttggcaaagcactgacccgtgtcctccgttgctcgcactggggtctctggtgtgaacacccccgacagcagccctccgcccactctgccccctgggagccctcgctggatcgtctcgtctcctgcagcagcactggcaggcgagggctctcgttcatattctcaggccgcaagtgcaatgcctgaggggatcaggcttttctactccaggcaaacctgccccatcttgtcgcttttaggacctcccacaacctggttccccacacatccatagttctgcctccccagcttctcctccccagttgtaaatagtatttattagcttgccgaggcttcctgctagcaaccacactgaagagatcgatgcctcctttcaagctagccaagttttctgcgagccttcagagctaggagggcaccctaggctctgggatcccgtgtctttccagacaatgttttgtttcctttcctttgttttttcttttaactggaataattaccattgaaaaagaagttcctttgagcatgtatgtgtctgcctctaggatgagctcagagcgagagatgacacaatgcctcactcaggccccgggctccctggccacaagctttttctatcctgttttcatgacagagaaggggaagccctgttctgacaacagacatttcagacaaccttgctggctttccacacctgcctggccccctcctccctccacacttccactttgtcctcctcgtcccctacctcaacaaagcagggtggggtaggtgacatttgtgtatccacattcttacctttggtagtcaggtttggctactttgcagctcgcccaaagagatacaacctaatccccaacctacttttagtttttttgttttttttttatggttaaaagtaacttttgtagtttaaaaaaatctttcctctttcatataaataagaagtggaaattgcctttttattgtgtaatgtagaaaaccctcaagtgttttttccgagcttgggaaagattttgtgtaggaaatgtgcatagagtttgtattttatttttattagcagctgaaatgcctttggttttggcttctctctctccctctctctctctgtctctccttctctctctccccccaccacccacccccacacacgtcatctgcattgttattggagcctgtacttagagggattaagcccacaccctggcttccattccatatcaggtacaggatttgatgttattaacatttgtcgtcatacctcataagtcggtccctgccttgtctgtctaggcccatttggggctccctgtgagtgattcccctctctctgctatgctggagacggttccagcctggaaagcggccaagttcatcttctcactgtgagtggaagctggatcgggcccccgtagtcctggcagccctgttgtctggagggttcttgttgtccctcccattagccagggcggagactgtctgagctgtgcaggaggagggttgctagtaggttctgcttctgcttctctctgctccactgtctgcagcccagatcctgttgggcctggctggtgtctggtaaccatgggcctccactgacccatccctctcttttaaactgtcaggtcattatcaggcataggcagcctatagggcccaaagaaggcaaaaagataagatttactcaagtagcatttgggcaatgaggaaggaaaggtttcaaatttaggggcagaagtgagagaatgagccaacccatgtacctgctgcaactgaaccagactgggttttcaaggctcccagacgtagagtaggaaacgtgctcttctaaatgaggagggagaagataaaggaaacttctagcccctgtccttagtgctttgaggattttattttctcccttactacgcttgcttgacgtcactctctctcgacctccaaacagcaggactctttctctgggaaaccatccttccaaaacggaatctatgtagacaatgggacgttaggcagagagctcagatggcccttttaagggggctccaagaaccaacatcactgctcttttagataaacctctgccctccactccttgcttgagtgggttaaaggaactaacagttgtccctttaggaggacaaaatggggtcaagaggacacagaagagttgtatagcaccagattggttccaaatagttaatggatgtgtgcacattttctgttcagggattaagaccagaatatcagtggatttgttttccccaccaagtggcctcttagactagtcattaacttatgattagctctaaagatttcaaatagtggcagacagtgtcttctgaatgtaagttttgagaaatacgagtctgtcagagcggccataagccataaagagtcaatctcttaattatatttttcatcatgtaaacaagtttcccatttccctttcttagattgcaccagtgaaggagatgttttgcaaagattcagagaactaatttttcactggataagacctgagtaacccagaccccccaccgtggttcttttcacagccctcgactttgcacttaaaaagggatattgtaaatgaaaggctgcagtgccagttttaagaaagaatttctgtgaagtgtgaggactctggagtctagctcacataaagagagtgttatataaaaatccgacagctgaactaggttgctcttttttggcagggagtggggatgagatttgacaccaatatgggcaaaattagataaccttttggttaatataaatgattttgatttggaggcctaatttgtagattgtgaaagcagcttttagtttaacttattcacagaccccttataattaccatgtttttttttttcttcctaaatctcttggttcagcttgtgaatcttacgtgcccgtaaagttgggatgttgaattggctcttctttgttctggcagtgagtcaagtgtccagcattttttcataagtgttttttaaaattgttctccagcattttatggctcctccctcccatgtcctcagacccagcaaaagcgtagaggcagaattagaggcctctccaggccagctcctctgcccacatgtcatacaaggtgtgaatttgagcacagtccagaaatggagacatcccacccccagttgaataatggcccattcatgccaaccttgccaacacggagagggcagagatgcactagaagaccttcatcctccccttcctctgccccaagtcactacagttggttctattgaagccagtctttaagaaacctgggttaaagacaccagcacttctgcttgctgggctggctggacctgtgaagccatgggcaggtagtgccctcttgagagtcattttatttggccaccttcaggtgagactatccatagacacatgctaggataggccccgctgggagggcagttacaggagagagtaggtggtggtgacgtgagggctgtgaaggatccagagacaagacttagatgtttcgttcattcactcactcattcagttactcctaagacttttcagtttcataaggaagagtgttgcctgaggccctagggaatattggggaatagaagggattgaggaaacattaataatagttattcaaaagacccaaatgcttatacttctctctcccttcttctctctctgacacacacacacacacacacacacacacacacacacacgtgcacattcctcccttacatgctcatttgtgccttaaatgtgccttataggtaaatccaggatgactgaggaatccctcgtcactgggagattttgtatatattcttttattattagattgagttgggtgtggggaaaaatttttttctgaaggctcaaaagtggtttcctaaaagtgagccactatcagatttgcacatcaggagaaaagaaatagggttacgtccattaggaaaatcccagtttgcaggagtgcaatcacatcaaaaaaacaaccagccaggattaaaggtattataaatcctcatagcggaacatttctcagggcaaaggaacctggctcatttgaagattaatgttccatgcctttgtggtcaaagggtcagcacttaacacaggaaaaaactaggtgttgttttgttttgttattttggacaacataaaattcaggaatgttttatttagccttggtttctagaaggaagggaaataatatttcttgagcatttactagggtgttgcgtgctgtgctaagtaaattttaagtctttcagttttatagatacggaaaacaagggtgactctttaccacaggatgaataaagaactaagtaatatgggaaatgcagcaatttctggactagctgagccgattccttcctgtgagcacactgtaagctttcaagttctctgggcaggaattacagcacctgtcccctgcaatggccctgctgtgtgatgctcatcgcttcccttcgtgctggagcagtcccccaggtgtccatctcctatctttttgttccaatcttctgtgagttccagctagcaggctttacatctggggaaaggaaaaccaggggttttagctctgttctctgctcccatccttcgctcaccagctgagtgagaacatgaactttttgcaccatgtacccatggcttacactacttagaaaatcaccttttcagataaaacagtttatgagttcatagagaacaccagcactctttgacaaaactgtgagtgaccctttttaaacaatgctgagcaggccctgagctataatcaacggtgagctttaatgtctatgctgacagttaggttttgctctcttttgtaacaggttacgtagaccagcagtgtttaaatctaaatacgttgtgagtctgttatctgtcctatcgcgttttttaaatgactttttattctttatcatagctaagtaaataccaaaaaaaaaaaaaagctttgtaggacacttgtacttagtttgggaaaaaaaaataaattgaaattgttatgcttttgtatttccatttcttgcaaataaatattttttcttaaatagt

SEQ ID NO: 4851 - DNA, 1053 bp, Homo sapiens
  source 1..1053: mol_type = unassigned DNA; mol_type = unassigned DNA
cggcagaggagcagacgtttgctttccaagtgcaaaactacagacacgcgcgcgcacacacgcaagcacacgcggagagagaggaaccttgccggtccgaggcagctctgcgcgtcccctcctgcgcttagcatcctcggcccagcgcggcccgcaccgccatggaggtgctggagagcggggagcagggcgtgctgcagtgggaccgcaagctgagcgagctgtcagagcccggggacggcgaggccctcatgtaccacacgcacttctcagaacttctggatgagttttcccagaacgtcttgggtcagctcctgaatgatcctttcctctcagagaagagtgtgtcaatggaggtggaaccttccccgacgtccccggcgcctctcatccaggctgagcacagctactccctgtgcgaggagcctcgggcccagtcgcccttcacccacattaccaccagtgacagcttcaatgacgatgaggtggaaagtgagaaatggtacctgtctacagacttcccttcaacatccatcaagacagagccagttacagacgaaccacccccaggactcgttccgtctgtcactctgaccatcacagccatctccaccccgttggaaaaggaggaacctcctctggaaatgaacactggggttgattcctcgtgccagaccaatacaacctaatccccaacctacttttagtttttttgttttttttttatggttaaaagtaacttttgtagtttaaaaaaatctttcctctttcatataaataagaagtggaaattgcctttttattgtgtaatgtagaaaaccctcaagtgttttttccgagcttgggaaagattttgtgtaggaaatgtgcatagagtttgtattttatttttattagcagctgaaatgcctttggttttggcttctctctctccctctctctctctgtctctccttctctctctccccccaccacccacccccacacacgtcatctgcattgttattggagcctgtacttagagggattaagcccacaccctggcttccattc

SEQ ID NO: 4852 - DNA, 5912 bp, Homo sapiens
  source 1..5912: mol_type = unassigned DNA; mol_type = unassigned DNA
gccgccggcccgggctggagccgagcgcagcagccaccgccgccgccgcgccagaagtttgggttgaaccggagctgccgggaggaaacttttttcttttttccccctccctcccgggaggaggaggaggaggaggaggggaagctgccgccggcgccaaggctcgtgggctcggggtcggcgcggcccgcagaaggggcgggggcctcgccccgcgaggggaggcgcgccccgggggccccgagaggggcggtgaggaccgcgggctgctggtgcggcggcggcggcgcgtgtgccccgcgcaggggagggcgcccgccccgctcccggcccggctgcgaggaggaggcggcggcggcgcaggaggatgtacttggtggcgggggacagggggttggccggctgcgggcacctcctggtctcgctgctggggctgctgctgctgctggcgcgctccggcacccgggcgctggtctgcctgccctgtgacgagtccaagtgcgaggagcccaggaactgcccggggagcatcgtgcagggcgtctgcggctgctgctacacgtgcgccagccagaggaacgagagctgcggcggcaccttcgggatttacggaacctgcgaccgggggctgcgttgtgtcatccgccccccgctcaatggcgactccctcaccgagtacgaagcgggcgtttgcgaagatgagaactggactgatgaccaactgcttggttttaaaccatgcaatgaaaaccttattgctggctgcaatataatcaatgggaaatgtgaatgtaacaccattcgaacctgcagcaatccctttgagtttccaagtcaggatatgtgcctttcagctttaaagagaattgaagaagagaagccagattgctccaaggcccgctgtgaagtccagttctctccacgttgtcctgaagattctgttctgatcgagggttatgctcctcctggggagtgctgtcccttacccagccgctgcgtgtgcaaccccgcaggctgtctgcgcaaagtctgccagccgggaaacctgaacatactagtgtcaaaagcctcagggaagccgggagagtgctgtgacctctatgagtgcaaaccagttttcggcgtggactgcaggactgtggaatgccctcctgttcagcagaccgcgtgtcccccggacagctatgaaactcaagtcagactaactgcagatggttgctgtactttgccaacaagatgcgagtgtctctctggcttatgtggtttccccgtgtgtgaggtgggatccactccccgcatagtctctcgtggcgatgggacacctggaaagtgctgtgatgtctttgaatgtgttaatgatacaaagccagcctgcgtatttaacaatgtggaatattatgatggagacatgtttcgaatggacaactgtcggttctgtcgatgccaagggggcgttgccatctgcttcaccgcccagtgtggtgagataaactgcgagaggtactacgtgcccgaaggagagtgctgcccagtgtgtgaagatccagtgtatccttttaataatcccgctggctgctatgccaatggcctgatccttgcccacggagaccggtggcgggaagacgactgcacattctgccagtgcgtcaacggtgaacgccactgcgttgcgaccgtctgcggacagacctgcacaaaccctgtgaaagtgcctggggagtgttgccctgtgtgcgaagaaccaaccatcatcacagttgatccacctgcatgtggggagttatcaaactgcactctgacagggaaggactgcattaatggtttcaaacgcgatcacaatggttgtcggacctgtcagtgcataaacaccgaggaactatgttcagaacgtaaacaaggctgcaccttgaactgtcccttcggtttccttactgatgcccaaaactgtgagatctgtgagtgccgcccaaggcccaagaagtgcagacccataatctgtgacaagtattgtccacttggattgctgaagaataagcacggctgtgacatctgtcgctgtaagaaatgtccagagctctcatgcagtaagatctgccccttgggtttccagcaggacagtcacggctgtcttatctgcaagtgcagagaggcctctgcttcagctgggccacccatcctgtcgggcacttgtctcaccgtggatggtcatcatcataaaaatgaggagagctggcacgatgggtgccgggaatgctactgtctcaatggacgggaaatgtgtgccctgatcacctgcccggtgcctgcctgtggcaaccccaccattcaccctggacagtgctgcccatcatgtgcagatgactttgtggtgcagaagccagagctcagtactccctccatttgccacgcccctggaggagaatactttgtggaaggagaaacgtggaacattgactcctgtactcagtgcacctgccacagcggacgggtgctgtgtgagacagaggtgtgcccaccgctgctctgccagaacccctcacgcacccaggattcctgctgcccacagtgtacagatcaaccttttcggccttccttgtcccgcaataacagcgtacctaattactgcaaaaatgatgaaggggatatattcctggcagctgagtcctggaagcctgacgtttgtaccagctgcatctgcattgatagcgtaattagctgtttctctgagtcctgcccttctgtatcctgtgaaagacctgtcttgagaaaaggccagtgttgtccctactgcatagaagacacaattccaaagaaggtggtgtgccacttcagtgggaaggcctatgccgacgaggagcggtgggaccttgacagctgcacccactgctactgcctgcagggccagaccctctgctcgaccgtcagctgcccccctctgccctgtgttgagcccatcaacgtggaaggaagttgctgcccaatgtgtccagaaatgtatgtcccagaaccaaccaatatacccattgagaagacaaaccatcgaggagaggttgacctggaggttcccctgtggcccacgcctagtgaaaatgatatcgtccatctccctagagatatgggtcacctccaggtagattacagagataacaggctgcacccaagtgaagattcttcactggactccattgcctcagttgtggttcccataattatatgcctctctattataatagcattcctattcatcaatcagaagaaacagtggataccactgctttgctggtatcgaacaccaactaagccttcttccttaaataatcagctagtatctgtggactgcaagaaaggaaccagagtccaggtggacagttcccagagaatgctaagaattgcagaaccagatgcaagattcagtggcttctacagcatgcaaaaacagaaccatctacaggcagacaatttctaccaaacagtgtgaagaaaggcaactaggatgaggtttcaaaagacggaagacgactaaatctgctctaaaaagtaaactagaatttgtgcacttgcttagtggattgtattggattgtgacttgatgtacagcgctaagaccttactgggatgggctctgtctacagcaatgtgcagaacaagcattcccacttttcctcaagataactgaccaagtgttttcttagaaccaaagtttttaaagttgctaagatatatttgcctgtaagatagctgtagagatatttggggtggggacagtgagtttggatggggaaatgggtgggagggtggtgttgggaagaaaaattggtcagcttggctcggggagaaacctggtaacataaaagcagttcagtggcccagaggttatttttttcctattgctctgaagactgcactggttgctgcaaagctcaggcctgaatgagcaggaaacaaaaaaggccttgcgacccagctgccataaccaccttagaactaccagacgagcacatcagaaccctttgacagccatcccaggtctaaagccacaagtttcttttctatacagtcacaactgcagtaggcagtgaggaagccagagaaatgcgatagcggcatttctctaaagcgggttattaaggatatatacagttacactttttgctgcttttattttcttccaagccaatcaatcagccagttcctagcagagtcagcacatgaacaagatctaagtcatttcttgatgtgagcactggagcttttttttttttacaacgtgacaggaagaggagggagagggtgacgaacaccaggcatttccaggggctatatttcactgtttgttgttgctttgttctgttatattgttggttgttcatagtttttgttgaagctctagcttaagaagaaactttttttaaaaagactgtttggggattctttttccttattatatactgattctacaaaatagaaactacttcattttaattgtatattattcaagcacctttgttgaagctcaaaaaaaatgatgcctctttaaactttagcaattataggagtatttatgtaactatcttatgcttcaaaaaacaaaagtatttgtgtgcatgtgtatataatatatatatatacatatatatttatacacatacaatttatgttttcctgttgaatgtatttttatgagattttaaccagaacaaaggcagataaacaggcattccatagcagtgcttttgatcacttacaaattttttgaataacacaaaatctcattctacctgcagtttaattggaaagatgtgtgtgtgagagtatgtatgtgtgtgtgtgtgtgtgtgtgtgtgcgcgcgcacgcacgccttgagcagtcagcattgcacctgctatggagaagggtattcctttattaaaatcttcctcatttggatttgctttcagttggttttcaatttgctcactggccagagacattgatggcagttcttatctgcatcactaatcagctcctggattttttttttttttttttcaaacaatggtttgaaacaactactggaatattgtccacaataagctggaagtttgttgtagtatgcctcaaatataactgactgtatactatagtggtaacttttcaaacagcccttagcacttttatactaattaacccatttgtgcattgagttttcttttaaaaatgcttgttgtgaaagacacagatacccagtatgcttaacgtgaaaagaaaatgtgttctgttttgtaaaggaactttcaagtattgttgtaaatacttggacagaggttgctgaactttaaaaaaaattaatttattattataatgacctaatttattaatctgaagattaaccatttttttgtcttagaatatcaaaaagaaaaagaaaaaggtgttctagctgtttgcatcaaaggaaaaaaagatttattatcaaggggcaatatttttatcttttccaaaataaatttgttaatgatacattacaaaaatagattgacatcagcctgattagtataaattttgttggtaattaatccattcctggcataaaaagtctttatcaaaaaaaattgtagatgcttgctttttgttttttcaatcatggccatattatgaaaatactaacaggatataggacaaggtgtaaatttttttattattattttaaagatatgatttatcctgagtgctgtatctattactcttttactttggttcctgttgtgctcttgtaaaagaaaaatataatttcctgaagaataaaatagatatatggcacttggagtgcatcatagttctacagtttgtttttgttttcttcaaaaaagctgtaagagaattatctgcaacttgattcttggcaggaaataaacattttgagttgaaatca

SEQ ID NO: 4853 - DNA, 667 bp, Homo sapiens
  source 1..667: mol_type = unassigned DNA; mol_type = unassigned DNA
tgcccggggagcatcgtgcagggcgtctgcggctgctgctacacgtgcgccagccagaggaacgagagctgcggcggcaccttcgggatttacggaacctgcgaccgggggctgcgttgtgtcatccgccccccgctcaatggcgactccctcaccgagtacgaagcgggcgtttgcgaagaagagaagccagattgctccaaggcccgctgtgaagtccagttctctccacgttgtcctgaagattctgttctgatcgagggttatgctcctcctggggagtgctgtcccttacccagccgctgcgtgtgcaaccccgcaggctgtctgcgcaaagtctgccagccgggaaacctgaacatactagtgtcaaaagcctcagggaagccgggagagtgctgtgacctctatgagtgcaaaccagttttcggcgtggactgcaggactgtggaatgccctcctgttcagcagaccgcgtgtcccccggacagctatgaaactcaagtcagactaactgcagatggttgctgtactttgccaacaagatgcgagtgtctctctggcttatgtggtttccccgtgtgtgaggtgggatccactccccgcatagtctctcgtggcgatgggacacctggaaagtgctgtgatgtctttgaatgtgttaatg

SEQ ID NO: 4854 - DNA, 700 bp, Homo sapiens
  source 1..700: mol_type = unassigned DNA; mol_type = unassigned DNA
gcggctgctgctacacgtgcgccagccagaggaacgagagctgcggcggcaccttcgggatttacggaacctgcgaccgggggctgcgttgtgtcatccgccccccgctcaatggcgactccctcaccgagtacgaagcgggcgtttgcgaagctgcggggtattgaatttgaggctgctctcagcattactgctcatctcaaagaggaacaaatggtcccccaaatggtccagatgcaacagtagggaaaggagtgccaccattcattctgaggtgcctgggccatactctggatgaagctcacagctctaacgtaaggcggtaagtcattttttttttaaacttaaggaagttaatttgaaagtttatgctgatgccatttcatatgacagagactaaagggtatacgtccttgtgttctcttggtggggactgctgtcctaaaggtaaaagattttgatccagaggttggattgttcctcgtgtggcaacagtcctctgacctcagtcattttcaaagtctaatgtctttttggctaacaaaagacatcaagctagagattaaaatttgcagaagatgggagtttttttgttgttttcggttttttttttttttttttttgagacggagtctcactctgtcacccaggctggagtgcaggtgatcatatctacaaaggtgacaagaacatgaacctg

SEQ ID NO: 4855 - DNA, 386 bp, Homo sapiens
  source 1..386: mol_type = unassigned DNA; mol_type = unassigned DNA
ggtgcatattagcttaagaacttttaaacctctgcggcagtaatgagaatctgcatgccaagggcccagcatttctctacaaagcagcccatgagtgcatgtgtgtttgctgtagtgaagggtctatgttagaagctgcggggtattgaatttgaggctgctctcagcattactgctcatctcaaagaggaacaaatggtcccccaaatggtccagatgcaacagtagggaaaggagtgccaccattcattctgaggtgcctgggccatactctggatgaagctcacagctctaacgtaaggcggtctctgtgttccagatttttttttgtaactatgaaatccttgccttgtagtcaacttaaaatgaaataaatttatcagtgc

SEQ ID NO: 4856 - DNA, 311 bp, Homo sapiens
  source 1..311: mol_type = unassigned DNA; mol_type = unassigned DNA
ctgcggggtattgaatttgaggctgctctcagcattactgctcatctcaaagaggaacaaatggtcccccaaatggtccagatgcaacagtagggaaaggagtgccaccattcattctgaggtgcctgggccatactctggatgaagctcacagctctaacgtaaggcggctggagtgcaggtgatcatatctacaaaggtgacaagaacatgaacctgcagtcctgttatcagcattttgtctctgtgttccagatttttttttgtaactatgaaatccttgccttgtagtcaacttaaaatgaaataaa

SEQ ID NO: 4857 - DNA, 240 bp, Homo sapiens
  source 1..240: mol_type = unassigned DNA; mol_type = unassigned DNA
ctgcggggtattgaatttgaggctgctctcagcattactgctcatctcaaagaggaacaaatggtcccccaaatggtccagatgcaacagtagggaaaggagtgccaccattcattctgaggtgcctgggccatactctggatgaagctcacagctctaacgtaaggcggtctctgtgttccagatttttttttgtaactatgaaatccttgccttgtagtcaacttaaaatgaaataaa

SEQ ID NO: 4858 - DNA, 346 bp, Homo sapiens
  source 1..346: mol_type = unassigned DNA; mol_type = unassigned DNA
cctgatccttgcccacggagaccggtggcgggaagacgactgcacattctgccagtgcgtcaacggtgaacgccactgcgttgcgaccgtctgcggacagacctgcacaaaccctgtgaaagtgcctggggagtgttgccctgtgtgcgaagaaccaaccatcatcacagttgatccacctgcatgtggggagttatcaaactgcactctgacagggaaggactgcattaatggtttcaaacgcgatcacaatggttgtcggacctgtcagtgcataaacagtgagtagacagaagactgtatgttttttctgaggcctaatatgatattgtcaaagcatattatg

SEQ ID NO: 4859 - DNA, 874 bp, Homo sapiens
  source 1..874: mol_type = unassigned DNA; mol_type = unassigned DNA
gccctgatcacctgcccggtgcctgcctgtggcaaccccaccattcaccctggacagtgctgcccatcatgtgcagatgactttgtggtgcagaagccagagctcagtactccctccatttgccacgcccctggaggagaatactttgtggaaggagaaacgtggaacattgactcctgtactcagtgcacctgccacagcggacgggtgctgtgtgagacagaggtgtgcccaccgctgctctgccagaacccctcacgcacccaggattcctgctgcccacagtgtacagatcaaccttttcggccttccttgtcccgcaataacagcgtacctaattactgcaaaaatgatgaaggggatatattcctggcagctgagtcctggaagcctgacgtttgtaccagctgcatctgcattgatagcgtaattagctgtttctctgagtcctgcccttctgtatcctgtgaaagacctgtcttgagaaaaggccagtgttgtccctactgcataggaggccaaacctgattttgtaccctctagtggtcaaggatatgggggaagaccccatcacaagagggcccacctgataagaaccctctggagactgctggcagagtcttcttaacaggacttggactgtgaccagataaaacatcttctataggtgcagaaactggccaatctggaaggtccaatggcttctacgttaaggttttcttaacaagatggtataccccgacttttacatggattgcttcttttaagtcctaaaagaagttgtatttcttcctccttatttgggccaccttgatctttagttgtttctgcctgccttttaaaatgacatttttatatttccaaaatgatttat

SEQ ID NO: 4860 - DNA, 153 bp, Homo sapiens
  source 1..153: mol_type = unassigned DNA; mol_type = unassigned DNA
gcggctgctgctacacgtgcgccagccagaggaacgagagctgcggcggcaccttcgggatttacggaacctgcgaccgggggctgcgttgtgtcatccgccccccgctcaatggcgactccctcaccgagtacgaagcgggcgtttgcgaag

SEQ ID NO: 4861 - DNA, 181 bp, Homo sapiens
  source 1..181: mol_type = unassigned DNA; mol_type = unassigned DNA
tgcccggggagcatcgtgcagggcgtctgcggctgctgctacacgtgcgccagccagaggaacgagagctgcggcggcaccttcgggatttacggaacctgcgaccgggggctgcgttgtgtcatccgccccccgctcaatggcgactccctcaccgagtacgaagcgggcgtttgcgaag

SEQ ID NO: 4862 - DNA, 698 bp, Homo sapiens
  source 1..698: mol_type = unassigned DNA; mol_type = unassigned DNA
gccgccggcccgggctggagccgagcgcagcagccaccgccgccgccgcgccagaagtttgggttgaaccggagctgccgggaggaaacttttttcttttttccccctccctcccgggaggaggaggaggaggaggaggggaagctgccgccggcgccaaggctcgtgggctcggggtcggcgcggcccgcagaaggggcgggggcctcgccccgcgaggggaggcgcgccccgggggccccgagaggggcggtgaggaccgcgggctgctggtgcggcggcggcggcgcgtgtgccccgcgcaggggagggcgcccgccccgctcccggcccggctgcgaggaggaggcggcggcggcgcaggaggatgtacttggtggcgggggacagggggttggccggctgcgggcacctcctggtctcgctgctggggctgctgctgctgctggcgcgctccggcacccgggcgctggtctgcctgccctgtgacgagtccaagtgcgaggagcccaggaactgcccggggagcatcgtgcagggcgtctgcggctgctgctacacgtgcgccagccagaggaacgagagctgcggcggcaccttcgggatttacggaacctgcgaccgggggctgcgttgtgtcatccgccccccgctcaatggcgactccctcaccgagtacgaagcgggcgtttgcgaag

SEQ ID NO: 4863 - DNA, 1724 bp, Homo sapiens
  source 1..1724: mol_type = unassigned DNA; mol_type = unassigned DNA
gcagcagatgtggatgtaatacagtgagcaggacccaaactcaaatgtttgctgaatgaatgaaggaaccagagtaagcaaagagggaaccagcaccggttaggccctggcgtgcccccaggacgcctgcagaagtgccacgggcatgacccggcccacctcgctacgcaccgcagcggagagaaggctcttccgagcggcacccagaggagccttcgcgggcatcgccgcaccttcaccggcagccccaccccaacccgggtccctcgggattctgcccgagcctacgccggcgcaagcgtgggcagcgaggaaccagctgagaggcaggatcaaagagcatgggagttgaagacaagggaaaactgggggacagaggcgaaaactcggatccgaaagggggtctgtccatcagggcacgccggaagagtggcgctgagctgacggcgagcgccggcgggtcggggcgccaaggctcagggctgcttcggcaattcgcgggggtagcttgcacctcgtgaggcgagacgccgagggcgtccagcggggcttacctaactctccctcccgcggaagggaagcggggaactactgcctcctaccatcaggtgaaaagaaacttggtactgttatcactccagatacatggaaagatggtgctaggaataccacagaaagtggtggaagaaagctgaatgaaaataaagctttgacttcaaaaaaagcaagatttgatccatatggaaagaataagttctccacttgtagaatttgtaaaagttctgtgcaccaaccaggttctcattactgccagggctgtgcctacaaaaaaggcatctgtgcgatgtgtggaaaaaaggttttggataccaaaaactacaagcaaacatctgtctagatgtattgatggaatttctggctttctaaatgattttactttctgccttgaattttcaaggcatagatgtcaacttacagaataacatgttttaagataattaagtttaaaccagagaatttgattgttactcattttgctctcatgttctaaacagcaacagtgtaactagtcttttgttgtaaatggttattttccttataagaattttaagaactaagtggcaaattccatgaaaatatttctcagttctgtatgcacttttatttaacattattcatataattctccccccaccactttatttatagatactgcaaaagtgagaaggagataatagatactttgctctgaatttggcatccagagttaacatttctcccctcactcccttgctggtgtcatagttattagaatcagcagcctcttaactaattgcggtttcataggatatataaatgtttcaagccattattgctgaatggttctttagttattaacctagacccaaatcaaagaccagttggatttatgatattttttatttgttcttgcagccaaagtgccagtttctttaatatgtgaccaagaacacaaggagcatccatatggccaaataaatacactgaattttagaaaaacatattactttgaattcaaattgtcatgaaaaccagaacagtgtttgtccatgttgcatgtaatgaaaataaatccctgctctgagaaaagctctttgaagcaaaaaccaaacttttttttttttttttttacctcctgtcttgccccctaaaagaaataaatagagcaaacatcttgactctcc

SEQ ID NO: 4864 - DNA, 1953 bp, Homo sapiens
  source 1..1953: mol_type = unassigned DNA; mol_type = unassigned DNA
gggagtatgggcttagaagccggaagtgggttgacgtagcccggaaggggaatacttccaagttgtagtgttgttgttttcagcctgctgctgctgctgctgttgcggctaggggaaccgtcgtggggaaggatggtgtgcgaaaaatgtgaaaagaaacttggtactgttatcactccagatacatggaaagatggtgctaggaataccacagaaagtggtggaagaaagctgaatgaaaataaagctttgacttcaaaaaaagcaagatttgatccatatggaaagaataagttctccacttgtagaatttgtaaaagttctgtgcaccaaccaggttctcattactgccagggctgtgcctacaaaaaaggcatctgtgcgatgtgtggaaaaaaggttttggataccaaaaactacaagcaaacatctgtctagatgtattgatggaatttctggctttctaaatgattttactttctgccttgaattttcaaggcatagatgtcaacttacagaataacatgttttaagataattaagtttaaaccagagaatttgattgttactcattttgctctcatgttctaaacagcaacagtgtaactagtcttttgttgtaaatggttattttccttataagaattttaagaactaagtggcaaattccatgaaaatatttctcagttctgtatgcacttttatttaacattattcatataattctccccccaccactttatttatagatactgcaaaagtgagaaggagataatagatactttgctctgaatttggcatccagagttaacatttctcccctcactcccttgctggtgtcatagttattagaatcagcagcctcttaactaattgcggtttcataggatatataaatgtttcaagccattattgctgaatggttctttagttattaacctagacccaaatcaaagaccagttggatttatgatattttttatttgttcttgcagccaaagtgccagtttctttaatatgtgaccaagaacacaaggagcatccatatggccaaataaatacactgaattttagaaaaacatattactttgaattcaaattgtcatgaaaaccagaacagtgtttgtccatgttgcatgtaatgaaaataaatccctgctctgagaaaagctctttgaagcaaaaaccaaacttttttttttttttttttacctcctgtcttgccccctaaaagaaataaatagagcaaacatcttgactctccctttttaaaatttgtttgttttttttttttttttttggatacaagagctcactctgttgcccagggtggagtgcagaggtatcatcaggctctctgcagcctccatctgctgggctcaagcaattcttccccctcagcctcctaagtagctggggactacaggcgtgtgccactgtgctcagctagtttttatttttagtagagatgaggactcactatgttgcccaagctgttctcgaacttctgatctcaagcaatcctctggcctcagccttccgaagtgctgggatacaggtgtgagccacagaacttggcctctctcttttttttttttttttttttttttttttaacactacaggtttcaaatgaatacttttcttatgttgccttcagaggttcaggacttctgcttttaaaacctgcagcctaccgtgggaaaccaaaaaagcattccctatttccaactgcagtatgtataaatacatatcactacaaaatgtatagaaagtgtgatgagatacatgaatggcatttttattggtcataacattttgatgaaaagcatttaaagttttaactttataaggcttttcaaaatgtgtttttctgagatacattgttatttattcatatccagaaaaattacaaggataatacagaatataataaataatttatctgagagca

SEQ ID NO: 4865 - DNA, 4287 bp, Homo sapiens
  source 1..4287: mol_type = unassigned DNA; mol_type = unassigned DNA
ggcgcctggttctgcgcgtactggctgtacggagcaggagcaagaggtcgccgccagcctccgccgccgagcctcgttcgtgtccccgcccctcgctcctgcagctactgctcagaaacgctggggcgcccaccctggcagactaacgaagcagctcccttcccaccccaactgcaggtctaattttggacgctttgcctgccatttcttccaggttgagggagccgcagaggcggaggctcgcgtattcctgcagtcagcacccacgtcgcccccggacgctcggtgctcaggcccttcgcgagcggggctctccgtctgcggtcccttgtgaaggctctgggcggctgcagaggccggccgtccggtttggctcacctctcccaggaaacttcacactggagagccaaaaggagtggaagagcctgtcttggagattttcctggggaaatcctgaggtcattcattatgaagtgtaccgcgcgggagtggctcagagtaaccacagtgctgttcatggctagagcaattccagccatggtggttcccaatgccactttattggagaaacttttggaaaaatacatggatgaggatggtgagtggtggatagccaaacaacgagggaaaagggccatcacagacaatgacatgcagagtattttggaccttcataataaattacgaagtcaggtgtatccaacagcctctaatatggagtatatgacatgggatgtagagctggaaagatctgcagaatcctgggctgaaagttgcttgtgggaacatggacctgcaagcttgcttccatcaattggacagaatttgggagcacactggggaagatataggcccccgacgtttcatgtacaatcgtggtatgatgaagtgaaagactttagctacccatatgaacatgaatgcaacccatattgtccattcaggtgttctggccctgtatgtacacattatacacaggtcgtgtgggcaactagtaacagaatcggttgtgccattaatttgtgtcataacatgaacatctgggggcagatatggcccaaagctgtctacctggtgtgcaattactccccaaagggaaactggtggggccatgccccttacaaacatgggcggccctgttctgcttgcccacctagttttggagggggctgtagagaaaatctgtgctacaaagaagggtcagacaggtattatccccctcgagaagaggaaacaaatgaaatagaacgacagcagtcacaagtccatgacacccatgtccggacaagatcagatgatagtagcagaaatgaagtcataagcgcacagcaaatgtcccaaattgtttcttgtgaagtaagattaagagatcagtgcaaaggaacaacctgcaataggtacgaatgtcctgctggctgtttggatagtaaagctaaagttattggcagtgtacattatgaaatgcaatccagcatctgtagagctgcaattcattatggtataatagacaatgatggtggctgggtagatatcactagacaaggaagaaagcattatttcatcaagtccaatagaaatggtattcaaacaattggcaaatatcagtctgctaattccttcacagtctctaaagtaacagttcaggctgtgacttgtgaaacaactgtggaacagctctgtccatttcataagcctgcttcacattgcccaagagtatactgtcctcgtaactgtatgcaagcaaatccacattatgctcgtgtaattggaactcgagtttattctgatctgtccagtatctgcagagcagcagtacatgctggagtggttcgaaatcacggtggttatgttgatgtaatgcctgtggacaaaagaaagacctacattgcttcttttcagaatggaatcttctcagaaagtttacagaatcctccaggaggaaaggcattcagagtgtttgctgttgtgtgaaactgaatacttggaagaggaccataaagactattccaaatgcaatatttctgaattttgtataaaactgtaacattactgtacagagtacatcaactattttcagcccaaaaaggtgccaaatgcatataaatcttgataaacaaagtctataaaataaaacatgggacattagctttgggaaaagtaatgaaaatataatggttttagaaatcctgtgttaaatattgctatattttcttagcagttatttctacagttaattacatagtcatgattgttctacgtttcatatattatatggtgctttgtatatgccactaataaaatgaatctaaacattgaatgtgaatggccctcagaaaatcatctagtgcatttaaaaataatcgactctaaaactgaaagaaaccttatcacattttccccagttcaatgctatgccattaccaactccaaataatctcaaataattttccacttaataactgtaaagtttttttctgttaatttaggcatatagaatattaaattctgatattgcacttcttattttatataaaataatcctttaatatccaaatgaatctgttaaaatgtttgattccttgggaatggccttaaaaataaatgtaataaagtcagagtggtggtatgaaaacattcctagtgatcatgtagtaaatgtagggttaagcatggacagccagagctttctatgtactgttaaaattgaggtcacatattttcttttgtatcctggcaaatactcctgcaggccaggaagtataatagcaaaaagttgaacaaagatgaactaatgtattacattaccattgccactgatttttttttaaatggtaaatgaccttgtatataaatattgccatatcatggtacctataatggtgatatatttgtttctatgaaaaatgtattgtgctttgatactaaaaatctgtaaaatgttagttttggtaattttttttctgctggtggatttacatattaaattttttctgctggtggataaacattaaaattaatcatgtttcaaagttttattttcagttccttttgcatgcctattttgatttagaaatcactttaagataaatgaacaaaattattgtaagtcttctaaacttggtttattgacgttagtataaataacatacaataccagatgtctacaaaatcgacctgattatttaggtatttgtatgtgaaagagaaacacatatttagaaacacagcaagggagattttgaataaagagagagatgaatttataaagtaggaaaaaaagaatctgaaagatacaaagtgattataaaagaattgacaggacaataaatacttcaaatacttttaggaagtaaatgagtaggagtttaggagggataaacgagataaattccatgcaatgatcaaggaaagcaagagagcagataatacaaaagaaaaagaagaaggttcacataaatagcttctggagtgcaaattataaagacatcaacatttttgatcatataataagtactggcttacagctaagtggttccaaatactggtaattaaaacaatgatgtatacgttaaagattgcaaaacttaaaagcagatttttatgggaacttttttcgaaaggatacatgaccaccttcttaaatagtatgactttacatagactctttttctggtccttactgctcctcccacaacagggaagcccgatcagttctgtcagtataaggttttcttctatttgcccttagtttagatctccatcatcaattccacttactattgtaataccttcagctggagcctgtgtctttctccattcctttttaatacattcgtatttcccagccccagaacccttgaaattaactcttccatgagttttcattgctgaagaaaaaccaaacattcttgtaaaaacatttaagaacttccatagtcttgttcatattgtttacctatcttctacacaaggcgtgtccttgggtaagttatttaacttcaatttaccttacctgtaaaatggaacaaataatatctccttaagattgctctacgaattaattgacacattatgtgtgatgtacttaaaggaataataaatgcataatatgaggtcagtggacgccattttctgttataatcatttttgttatctaatttggggaaactattcatctgtcatatactattgatcctttggcacttaaataaatgtgaaatcctccaggaattttcctgtgattctccttgtaagaattaaatgctctctaatatgatatccctttaa

SEQ ID NO: 4866 - DNA, 629 bp, Homo sapiens
  source 1..629: mol_type = unassigned DNA; mol_type = unassigned DNA
gcccctcgctcctgcagctactgctcagaaacgctggggcgcccaccctggcagactaacgaagcagctcccttcccaccccaactgcaggtctaattttggacgctttgcctgccatttcttccaggttgagggagccgcagaggcggaggctcgcgtattcctgcagtcagcacccacgtcgcccccggacgctcggtgctcaggcccttcgcgagcggggctctccgtctgcggtcccttgtgaaggctctgggcggctgcagaggccggccgtccggtttggctcacctctcccaggaaacttcacactggagagccaaaaggagtggaagagcctgtcttggagattttcctggggaaatcctgaggtcattcattatgaagtgtaccgcgcgggagtggctcagagtaaccacagtgctgttcatggctagagcaattccagccatggtggttcccaatgccactttattggagaaacttttggaaaaatacatggatgaggatgacatgggatgtagagctggaaagatctgcagaatcctgggctgaaagttgcttgtgggaacatggacctgcaagcttgcttccatcaattggacagaatttgggagcacactggggaa

SEQ ID NO: 4867 - DNA, 553 bp, Homo sapiens
  source 1..553: mol_type = unassigned DNA; mol_type = unassigned DNA
agaaacgctggggcgcccaccctggcagactaacgaagcagctcccttcccaccccaactgcaggtctaattttggacgctttgcctgccatttcttccaggttgagggagccgcagaggcggaggccggccgtccggtttggctcacctctcccaggaaacttcacactggagagccaaaaggagtggaagagcctgtcttggagattttcctggggaaatcctgaggtcattcattatgaagtgtaccgcgcgggagtggctcagagtaaccacagtgctgttcatggctagagcaattccagccatggtggttcccaatgccactttattggagaaacttttggaaaaatacatggatgaggatggtgagtggtggatagccaaacaacgagggaaaagggccatcacagacaatgacatgcagagtattttggaccttcataataaattacgaagtcaggtgtatccaacagcctctaatatggagtatatgacatgggatgtagagctggaaagatctgcagaatcctgggctgaaagttgcttgtgg

SEQ ID NO: 4868 - DNA, 2100 bp, Homo sapiens
  source 1..2100: mol_type = unassigned DNA; mol_type = unassigned DNA
agaacgctggacaatccagtaaaggtgctgctggtaataaaacatgaaactatatcttatgcttggtcaagacgtgtcaaatctgtatctgaaatagtgaatgaatgagatcagatgttgtccagagaaggaaaatcaaatgataaaagtgttgagagaggggcagctcttgaaggaagatggaataagaacatggaaactcctgtgtggaaagaaaaggccaagaggtctgctaaatcaagagtactgtgaataaacatgggatgtagagctggaaagatctgcagaatcctgggctgaaagttgcttgtgggaacatggacctgcaagcttgcttccatcaattggacagaatttgggagcacactggggaagatataggcccccgacgtttcatgtacaatcgtggtatgatgaagtgaaagactttagctacccatatgaacatgaatgcaacccatattgtccattcaggtgttctggccctgtatgtacacattatacacaggtcgtgtgggcaactagtaacagaatcggttgtgccattaatttgtgtcataacatgaacatctgggggcagatatggcccaaagctgtctacctggtgtgcaattactccccaaagggaaactggtggggccatgccccttacaaacatgggcggccctgttctgcttgcccacctagttttggagggggctgtagagaaaatctgtgctacaaagaagggtcagacaggtattatccccctcgagaagaggaaacaaatgaaatagaacgacagcagtcacaagtccatgacacccatgtccggacaagatcagatgatagtagcagaaatgaagtcataagcgcacagcaaatgtcccaaattgtttcttgtgaagtaagattaagagatcagtgcaaaggaacaacctgcaataggtacgaatgtcctgctggctgtttggatagtaaagctaaagttattggcagtgtacattatgaaatgcaatccagcatctgtagagctgcaattcattatggtataatagacaatgatggtggctgggtagatatcactagacaaggaagaaagcattatttcatcaagtccaatagaaatggtattcaaacaattggcaaatatcagtctgctaattccttcacagtctctaaagtaacagttcaggctgtgacttgtgaaacaactgtggaacagctctgtccatttcataagcctgcttcacattgcccaagagtatactgtcctcgtaactgtatgcaagcaaatccacattatgctcgtgtaattggaactcgagtttattctgatctgtccagtatctgcagagcagcagtacatgctggagtggttcgaaatcacggtggttatgttgatgtaatgcctgtggacaaaagaaagacctacattgcttcttttcagaatggaatcttctcagaaagtttacagaatcctccaggaggaaaggcattcagagtgtttgctgttgtgtgaaactgaatacttggaagaggaccataaagactattccaaatgcaatatttctgaattttgtataaaactgtaacattactgtacagagtacatcaactattttcagcccaaaaaggtgccaaatgcatataaatcttgataaacaaagtctataaaataaaacatgggacattagctttgggaaaagtaatgaaaatataatggttttagaaatcctgtgttaaatattgctatattttcttagcagttatttctacagttaattacatagtcatgattgttctacgtttcatatattatatggtgctttgtatatgccactaataaaatgaatctaaacattgaatgtgaatggccctcagaaaatcatctagtgcatttaaaaataatcgactctaaaactgaaagaaaccttatcacattttccccagttcaatgctatgccattaccaactccaaataatctcaaataattttccacttaataactgtaaagtttttttctgttaatttaggcatatagaatattaaattctgatattgcacttcttattttatataaaataatcctttaatatccaaatgaatctgttaaaatg

SEQ ID NO: 4869 - DNA, 1964 bp, Homo sapiens
  source 1..1964: mol_type = unassigned DNA; mol_type = unassigned DNA
aaaggtgctgctggtaataaaacatgaaactatatcttatgcttggtcaagacgtgtcaaatctgtatctgaaatagtgaatgaatgagatcagatgttgtccagagaaggaaaatcaaatgataaaagtgttgagagaggggcagctcttgaaggaagatggaataagaacatggaaactcctgtgtggaaagaaaaggccaagaggtctgctaaatcaagagtactgtgaataaacatgggatgtagagctggaaagatctgcagaatcctgggctgaaagttgcttgtgggaacatggacctgcaagcttgcttccatcaattggacagaatttgggagcacactggggaagatataggcccccgacgtttcatgtacaatcgtggtatgatgaagtgaaagactttagctacccatatgaacatgaatgcaacccatattgtccattcaggtgttctggccctgtatgtacacattatacacaggggaaactggtggggccatgccccttacaaacatgggcggccctgttctgcttgcccacctagttttggagggggctgtagagaaaatctgtgctacaaagaagggtcagacaggtattatccccctcgagaagaggaaacaaatgaaatagaacgacagcagtcacaagtccatgacacccatgtccggacaagatcagatgatagtagcagaaatgaagtcataagcgcacagcaaatgtcccaaattgtttcttgtgaagtaagattaagagatcagtgcaaaggaacaacctgcaataggtacgaatgtcctgctggctgtttggatagtaaagctaaagttattggcagtgtacattatgaaatgcaatccagcatctgtagagctgcaattcattatggtataatagacaatgatggtggctgggtagatatcactagacaaggaagaaagcattatttcatcaagtccaatagaaatggtattcaaacaattggcaaatatcagtctgctaattccttcacagtctctaaagtaacagttcaggctgtgacttgtgaaacaactgtggaacagctctgtccatttcataagcctgcttcacattgcccaagagtatactgtcctcgtaactgtatgcaagcaaatccacattatgctcgtgtaattggaactcgagtttattctgatctgtccagtatctgcagagcagcagtacatgctggagtggttcgaaatcacggtggttatgttgatgtaatgcctgtggacaaaagaaagacctacattgcttcttttcagaatggaatcttctcagaaagtttacagaatcctccaggaggaaaggcattcagagtgtttgctgttgtgtgaaactgaatacttggaagaggaccataaagactattccaaatgcaatatttctgaattttgtataaaactgtaacattactgtacagagtacatcaactattttcagcccaaaaaggtgccaaatgcatataaatcttgataaacaaagtctataaaataaaacatgggacattagctttgggaaaagtaatgaaaatataatggttttagaaatcctgtgttaaatattgctatattttcttagcagttatttctacagttaattacatagtcatgattgttctacgtttcatatattatatggtgctttgtatatgccactaataaaatgaatctaaacattgaatgtgaatggccctcagaaaatcatctagtgcatttaaaaataatcgactctaaaactgaaagaaaccttatcacattttccccagttcaatgctatgccattaccaactccaaataatctcaaataattttccacttaataactgtaaagtttttttctgttaatttaggcatatagaatattaaattctgatattgcacttcttattttatataaaataatcctttaatatccaaatgaatctgttaaaatg

SEQ ID NO: 4870 - DNA, 4586 bp, Homo sapiens
  source 1..4586: mol_type = unassigned DNA; mol_type = unassigned DNA
cactcgcatcccagggcgtctccggctgctcctattgagctgtctgctcgctgtgcccgctgtgcctgctgtgcccgcgctgtcgccgctgctaccgcgtctgctggacgcgggagacgccagcgagctggtgattggagccctgcggagagctcaagcgcccagctctgcccgaggagcccaggctgccccgtgagtcccatagttgctgcaggagtggagccatgagctgcgtcctgggtggtgtcatccccttggggctgctgttcctggtctgcggatcccaaggctacctcctgcccaacgtcactctcttagaggagctgctcagcaaataccagcacaacgagtctcactcccgggtccgcagagccatccccagggaggacaaggaggagatcctcatgctgcacaacaagcttcggggccaggtgcagcctcaggcctccaacatggagtacatgacctgggatgacgaactggagaagtctgctgcagcgtgggccagtcagtgcatctgggagcacgggcccaccagtctgctggtgtccatcgggcagaacctgggcgctcactggggcaggtatcgctctccggggttccatgtgcagtcctggtatgacgaggtgaaggactacacctacccctacccgagcgagtgcaacccctggtgtccagagaggtgctcggggcccatgtgcacgcactacacacagatagtttgggccaccaccaacaagatcggttgtgctgtgaacacctgccggaagatgactgtctggggagaagtttgggagaacgcggtctactttgtctgcaattattctccaaaggggaactggattggagaagccccctacaagaatggccggccctgctctgagtgcccacccagctatggaggcagctgcaggaacaacttgtgttaccgagaagaaacctacactccaaaacctgaaacggacgagatgaatgaggtggaaacggctcccattcctgaagaaaaccatgtttggctccaaccgagggtgatgagacccaccaagcccaagaaaacctctgcggtcaactacatgacccaagtcgtcagatgtgacaccaagatgaaggacaggtgcaaagggtccacgtgtaacaggtaccagtgcccagcaggctgcctgaaccacaaggcgaagatctttggaactctgttctatgaaagctcgtctagcatatgccgcgccgccatccactacgggatcctggatgacaagggaggcctggtggatatcaccaggaacgggaaggtccccttcttcgtgaagtctgagagacacggcgtgcagtccctcagcaaatacaaaccttccagctcattcatggtgtcaaaagtgaaagtgcaggatttggactgctacacgaccgttgctcagctgtgcccgtttgaaaagccagcaactcactgcccaagaatccattgtccggcacactgcaaagacgaaccttcctactgggctccggtgtttggaaccaacatctatgcagatacctcaagcatctgcaagacagccgtgcacgcgggagtcatcagcaacgagagtgggggtgacgtggacgtgatgcccgtggataaaaagaagacctacgtgggctcgctcaggaatggagttcagtctgaaagcctggggactcctcgggatggaaaggccttccggatctttgctgtcaggcagtgaatttccagcaccaggggagaaggggcgtcttcaggagggcttcggggttttgcttttatttttattttgtcattgcggggtatatggagagtcaggaaacttcctttgactgatgttcagtgtccatcactttgtggcctgtgggtgaggtgacatctcatcccctcactgaagcaacagcatcccaaggtgctcagccggactccctggtgcctgatcctgctggggcctgggggtctccatctggacgtcctctctcctttagagatctgagctgtctcttaaaggggacagttgcccaaaatgttccttgctatgtgttcttctgttggtggaggaagttgatttcaacctccctgccaaaagaacaaaccatttgaagctcacaattgtgaagcattcacggcgtcggaagaggccttttgagcaagcgccaatgagtttcaggaatgaagtagaaggtagttatttaaaaataaaaaacacagtccgtccctaccaatagaggaaaatggttttaatgtttgctggtcagacagacaaatgggctagagtaagagggctgcgggtatgagagaccccggctccgccctggcacgtgtccttgctggcggcccgccacaggcccccttcaatggccgcattcaggatggctctatacacagcagtgctggtttatgtagagttcagcagtcacttcagagatgtatcttgtctttgtcaggcccttcgtcttcatggcccacctgttttctgccgtgacctttggtcccattgaggactaaggatcgggaccctttctttaccccctacccgttgtggctcccaccctgcctcggactggtttacgtgtcctggttcacacccaggacttttctttgcaagcgaacctgtttgaagcccaagtcttaactcctggtctcgtaaggttccactgagacgagatgtctgagaacaaccaaagaaggcctgctctttgctgcttttaaaaaatgacaattaaatgtgcagattccccacgcacccgatgacctattttttcagccgtgggaggaatggagtctttggtacattcctcaccgaggttagcagctcagtttgtggttatgaaaccgtctgtggcctcatgacagcgagagatgggaatacactagaaggatctcttttcctgttttcgtgaaacgactcttgccaaacgttcccgaggcgccaaggagtgtagtacaccctggctgccatcactctataaaagtgcttcatgagcccagaccaaaagcccacagtgaaatgaagtacccttttgtaaatagcatttttttgcagaaggtgaaaattccactctctaccaccgggccagccaatagatcactttggtgaatgctagtttcaaatttgattcaaaatatttcttaggtgaaagaactagcagaaagtcaaaaactaagatactgtagactggacaagaaattctacctgggcacctaggtgatgccttctttctttgattgcctttctaataaatgcagaatctgaaggtaaataggtttaaaacaaaacaaaaacccacccctttaaggagttggtaaaaagcagttcaactcttagcttgactgagctaaaattcacaggactacgtgctttgtgcattgtagtctagtcgtaattcataggtactgactcctcagccccaaatgtcggagaggaagaattcggtcagcctgtcaggtcgtgagtccagttaccaccaaacatctgggaaacttctgggtgctgggtgctctgctgctggacttttgtggctgtgtctgtgtctgcaagataaattagatcgccctgtggggtttgcagaattagtgaagggtccaggacgatcccagtgggctcgcttccaaagcatcccactcaagggagacttgaaacttccagtgtgagttgaccccatcatttaaaaataaagtccccgggttccttaatgcctccttcactgggccttcctagcaggatagaaagtccttgcccagagcaggacctggctgtctttttttttttttttttttttttcccgagaccaagtttcactctgttgcccaaggtagagtgcagtggcgtgatctctgctcattgcaactgccgcctcccgggttcaagcaattctcatgcatcagcctcccaagtacctgggactacaggcgtgagctaccatgcccggctaatttttgtatttttagtagagatggggtttcattatgttggccaggctggtctcgaactccttacctcaggtgatccacccaccttggcctcccgaagtgctgggattacaggcatgagccactgcgcccggccatggacctggctgtctttatcatccccacaaacattttgaaactggaatatttgtcttcagaaaatggaaacaagactataaatgataagccctgtccctagcaccacctctcctgtgtgtggaatagaggcccctcgtgctaccaacacttaccctgtgtttaaaaagatcttgtaccaagccaacggcgttcctggctctcctgcccacaggatgaacattttcggcttccttaggagttttgccctaccgtattccaaagcgtgtgctggtttctcatattgtctgtaggctcactcagcccgcagtttatgtgtgtgcttttttctatgaaaaatgatgtattttgctacttcctgtgtacaaagttttattgtaaatgttttttgtgctttgcatgaacaggggccacgttgttgcaattgtttcagtagaactggtttgatttctaaaatgttcctgtaacatatcttttatgaacaaatctgaacaatttgtgaaataaaacattgaaaaccatc

SEQ ID NO: 4871 - DNA, 538 bp, Homo sapiens
  source 1..538: mol_type = unassigned DNA; mol_type = unassigned DNA
actcgcatcccagggcgtctccggctgctcctattgagctgtctgctcgctgtgcccgctgtgcctgctgtgcccgcgctgtcgccgctgctaccgcgtctgctggacgcgggagacgccagcgagctggtgattggagccctgcggagattgggtcttatccccaagatatctcattatgtacatgcaaatcagcggagcatcgtcatgacaccaggaggacaccccgtgacgccgattaccgcactctcaacctcaacccagcgtcagagttttctggcatctcttctttgagcctggccgcctgcagctggaaatgctcatatatggtggtgtgactaacctgagagagagagatcagggatcctgagaagttctgcattcttggtctgcttcccagtgggacgaagctcaagcgcccagctctgcccgaggagcccaggctgccccgtgagtcccatagttgctgcaggagtggagccatgagctgcgtcctgggtggtgtcatccccttggggctgctgttcctggtctgcgg

SEQ ID NO: 4872 - DNA, 2178 bp, Homo sapiens
  source 1..2178: mol_type = unassigned DNA; mol_type = unassigned DNA
atcccagggcgtctccggctgctcctattgagctgtctgctcgctgtgcccgctgtgcctgctgtgcccgcgctgtcgccgctgctaccgcgtctgctggacgcgggagacgccagcgagctggtgattggagccctgcggagagctcaagcgcccagctctgcccgaggagcccaggctgccccgtgagtcccatagttgctgcaggagtggagccatgagctgcgtcctgggtggtgtcatccccttggggctgctgttcctggtctgcggatcccaaggctacctcctgcccaacgtcactctcttagaggagctgctcagcaaataccagcacaacgagtctcactcccgggtccgcagagccatccccagggaggacaaggaggagatcctcatgctgcacaacaagcttcggggccaggtgcagcctcaggcctccaacatggagtacatgacctgggatgacgaactggagaagtctgctgcagcgtgggccagtcagtgcatctgggagcacgggcccaccagtctgctggtgtccatcgggcagaacctgggcgctcactggggcaggtatcgctctccggggttccatgtgcagtcctggtatgacgaggtgaaggactacacctacccctacccgagcgagtgcaacccctggtgtccagagaggtgctcggggcccatgtgcacgcactacacacagatagtttgggccaccaccaacaagatcggttgtgctgtgaacacctgccggaagatgactgtctggggagaagtttgggagaacgcggtctactttgtctgcaattattctccaaaggggaactggattggagaagccccctacaagaatggccggccctgctctgagtgcccacccagctatggaggcagctgcaggaacaacttgtgttaccgagaaacctacactccaaaacctgaaacggacgagatgaatgaggtggaaacggctcccattcctgaagaaaaccatgtttggctccaaccgagggtgatgagacccaccaagcccaagaaaacctctgcggtcaactacatgacccaagtcgtcagatgtgacaccaagatgaaggacaggtgcaaagggtccacgtgtaacaggtaccagtgcccagcaggctgcctgaaccacaaggcgaagatctttggaactctgttctatgaaagctcgtctagcatatgccgcgccgccatccactacgggatcctggatgacaagggaggcctggtggatatcaccaggaacgggaaggtccccttcttcgtgaagtctgagagacacggcgtgcagtccctcagcaaatacaaaccttccagctcattcatggtgtcaaaagtgaaagtgcaggatttggactgctacacgaccgttgctcagctgtgcccgtttgaaaagccagcaactcactgcccaagaatccattgtccggcacactgcaaagacgaaccttcctactgggctccggtgtttggaaccaacatctatgcagatacctcaagcatctgcaagacagccgtgcacgcgggagtcatcagcaacgagagtgggggtgacgtggacgtgatgcccgtggataaaaagaagacctacgtgggctcgctcaggaatggagttcagtctgaaagcctggggactcctcgggatggaaaggccttccggatctttgctgtcaggcagtgaatttccagcaccaggggagaaggggcgtcttcaggagggcttcggggttttgcttttatttttattttgtcattgcggggtatatggagagtcaggaaacttcctttgactgatgttcagtgtccatcactttgtggcctgtgggtgaggtgacatctcatcccctcactgaagcaacagcatcccaaggtgctcagccggactccctggtgcctgatcctgctggggcctgggggtctccatctggacgtcctctctcctttagagatctgagctgtctcttaaaggggacagttgcccaaaatgttccttgctatgtgttcttctgttggtggaggaagttgatttcaacctccctgccaaaagaacaaaccatttgaagctcacaattgtgaagcattcacggcgtcggaagaggccttttgagcaagcgccaatgagtttcaggaatgaagtagaaggtagttatt

SEQ ID NO: 4873 - DNA, 1083 bp, Homo sapiens
  source 1..1083: mol_type = unassigned DNA; mol_type = unassigned DNA
tcccagggcgtctccggctgctcctattgagctgtctgctcgctgtgcccgctgtgcctgctgtgcccgcgctgtcgccgctgctaccgcgtctgctggacgcgggagacgccagcgagctggtgattggagccctgcggagagctcaagcgcccagctctgcccgaggagcccaggctgccccgtgagtcccatagttgctgcaggagtggagccatgagctgcgtcctgggtggtgtcatccccttggggctgctgttcctggtctgcggatcccaaggctacctcctgcccaacgtcactctcttagaggagctgctcagcaaataccagcacaacgagtctcactcccgggtccgcagagccatccccagggaggacaaggaggagatcctcatgctgcacaacaagcttcggggccaggtgcagcctcaggcctccaacatggagtacatgacctgggatgacgaactggagaagtctgctgcagcgtgggccagtcagtgcatctgggagcacgggcccaccagtctgctggtgtccatcgggcagaacctgggcgctcactggggcaggtatcgctctccggggttccatgtgcagtcctggtatgacgaggtgaaggactacacctacccctacccgagcgagtgcaacccctggtgtccagagaggtgctcggggcccatgtgcacgcactacacacagatagtttgggccaccaccaacaagatcggttgtgctgtgaacacctgccggaagatgactgtctggggagaagtttgggagaacgcggtctactttgtctgcaattattctccaaaggggaactggattggagaagccccctacaagaatggccggccctgctctgagtgcccacccagctatggaggcagctgcaggaacaacttgtgttaccgagtcttggtgtgacccccgcctccagggagccttcctggacttcacagccagacagtgcacctgccccatgttcatcaacccccagactccttgggaaccttgatcgtcctgtcgtctcagctgccagctcactccagggcctccggaggcacatggcag

SEQ ID NO: 4874 - DNA, 1739 bp, Homo sapiens
  source 1..1739: mol_type = unassigned DNA; mol_type = unassigned DNA
gggcgtctccggctgctcctattgagctgtctgctcgctgtgcccgctgtgcctgctgtgcccgcgctgtcgccgctgctaccgcgtctgctggacgcgggagacgccagcgagctggtgattggagccctgcggagagctcaagcgcccagctctgcccgaggagcccaggctgccccgtgagtcccatagttgctgcaggagtggagccatgagctgcgtcctgggtggtgtcatccccttggggctgctgttcctggtctgcggatcccaaggctacctcctgcccaacgtcactctcttagaggagctgctcagcaaataccagcacaacgagtctcactcccgggtccgcagagccatccccagggaggacaaggaggagatcctcatgctgcacaacaagcttcggggccaggtgcagcctcaggcctccaacatggagtacatggtgagcgccggctccggccgcagaggctggcaccgggggtggggcctgggccaccagcctgctctgttccccagccagctctgttccccagccagtgcgtgtgatggctggctcagggtctcctctggcaggggaggatcccggctctgttctgttttgtttgtttgttttgagacagggtctcactctgccactgacgctggagtgcaatggcacaatcgtcatgccctgaaaccttagactcccggggttaagcgatcctgcttcagcctcccaagtagctggaactacaggcatgcaccatggtgcccagctagattttaaatattttgtggagatgggggtcttgctacgttgcccaggctggtcttgaactcctaggctcaagcaatcctcctgcctcagcctctcaaagtgctaggattataggcatgagtcaccctgtctggctctggctctgttcttaacattctgccaaaacaacacacgtgggttccctgtgcagagcctgcctcgttgccttcatgtcactcttggtagctccactgggaacacagctctcagcctttcccacctggaggcagagtggggaggggcccagggctgggctttgctgatgctgatctcagctgtgccacacgctagctgcaccaccctgacttctccttagcccgtgtgagcctcactttccacttggagagtccttcctcgcgtggttgccatgactgtgagataagtcgaggctgtgaagggcccggcacagactgaccctgcctccccaacccctaggctttgctaaccgggaaaggagctaacggtgacagaagacagccaaggtcaaccctcccgggtgattgtgatgggtgttccaggtgtggttgggcgatgctgctacttgaccccaagctccagtgtggaaacttccttcctggctggttttccagaactacagaggaatggaccacagtcttccagggtccctcctcgtccaccaaccgggagcctccaccttggccatccgtcagctatgaatggctttttaaacaaacccacgtcccagcctgggtaacatggtaaagccccgtctctacaaaaaaatccaagttagccgggcatggtggtgcgcacctgtagtcccagctgcagtgggactgaggtggaggtggaggtggggggtgggagctgaggaaggaggatcgcttgagcctgggaagtcaaggctgcagtgagctgagattgcaccactgcactccagcctgggtgacagagcaagaccctgtctcaaaaa

SEQ ID NO: 4875 - DNA, 1651 bp, Homo sapiens
  source 1..1651: mol_type = unassigned DNA; mol_type = unassigned DNA
ctccggctgctcctattgagctgtctgctcgctgtgcccgctgtgcctgctgtgcccgcgctgtcgccgctgctaccgcgtctgctggacgcgggagacgccagcgagctggtgattggagccctgcggagagctcaagcgcccagctctgcccgaggagcccaggctgccccgtgagtcccatagttgctgcaggagtggagccatgagctgcgtcctgggtggtgtcatccccttggggctgctgttcctggtctgcggatcccaaggctacctcctgcccaacgtcactctcttagaggagctgctcagcaaataccagcacaacgagtctcactcccgggtccgcagagccatccccagggaggacaaggaggagatcctcatgctgcacaacaagcttcggggccaggtgcagcctcaggcctccaacatggagtacatgacctgggatgacgaactggagaagtctgctgcagcgtgggccagtcagtgcatctgggagcacgggcccaccagtctgctggtgtccatcgggcagaacctgggcgctcactggggcaggtatcgctctccggggttccatgtgcagtcctggtatgacgaggtgaaggactacacctacccctacccgagcgagtgcaacccctggtgtccagagaggtgctcggggcccatgtgcacgcactacacacagatagtttgggccaccaccaacaagatcggttgtgctgtgaacacctgccggaagatgactgtctggggagaagtttgggagaacgcggtctactttgtctgcaattattctccaaaggggaactggattggagaagccccctacaagaatggccggccctgctctgagtgcccacccagctatggaggcagctgcaggaacaacttgtgttaccgagaagaaacctacactccaaaacctgaaacggacgagatgaatgaggtggaaacggctcccattcctgaagaaaaccatgtttggctccaaccgagggtgatgagacccaccaagcccaagaaaacctctgcggtcaactacatgacccaagtcgtcagatgtgacaccaagatgaaggacaggtgcaaagggtccacgtgtaacaggtaccagtgcccagcaggctgcctgaaccacaaggcgaagatctttggaactctgttctatgaaagctcgtctagcatatgccgcgccgccatccactacgggatcctggatgacaagggaggcctggtggatatcaccaggaacgggaaggtccccttcttcgtgaagtctgagagacacggcgtgcagtccctcagcaaatacaaaccttccagctcattcatggtgtcaaaagtgaaagtgcaggatttggactgctacacgaccgttgctcagctgtgcccgtttgaaaagccagcaactcactgcccaagaatccattgtccggcacactgcaaagacgaaccttcctactgggctccggtgtttggaaccaacatctatgcagatgtgagtaggatgcattttcaacaactatctcgcaaagcctgttaaagacctcaacatgcaagctccaagatctggatacttgaaactttattccagtgcctcttagctaaattaattaattaattaattaattaatttcga

SEQ ID NO: 4876 - DNA, 808 bp, Homo sapiens
  source 1..808: mol_type = unassigned DNA; mol_type = unassigned DNA
ccggctgctcctattgagctgtctgctcgctgtgcccgctgtgcctgctgtgcccgcgctgtcgccgctgctaccgcgtctgctggacgcgggagacgccagcgagctggtgattggagccctgcggagagctcaagcgcccagctctgcccgaggagcccaggctgccccgtgagtcccatagttgctgcaggagtggagccatgagctgcgtcctgggtggtgtcatccccttggggctgctgttcctggtctgcggatcccaaggctacctcctgcccaacgtcactctcttagaggagctgctcagcaaataccagcacaacgagtctcactcccgggtccgcagagccatccccagggaggacaaggaggagatcctcatgctgcacaacaagcttcggggccaggtgcagcctcaggcctccaacatggagtacatgacctgggatgacgaactggagaagtctgctgcagcgtgggccagtcagtgcatctgggagcacgggcccaccagtctgctggtgtccatcgggcagaacctgggcgctcactggggcaggtaagagccacaagttcctctccggctgccgcaggaccccactgccgtgtgccgggctcagcacttgtgccccttatcaagtttagcctgcaaagagagtgagagagaccacccgtcccatcgatattctgggaaactgaggcttggcatccaggaacactcctgagtgactgacaaaatgtattcaagcttggttggctgaccccagacactgatgattgattaaagtttgtagtttgggttttc

SEQ ID NO: 4877 - DNA, 1689 bp, Homo sapiens
  source 1..1689: mol_type = unassigned DNA; mol_type = unassigned DNA
attgagctgtctgctcgctgtgcccgctgtgcctgctgtgcccgcgctgtcgccgctgctaccgcgtctgctggacgcgggagacgccagcgagctggtgattggagccctgcggagagctcaagcgcccagctctgcccgaggagcccaggctgccccgtgagtcccatagttgctgcaggagtggagccatgagctgcgtcctgggtggtgtcatccccttggggctgctgttcctggtctgcggatcccaaggctacctcctgcccaacgtcactctcttagaggagctgctcagcaaataccagcacaacgagtctcactcccgggtccgcagagccatccccagggaggacaaggaggagatcctcatgctgcacaacaagcttcggggccaggtgcagcctcaggcctccaacatggagtacatgacctgggatgacgaactggagaagtctgctgcagcgtgggccagtcagtgcatctgggagcacgggcccaccagtctgctggtgtccatcgggcagaacctgggcgctcactggggcaggtatcgctctccggggttccatgtgcagtcctggtatgacgaggtgaaggactacacctacccctacccgagcgagtgcaacccctggtgtccagagaggtgctcggggcccatgtgcacgcactacacacagatagtttgggccaccaccaacaagatcggttgtgctgtgaacacctgccggaagatgactgtctggggagaagtttgggagaacgcggtctactttgtctgcaattattctccaaaggggaactggattggagaagccccctacaagaatggccggccctgctctgagtgcccacccagctatggaggcagctgcaggaacaacttgtgttaccgagaagaaacctacactccaaaacctgaaacggacgagatgaatgaggtggaaacggctcccattcctgaagaaaaccatgtttggctccaaccgagggtgatgagacccaccaagcccaagaaaacctctgcggtcaactacatgacccaagtcgtcagatgtgacaccaagatgaaggacaggtgcaaagggtccacgtgtaacaggtaccagtgcccagcaggctgcctgaaccacaaggcgaagatctttggaactctgttctatgaaagctcgtctagcatatgccgcgccgccatccactacgggatcctggatgacaagggaggcctggtggatatcaccaggaacgggaaggtccccttcttcgtgaagtctgagagacacggcgtgcagtccctcaggtaactactctgtgatcggggctctgtgaaacggttttcctgtttatgacggtgttgttgaaattttgaaaaataccacacaggccgggcgtggtggctcacacctgcactttgggaggcagaggcaggtggatcacctgaggtcaggagttcaagaccagcctgaccaacatggtgaaagtccgtctctactaaaaatacaaaagttagccaggcgtggtggcaggcacctgtaatcccagctactctcaggaggctacggcagaagaaccgcttgaggccgaggcagaggttgcagtgagctaagatagtgtcactgcactccagcctggccaacacagcaaaactccgtctcaaaaaaaaaaaaaagaaaacaacaacaacaa

SEQ ID NO: 4878 - DNA, 1123 bp, Homo sapiens
  source 1..1123: mol_type = unassigned DNA; mol_type = unassigned DNA
cgggaggcggggagtgaagaacaaagagccgttccggagacctgggaggcattgcccatgggtcagggctacactggttttctggctgggctttctgtctttctccaagctctggacacaccgcaccgtgagaaaggctcctggaagcagagcaaccctgcccgggggctgtttctgaaggggcagagcagaggctggaaaacctgcaagccttccctcagagtcactgcgttccctcgtgccacgctcccctcctcttccaaacctgggatgacgaactggagaagtctgctgcagcgtgggccagtcagtgcatctgggagcacgggcccaccagtctgctggtgtccatcgggcagaacctgggcgctcactggggcaggtatcgctctccggggttccatgtgcagtcctggtatgacgaggtgaaggactacacctacccctacccgagcgagtgcaacccctggtgtccagagaggtgctcggggcccatgtgcacgcactacacacagatagtttgggccaccaccaacaagatcggttgtgctgtgaacacctgccggaagatgactgtctggggagaagtttgggagaacgcggtctactttgtctgcaattattctccaaaggggaactggattggagaagccccctacaagaatggccggccctgctctgagtgcccacccagctatggaggcagctgcaggaacaacttgtgttaccgagaagaaacctacactccaaaacctgaaacggacgagatgaatgaggtggaaacggctcccattcctgaagaaaaccatgtttggctccaaccgagggtgatgagacccaccaagcccaagaaaacctctgcggtcaactacatgacccaagtcgtcagatgtgacaccaagatgaaggacaggtgcaaagggtccacgtgtaacaggtaccagtgcccagcaggctgcctgaaccacaaggcgaagatctttggaactctgttctatgaaagctcgtctagcatatgccgcgccgccatccactacgggatcctggatgacaagggaggcctggtggatatcaccaggaacgggaaggtccccttcttcgtgaagtctgagagacacggcgt

SEQ ID NO: 4879 - DNA, 615 bp, Homo sapiens
  source 1..615: mol_type = unassigned DNA; mol_type = unassigned DNA
tccgcctcctcggcctccctccctcccggctgcccgtggctgctcctggaattggccgctattcaccctcctcggcctccctccctcctacctgcccgtggctgctgctgtctccactggtgggtgaggggaggggctgggactgagtgagcggtttctgccctgcaggtatcgctctccggggttccatgtgcagtcctggtatgacgaggtgaaggactacacctacccctacccgagcgagtgcaacccctggtgtccagagaggtgctcggggcccatgtgcacgcactacacacagatagtttgggccaccaccaacaagatcggttgtgctgtgaacacctgccggaagatgactgtctggggagaagtttgggagaacgcggtctactttgtctgcaattattctccaaaggggaactggattggagaagccccctacaagaatggccggccctgctctgagtgcccacccagctatggaggcagctgcaggaacaacttgtgttaccgagaagaaacctacactccaaaacctgaaacggacgagatgaatgaggtggaaacggctcccattcctgaagaaaaccatgtttggctccaaccgagggt

SEQ ID NO: 4880 - DNA, 590 bp, Homo sapiens
  source 1..590: mol_type = unassigned DNA; mol_type = unassigned DNA
caagacagccgtgcacgcgggagtcatcagcaacgagagtgggggtgacgtggacgtgatgcccgtggataaaaagaagacctacgtgggctcgctcaggaatggagttcagtctgaaagaaacatgtaaatcaaaccacaggatgaagttgacatttgcttgcagctcttgggccttttaaaaaataagaggagttccttttcctggcttcgaaaaggaacagcagtggtgatcataatggtcatcagaggagaaccatcccagcaacccagccacagctggtcttcactggacaccatgaactacaccgtccaaaccttcttcactcccgccaacagcagccgttcccctaactataagatgctcaaggaggagcaagaggtggctgtgctgggggcaccccacaaccctgctcccctgacgtccacgtgatccacatccacagcgagacctctgtgaccgaccatgtcatctggtccctgtttaacaccctcttcatgaactcctgctgcctgggcttcatagcatttgcctactccgtgaagtctagggacaggaagatggttgacgacctgaacagggcccaggc

SEQ ID NO: 4881 - DNA, 1020 bp, Homo sapiens
  source 1..1020: mol_type = unassigned DNA; mol_type = unassigned DNA
gagcgcccgggcccgggcggcggggcgtgcgaaccgcggggcggagagccgagctcggggccggtgcggcgcgagctcaagcagttcctgggctggctcaagaagcacgcgtactgctccaacctcagcttccgcctctacgaccagtggcgagcctggatgcagaagtcgcacaagacccgcaaccaggggaaggcttcaacccaattcgtgaaggtatcaacacaggctagtttagcggcggaaggactcgtcagtatctcctgatggaataagtaccctttggcatcatcttgctagatccatcttccctgaaggcggtcccaccctcttccacggcagccaggtcctgatctgcacaggctgctcctgctgccagcctggatgggaagccatcccctacaacacacatgccttcctgtcgcagcctctctcctctctaactccaagctggagcacccaacactcttagcttccttctcaattacaccaaaactctccagaccccacttcttgccttgaccccaaaccacgaacatcacttagtatctaccaaccacctgccaagcattgttcacatataaaagttgacttaaaaagacaaagaatcgaccgggcgcaggggctcatgcctgtaatcccagcactttggaaggccgaggcagacggatcatttgaggtcaagagttcaagatgagcctggctaacatggtgaaactccgtctctactaaaactacaaaaatcaactgggcgtggtggcaggcgcctataatcccagctactcgggaggctgaggcagaagaatcgctcgagcccgggaggtggagattgcagtgagccgagaccgcaccactgaactccagcttaggcgacagagcaagactccatctgaaaaaaatacaaatagtctaaagaaaagtctaaaaagcagacactaccaccagctcctccttacagacgtagtaatggagccaggtatgaagactcagctcgagaaatttagtatttccaaagcgact

SEQ ID NO: 4882 - DNA, 413 bp, Homo sapiens
  source 1..413: mol_type = unassigned DNA; mol_type = unassigned DNA
acacctctgccttccttccaagcacaggacgaggggatcctgccctcgggcagacggggcacggcgagaggtcctgccagataagctgtaggggctcaggccaccctccctgccacgtggagacgcagaggccgaacccaaactggggccacctctgtaccctcacttcagggcacctgagccaccctcagcaggagctggggtggcccctgagctccaacggccataacagctctgactcccacgtgaggccacctttgggtgcaccccagtgggtgtgtgtgtgtgtgtgagggttggttgagttgcctagaacccctgccagggctgggggtgagaaggggagtcattactccccattacctagggcccctccaaaagagtccttttaaataaatgagctatttaggtgc

SEQ ID NO: 4883 - DNA, 1792 bp, Homo sapiens
  source 1..1792: mol_type = unassigned DNA; mol_type = unassigned DNA
ggggccgggcggggccagcggcgcattagcgccttgtcaattcggctgctcagacttgctccggcctccgcgtccgcgcccagcgacgtgcgggcggcctggcccgcgccctcccgcgcccggcctgcgtcccgcgccctgcgccaccgccgccgagccgcagcccgccgcgcgcccccggcagcgccggccccatgcccgccggccgccggggccccgccgcccaatccgcgcggcggccgccgccgttgctgcccctgctgctgctgctctgcgtcctcggggcgccgcgagccggatcaggagcccacacagctgtgatcagtccccaggatcccacgcttctcatcggctcctccctgctggccacctgctcagtgcacggagacccaccaggagccaccgccgagggcctctactggaccctcaacgggcgccgcctgccccctgagctctcccgtgtactcaacgcctccaccttggctctggccctggccaacctcaatgggtccaggcagcggtcgggggacaacctcgtgtgccacgcccgtgacggcagcatcctggctggctcctgcctctatgttggcctgcccccagagaaacccgtcaacatcagctgctggtccaagaacatgaaggacttgacctgccgctggacgccaggggcccacggggagaccttcctccacaccaactactccctcaagtacaagcttaggtggtatggccaggacaacacatgtgaggagtaccacacagtggggccccactcctgccacatccccaaggacctggctctctttacgccctatgagatctgggtggaggccaccaaccgcctgggctctgcccgctccgatgtactcacgctggatatcctggatgtggtgaccacggaccccccgcccgacgtgcacgtgagccgcgtcgggggcctggaggaccagctgagcgtgcgctgggtgtcgccacccgccctcaaggatttcctctttcaagccaaataccagatccgctaccgagtggaggacagtgtggactggaaggtggtggacgatgtgagcaaccagacctcctgccgcctggccggcctgaaacccggcaccgtgtacttcgtgcaagtgcgctgcaacccctttggcatctatggctccaagaaagccgggatctggagtgagtggagccaccccacagccgcctccactccccgcagtgagcgcccgggcccgggcggcggggcgtgcgaaccgcggggcggagagccgagctcggggccggtgcggcgcgagctcaagcagttcctgggctggctcaagaagcacgcgtactgctccaacctcagcttccgcctctacgaccagtggcgagcctggatgcagaagtcgcacaagacccgcaaccaggacgaggggatcctgccctcgggcagacggggcacggcgagaggtcctgccagataagctgtaggggctcaggccaccctccctgccacgtggagacgcagaggccgaacccaaactggggccacctctgtaccctcacttcagggcacctgagccaccctcagcaggagctggggtggcccctgagctccaacggccataacagctctgactcccacgtgaggccacctttgggtgcaccccagtgggtgtgtgtgtgtgtgtgagggttggttgagttgcctagaacccctgccagggctgggggtgagaaggggagtcattactccccattacctagggcccctccaaaagagtccttttaaataaatgagctatttaggtgc

SEQ ID NO: 4884 - DNA, 520 bp, Homo sapiens
  source 1..520: mol_type = unassigned DNA; mol_type = unassigned DNA
gccaggacaacacatgtgaggagtaccacacagtggggccccactcctgccacatccccaaggacctggctctctttacgccctatgagatctgggtggaggccaccaaccgcctgggctctgcccgctccgatgtactcacgctggatatcctggatgtggtgaccacggaccccccgcccgacgtgcacgtgagccgcgtcgggggcctggaggaccagctgagcgtgcgctgggtgtcgccacccgccctcaaggatttcctctttcaagccaaataccagatccgctaccgagtggaggacagtgtggactggaaggtggtggacgatgtgagcaaccagacctcctgccgcctggccggcctgaaacccggcaccgtgtacttcgtgcaagtgcgctgcaacccctttggcatctatggctccaagaaagccgggatctggaagcgcccgggcccgggcggcggggcgtgcgaaccgcggggcggagagccgagctcggggccggtgcggcgcga

SEQ ID NO: 4885 - DNA, 514 bp, Homo sapiens
  source 1..514: mol_type = unassigned DNA; mol_type = unassigned DNA
actcaccgcgtggcgcaccccacccgcgggccgctgagtggatttttccgtggcggggtgtgaataggtcccggggaaagagcttcttaccgctctcctcctgggaatccctcttactgcggtgcgggacccagttcccgcgcaggcctgggtcccggctcccacaggggactacatctccccgtctgcccacgcaggagctccctcccgaggcccccggggcgcccagagcaacctcaaacccatcccgcgcgcgaaggggacagcgcagccagggcgaaggcgagggactccgtgccttcctgctttttctcctttcttccagcaaagcctggggccgaggctactcgcggagaatcgaaaagagacacagctgtgatcagtccccaggatcccacgcttctcatcggctcctccctgctggccacctgctcagtgcacggagacccaccaggagccaccgccgagggcctctactggaccctcaacgggcgccgcctgccccctgagctct

SEQ ID NO: 4886 - DNA, 2179 bp, Homo sapiens
  source 1..2179: mol_type = unassigned DNA; mol_type = unassigned DNA
tacgcgctgcgggaccggcaggggaacgccatcggggtcacagcctgcgacatcgacggggacggccgggaggagatctacttcctcaacaccaataatgccttctcgggggtggccacgtacaccgacaagttgttcaagttccgcaataaccggtgggaagacatcctgagcgatgaggtcaacgtggcccgtggtgtggccagcctctttgccggacgctctgtggcctgtgtggacagaaagggctctggacgctactctatctacattgccaattacgcctacggtaatgtgggccctgatgccctcattgaaatggaccctgaggccagtgacctctcccggggcattctggcgctcagagatgtggctgctgaggctggggtcagcaaatatacagggggccgaggcgtcagcgtgggccccatcctcagcagcagtgcctcggatatcttctgcgacaatgagaatgggcctaacttccttttccacaaccggggcgatggcacctttgtggacgctgcggccagtgctggtgtggacgacccccaccagcatgggcgaggtgtcgccctggctgacttcaaccgtgatggcaaagtggacatcgtctatggcaactggaatggcccccaccgcctctatctgcaaatgagcacccatgggaaggtccgcttccgggacatcgcctcacccaagttctccatgccctcccctgtccgcacggtcatcaccgccgactttgacaatgaccaggagctggagatcttcttcaacaacattgcctaccgcagctcctcagccaaccgcctcttccgcgtcatccgtagagagcacggagaccccctcatcgaggagctcaatcccggcgacgccttggagcctgagggccggggcacagggggtgtggtgaccgacttcgacggagacgggatgctggacctcatcttgtcccatggagagtccatggctcagccgctgtccgtcttccggggcaatcagggcttcaacaacaactggctgcgagtggtgccacgcacccggtttggggcctttgccaggggagctaaggtcgtgctctacaccaagaagagtggggcccacctgaggatcatcgacgggggctcaggctacctgtgtgagatggagcccgtggcacactttggcctggggaaggatgaagccagcagtgtggaggtgacgtggccagatggcaagatggtgagccggaacgtggccagcggggagatgaactcagtgctggagatcctctacccccgggatgaggacacacttcaggacccagccccactggagacaccaatgaatgcatccagttcccattcgtgtgccctcgagacaagcccgtatgtgtcaacacctatggaagctacaggtgccggaccaacaagaagtgcagtcggggctacgagcccaacgaggatggcacagcctgcgtggggactctcggccagtcaccgggcccccgccccaccacccccaccgctgctgctgccactgccgctgctgctgccgctgctggagctgccactgctgcaccggtcctcgtagatggagatctcaatctggggtcggtggttaaggagagctgcgagcccagctgctgagcaggggtgggacatgaaccagcggatggagtccagcaggggagtgggaaagtgggcttgtgctgctgcctagacagtagggatgtaaaggcctgggagctagaccctccccaagcccatccatgcacattacttagctaacaattagggagactcgtaaggccaggccctgtgctgggcacatagctgtgatcacagcagacagggtcgctgccctgatggcgcttacattccagtgggtctaatgaccatatcttaggacacagatgtgcccagggaggtggtgtcactgcacaggaagtatgaggactttagtgtcctgagttcaaatcctgattcaggaactcacaaagctatgtgaccttacaccagtcacttaacttgttagccatccattatcgcatctgcaaaatggggattaagaatagaatcttggggttagtgtggagattagattaaatgtatgtaagacacttggcacaaaacctggcacatagtaaaggctcaataaaaacaagtgcctctcactgggctttgtcaacacgtga

SEQ ID NO: 4887 - DNA, 2890 bp, Homo sapiens
  source 1..2890: mol_type = unassigned DNA; mol_type = unassigned DNA
ctggctgccggctgctgccaccgcaatcccggctcctaaatcagcgcggggaggcgctccctccccacgcccggctctccgggctctcggggccgcgattggccgcgccggcgccccccaccccgggcccccggctccagctgccgcgccattggctgcgggcctccgccagcctttacataagaccgggcgcgctcgagtggagttgtataaagcgagcgcgcggcgtcggggcgggaggctcgaggccagcccgggaccggggctgggagcaagcaggcggcggcgccggcggcagaggcggcagcgagcgcccgcttcccacgcccctaggcggcggggccgagagcgggaggatggctccgagcgctgaccccggcatgtccaggatgttaccgttcctgctgctgctctggtttctgcccatcactgaggggtcccagcgggctgaacccatgttcactgcagtcaccaactcagttctgcctcctgactatgacagtaatcccacccagctcaactatggtgtggcagttactgatgtggaccatgatggggactttgagatcgtcgtggcggggtacaatggacccaacctggttctgaagtatgaccgggcccagaagcggctggtgaacatcgcggtcgatgagcgcagctcaccctactacgcgctgcgggaccggcaggggaacgccatcggggtcacagcctgcgacatcgacggggacggccgggaggagatctacttcctcaacaccaataatgccttctcgggggtggccacgtacaccgacaagttgttcaagttccgcaataaccggtgggaagacatcctgagcgatgaggtcaacgtggcccgtggtgtggccagcctctttgccggacgctctgtggcctgtgtggacagaaagggctctggacgctactctatctacattgccaattacgcctacggtaatgtgggccctgatgccctcattgaaatggaccctgaggccagtgacctctcccggggcattctggcgctcagagatgtggctgctgaggctggggtcagcaaatatacagggggccgaggcgtcagcgtgggccccatcctcagcagcagtgcctcggatatcttctgcgacaatgagaatgggcctaacttccttttccacaaccggggcgatggcacctttgtggacgctgcggccagtgctggtgtggacgacccccaccagcatgggcgaggtgtcgccctggctgacttcaaccgtgatggcaaagtggacatcgtctatggcaactggaatggcccccaccgcctctatctgcaaatgagcacccatgggaaggtccgcttccgggacatcgcctcacccaagttctccatgccctcccctgtccgcacggtcatcaccgccgactttgacaatgaccaggagctggagatcttcttcaacaacattgcctaccgcagctcctcagccaaccgcctcttccgcgtcatccgtagagagcacggagaccccctcatcgaggagctcaatcccggcgacgccttggagcctgagggccggggcacagggggtgtggtgaccgacttcgacggagacgggatgctggacctcatcttgtcccatggagagtccatggctcagccgctgtccgtcttccggggcaatcagggcttcaacaacaactggctgcgagtggtgccacgcacccggtttggggcctttgccaggggagctaaggtcgtgctctacaccaagaagagtggggcccacctgaggatcatcgacgggggctcaggctacctgtgtgagatggagcccgtggcacactttggcctggggaaggatgaagccagcagtgtggaggtgacgtggccagatggcaagatggtgagccggaacgtggccagcggggagatgaactcagtgctggagatcctctacccccgggatgaggacacacttcaggacccagccccactggagtgtggccaaggattctcccagcaggaaaatggccattgcatggacaccaatgaatgcatccagttcccattcgtgtgccctcgagacaagcccgtatgtgtcaacacctatggaagctacaggtgccggaccaacaagaagtgcagtcggggctacgagcccaacgaggatggcacagcctgcgtggggactctcggccagtcaccgggcccccgccccaccacccccaccgctgctgctgccactgccgctgctgctgccgctgctggagctgccactgctgcaccggtcctcgtagatggagatctcaatctggggtcggtggttaaggagagctgcgagcccagctgctgagcaggggtgggacatgaaccagcggatggagtccagcaggggagtgggaaagtgggcttgtgctgctgcctagacagtagggatgtaaaggcctgggagctagaccctccccaagcccatccatgcacattacttagctaacaattagggagactcgtaaggccaggccctgtgctgggcacatagctgtgatcacagcagacagggtcgctgccctgatggcgcttacattccagtgggtctaatgaccatatcttaggacacagatgtgcccagggaggtggtgtcactgcacaggaagtatgaggactttagtgtcctgagttcaaatcctgattcaggaactcacaaagctatgtgaccttacaccagtcacttaacttgttagccatccattatcgcatctgcaaaatggggattaagaatagaatcttggggttagtgtggagattagattaaatgtatgtaagacacttggcacaaaacctggcacatagtaaaggctcaataaaaacaagtgcctctcactgggctttgtcaacacgtga

SEQ ID NO: 4888 - DNA, 474 bp, Homo sapiens
  source 1..474: mol_type = unassigned DNA; mol_type = unassigned DNA
ggatgaggacacacttcaggacccagccccactggagacaccaatgaatgcatccagttcccattcgtgtgccctcgagacaagcccgtatgtgtcaacacctatggaagctacaggtgccggaccaacaagaagtgcagtcggggctacgagcccaacgaggatggcacagcctgcgtggaaagaaccttgctacttggtctctgcaatctccttggaaaatagaatgctcctgtagccagaacactctttggaaatgatgtaacgccacagaatatgctcacgaccagcctcagtagtgaaggcttgttataaaacatagatctattcttcatggggaaaaaaagtcatcccaggatataataaaattacacttaagaatgcagcaacccttttaaaaacatattcaacaaaaaaaaagcccctgccattttctgatatcatggtaatactcctaataaatcacaaaatatg

SEQ ID NO: 4889 - DNA, 1946 bp, Homo sapiens
  source 1..1946: mol_type = unassigned DNA; mol_type = unassigned DNA
atgtccaggatgttaccgttcctgctgctgctctggtttctgcccatcactgaggggtcccagcgggctgaacccatgttcactgcagtcaccaactcagttctgcctcctgactatgacagtaatcccacccagctcaactatggtgtggcagttactgatgtggaccatgatggggactttgagatcgtcgtggcggggtacaatggacccaacctggttctgaagtatgaccgggcccagaagcggctggtgaacatcgcggtcgatgagcgcagctcaccctactacgcgctgcgggaccggcaggggaacgccatcggggtcacagcctgcgacatcgacggggacggccgggaggagatctacttcctcaacaccaataatgccttctcgggggtggccacgtacaccgacaagttgttcaagttccgcaataaccggtgggaagacatcctgagcgatgaggtcaacgtggcccgtggtgtggccagcctctttgccggacgctctgtggcctgtgtggacagaaagggctctggacgctactctatctacattgccaattacgcctacggtaatgtgggccctgatgccctcattgaaatggaccctgaggccagtgacctctcccggggcattctggcgctcagagatgtggctgctgaggctggggtcagcaaatatacagggggccgaggcgtcagcgtgggccccatcctcagcagcagtgcctcggatatcttctgcgacaatgagaatgggcctaacttccttttccacaaccggggcgatggcacctttgtggacgctgcggccagtgctggtgtggacgacccccaccagcatgggcgaggtgtcgccctggctgacttcaaccgtgatggcaaagtggacatcgtctatggcaactggaatggcccccaccgcctctatctgcaaatgagcacccatgggaaggtccgcttccgggacatcgcctcacccaagttctccatgccctcccctgtccgcacggtcatcaccgccgactttgacaatgaccaggagctggagatcttcttcaacaacattgcctaccgcagctcctcagccaaccgcctcttccgcgtcatccgtagagagcacggagaccccctcatcgaggagctcaatcccggcgacgccttggagcctgagggccggggcacagggggtgtggtgaccgacttcgacggagacgggatgctggacctcatcttgtcccatggagagtccatggctcagccgctgtccgtcttccggggcaatcagggcttcaacaacaactggctgcgagtggtgccacgcacccggtttggggcctttgccaggggagctaaggtcgtgctctacaccaagaagagtggggcccacctgaggatcatcgacgggggctcaggctacctgtgtgagatggagcccgtggcacactttggcctggggaaggatgaagccagcagtgtggaggtgacgtggccagatggcaagatggtgagccggaacgtggccagcggggagatgaactcagtgctggagatcctctacccccgggatgaggacacacttcaggacccagccccactggagtgtggccaaggattctcccagcaggaaaatggccattgcatggacaccaatgaatgcatccagttcccattcgtgtgccctcgagacaagcccgtatgtgtcaacacctatggaagctacaggtgccggaccaacaagaagtgcagtcggggctacgagcccaacgaggatggcacagcctgcgtggctcaagtggcctttttaggtgggtattcttcagccgcctctagaatctctgagcctctctctcgggcctcatatctttctctaggccttggactttgccttcagttatatgcactttaaatcccatcaataaaggaaaaaacaaaacaaaa

SEQ ID NO: 4890 - DNA, 433 bp, Homo sapiens
  source 1..433: mol_type = unassigned DNA; mol_type = unassigned DNA
cagacagacaggtctattggacagcattgctccagagaggagggacctcaaatctgtcttgttcaccatttccctagcacttagaacagtgctcaattcatgcttttattcaatggatgaattagttgatgctgatgcttccgctgagagcctcctgctctcctctgctgctgatgctctctccttctgcccctcagggaaggatgaagccagcagtgtggaggtgacgtggccagatggcaagatggtgagccggaacgtggccagcggggagatgaactcagtgctggagatcctctacccccgggatgaggacacacttcaggacccagccccactggagtgtggccaaggattctcccagcaggaaaatggccattgcatggacaccaatgaatgcatccagttcccattcgtgtgccctcgagacaag

SEQ ID NO: 4891 - DNA, 2348 bp, Homo sapiens
  source 1..2348: mol_type = unassigned DNA; mol_type = unassigned DNA
ctggctgccggctgctgccaccgcaatcccggctcctaaatcagcgcggggaggcgctccctccccacgcccggctctccgggctctcggggccgcgattggccgcgccggcgccccccaccccgggcccccggctccagctgccgcgccattggctgcgggcctccgccagcctttacataagaccgggcgcgctcgagtggagttgtataaagcgagcgcgcggcgtcggggcgggaggctcgaggccagcccgggaccggggctgggagcaagcaggcggcggcgccggcggcagaggcggcagcgagcgcccgcttcccacgcccctaggcggcggggccgagagcgggaggatggctccgagcgctgaccccggcatgtccaggatgttaccgttcctgctgctgctctggtttctgcccatcactgaggggtcccagcgggctgaacccatgttcactgcagtcaccaactcagttctgcctcctgactatgacagtaatcccacccagctcaactatggtgtggcagttactgatgtggaccatgatggggactttgagatcgtcgtggcggggtacaatggacccaacctggttctgaagtatgaccgggcccagaagcggctggtgaacatcgcggtcgatgagcgcagctcaccctactacgcgctgcgggaccggcaggggaacgccatcggggtcacagcctgcgacatcgacggggacggccgggaggagatctacttcctcaacaccaataatgccttctcgggggtggccacgtacaccgacaagttgttcaagttccgcaataaccggtgggaagacatcctgagcgatgaggtcaacgtggcccgtggtgtggccagcctctttgccggacgctctgtggcctgtgtggacagaaagggctctggacgctactctatctacattgccaattacgcctacggtaatgtgggccctgatgccctcattgaaatggaccctgaggccagtgacctctcccggggcattctggcgctcagagatgtggctgctgaggctggggtcagcaaatatacagggggccgaggcgtcagcgtgggccccatcctcagcagcagtgcctcggatatcttctgcgacaatgagaatgggcctaacttccttttccacaaccggggcgatggcacctttgtggacgctgcggccagtgctggtgtggacgacccccaccagcatgggcgaggtgtcgccctggctgacttcaaccgtgatggcaaagtggacatcgtctatggcaactggaatggcccccaccgcctctatctgcaaatgagcacccatgggaaggtccgcttccgggacatcgcctcacccaagttctccatgccctcccctgtccgcacggtcatcaccgccgactttgacaatgaccaggagctggagatcttcttcaacaacattgcctaccgcagctcctcagccaaccgcctcttccgcgtcatccgtagagagcacggagaccccctcatcgaggagctcaatcccggcgacgccttggagcctgagggccggggcacagggggtgtggtgaccgacttcgacggagacgggatgctggacctcatcttgtcccatggagagtccatggctcagccgctgtccgtcttccggggcaatcagggcttcaacaacaactggctgcgagtggtgccacgcacccggtttggggcctttgccaggggagctaaggtcgtgctctacaccaagaagagtggggcccacctgaggatcatcgacgggggctcaggctacctgtgtgagatggagcccgtggcacactttggcctggggaaggatgaagccagcagtgtggaggtgacgtggccagatggcaagatggtgagccggaacgtggccagcggggagatgaactcagtgctggagatcctctacccccgggatgaggacacacttcaggacccagccccactggagtgtggccaaggattctcccagcaggaaaatggccattgcatggacaccaatgaatgcatccagttcccattcgtgtgccctcgagacaagcccgtatgtgtcaacacctatggaagctacaggtgccggaccaacaagaagtgcagtcggggctacgagcccaacgaggatggcacagcctgcgtggctcaagtggcctttttaggtgggtattcttcagccgcctctagaatctctgagcctctctctcgggcctcatatctttctctaggccttggactttgccttcagttatatgcactttaaatcccatcaataaaggaaaaaacaaaacaaaactaacagcctttgtggaaaact

SEQ ID NO: 4892 - DNA, 3267 bp, Homo sapiens
  source 1..3267: mol_type = unassigned DNA; mol_type = unassigned DNA
ggggcctgtggtcaacgcgatttgcttccaagggacggccaccagtcggcacaggaaaggggcagaggcagtgagttcagcgtgtggacgagggtcaacaagtttgggatcaagcggctgccgctcctccaaaagcgaccgaagcgcgagcagattacccctccgagccagtgtagtaaacacacttcagaaacgtgaggtgccggtggtcacgaggggagcgcgccctccaatgaggagccgggggcggggccgaggccgctgacgcggcggcggcggcagagtcacccgggcagcctcgggaccggtcaccggccggcaaccgtccagcggcctcgaccaccgcctctagcctccgttcccggtcctttctcccgggccgagagacagcgtcgccgacaggggctcattcccctccggttctcctcggtgactcacctcgggcgggccgttttgtctttaggggccgccttggtggggcgaggtttccgtgacgaatctcctggggccgtccgtgccggctcgggccgtcgtggcggctcgagctcctggaacttgctcaggctccggaggtccgaggccctcgaagttatgcgtcgcctccaggcggttgcggcgggcgcgggctcctaaagggcgtcacacccggactccgccgactaggcaacctccattcatctttccactgcgcctccggcgcccccgccttctccggtcccctcctcggagtcattttttcctgttccccctctgccgccctttcctcacgccccgggtgaggcaattctcttggaagcgaaggtgtcggctatgagccggagcctccttccttgaatttctccgtggaggacccgccgcgccccccggcatgggggtgaacgccgtgcactggttccgaaaggggctccggctccacgacaaccccgccctgaaggagtgcattcagggcgccgacaccatccgctgcgtctacatcctggacccctggttcgccggctcctccaatgtgggcatcaacaggtggcgatttttgcttcagtgtcttgaggatcttgatgccaatctacgaaaattaaactcccgtctgtttgtgattcgtggacaaccagcagatgtgtttcccaggcttttcaaggaatggaacattactaaactttcaattgagtatgattctgagccctttggaaaggaacgagacgcagctattaagaaactggcaactgaagctggagtagaagtcattgtaagaatttcacatacattatatgacctagacaagatcatagaactcaatggtggacaaccgcctctaacttataaaagattccagactctcatcagcaaaatggaaccactagagataccagtagagacaattacttcagaagtgatagaaaagtgcacaactcctctgtctgatgaccatgatgagaaatatggagtcccttcactggaagagctaggttttgatacagatggcttatcctctgcagtgtggccaggtggagaaactgaagcacttactcgtttggaaaggcatttggaaagaaaagcttgggtggcaaattttgaaagacctcgaatgaatgcgaattctctgcttgcaagccctactggacttagtccttatctccgatttggttgtttgtcatgtcgactgttttacttcaaactaacagatctctacaaaaaggtaaagaagaacagttcccctcccctttccctttatgggcaactgttatggcgtgaatttttctatacagcagcaacaaataatccacgctttgataaaatggaaggaaaccctatctgtgttcagattccttgggataaaaatcctgaggctttagccaaatgggcggaaggccggacaggctttccatggattgatgccatcatgacacagcttcgtcaggagggttggattcatcatctagccaggcatgcagttgcttgcttcctgacacgaggggacctgtggattagttgggaagaaggaatgaaggtatttgaagaattattgcttgatgcagattggagcataaatgctggaagttggatgtggctgtcttgtagttccttttttcaacagttttttcactgctattgccctgttggttttggtaggagaacagatcccaatggagactatatcaggcgttatttgcctgtcctaagaggcttccctgcaaaatatatctatgatccctggaatgcaccagaaggtatccaaaaggtagccaaatgtttgataggagttaattatcctaaaccaatggtgaaccatgctgaggcaagccgtttgaatatcgaaaggatgaaacagatctatcagcagctttcacgatatagaggactaggtcttctggcatcagtaccttctaatcctaatgggaatggaggcttcatgggatattctgcagaaaatatcccaggttgtagcagcagtggaagttgctctcaagggagtggtattttacactatgctcatggcgacagtcagcaaactcacctgttgaagcaaggaagaagctccatgggcactggtctcagtggtgggaaacgtcctagtcaggaagaggacacacagagtattggtcctaaagtccagagacagagcactaattagaaaacattcaggaggaatactgttgcagctgaaattggtggggagttcaatacttttcaattaagttatttaaaaatattcttcattgatggaaagcagttacatattgaaatatgttgtttctaatgacatttctgtggtttttaactttttaatgaatttcacagaggacaattggtaatttgtatataaagaacttggcaagagaatttgcttaatgtaaatataaacagtcacaattagtatagacccatcgatatatttttgataatttttcatgtatggtaaagttaaaatgacaaattgatattctgatataaaactcaaagttttgaagtcagtgggaaaaaaggaggtttttagactttcttaaaagacgttaaaattttaggacagaattttcttgatgttgtttgatctaactttgcactctttgataataatgttttagataatgtgcgtaatccaaattggtattgtagcctctgttaacacagacagtatatgttttaaactttgatgtaaacctttttagacccaaacttgtggaagtatcatgtgttaagttctctgtctctgtttctttgttcatttattactaaaatgaacttgttattaaagtatatgcaaatatgaaa

SEQ ID NO: 4893 - DNA, 3834 bp, Homo sapiens
  source 1..3834: mol_type = unassigned DNA; mol_type = unassigned DNA
aatactggaggtcacatttcaacatgagctttgtaggggacacaatgtccaaatcatatcacttattctgtctctcccttccttttttggtgctacctgcctatcctaccttccttcttccaaacttccctccccttgccatctttcttcccagccctcctcattgtttttctctctacctttccattttttctagctttttcttcttctctttccattattcctattttcttatggaaagatgctctcttgcttttactttccccttgtgtctcccccactttgtcttttgtaaccactccattttctttatctccttacttccttgaatgccttagtttttcttccttccaactgttcttccacttgtatatctagttttatagcaattagggccatttctacagcacttcaaactaaatacatgttaaactgggcatttctacttctggaagtggctgatttggttgtcctagaccaaacaccaggaaaggaagcttggcttggggatgttggaccacttggctggggcggtggttcagttgcatcttagtctcagagatgaaggagagtcacggctactcaccgccagagcaagacaccctccagccatagttccaattctacgatggcatagcgtagtagccctgtagctgcagggtgtggagcctagtgtttgctttttctctacggtgagcacagttacgtggactccagatttttgcttcagtgtcttgaggatcttgatgccaatctacgaaaattaaactcccgtctgtttgtgattcgtggacaaccagcagatgtgtttcccaggcttttcaaggaatggaacattactaaactttcaattgagtatgattctgagccctttggaaaggaacgagacgcagctattaagaaactggcaactgaagctggagtagaagtcattgtaagaatttcacatacattatatgacctagacaagatcatagaactcaatggtggacaaccgcctctaacttataaaagattccagactctcatcagcaaaatggaaccactagagataccagtagagacaattacttcagaagtgatagaaaagtgcacaactcctctgtctgatgaccatgatgagaaatatggagtcccttcactggaagagctaggttttgatacagatggcttatcctctgcagtgtggccaggtggagaaactgaagcacttactcgtttggaaaggcatttggaaagaaaagcttgggtggcaaattttgaaagacctcgaatgaatgcgaattctctgcttgcaagccctactggacttagtccttatctccgatttggttgtttgtcatgtcgactgttttacttcaaactaacagatctctacaaaaaggtaaagaagaacagttcccctcccctttccctttatgggcaactgttatggcgtgaatttttctatacagcagcaacaaataatccacgctttgataaaatggaaggaaaccctatctgtgttcagattccttgggataaaaatcctgaggctttagccaaatgggcggaaggccggacaggctttccatggattgatgccatcatgacacagcttcgtcaggagggttggattcatcatctagccaggcatgcagttgcttgcttcctgacacgaggggacctgtggattagttgggaagaaggaatgaaggtatttgaagaattattgcttgatgcagattggagcataaatgctggaagttggatgtggctgtcttgtagttccttttttcaacagttttttcactgctattgccctgttggttttggtaggagaacagatcccaatggagactatatcaggcgttatttgcctgtcctaagaggcttccctgcaaaatatatctatgatccctggaatgcaccagaaggtatccaaaaggtagccaaatgtttgataggagttaattatcctaaaccaatggtgaaccatgctgaggcaagccgtttgaatatcgaaaggatgaaacagatctatcagcagctttcacgatatagaggactagaaaatttttttgtcctttaggtcttctggcatcagtaccttctaatcctaatgggaatggaggcttcatgggatattctgcagaaaatatcccaggttgtagcagcagtggaagttgctctcaagggagtggtattttacactatgctcatggcgacagtcagcaaactcacctgttgaagcaaggtaagaatgaagcattggagcatactgttctttttccttttcctatcttaaacatacattttttaaatgtgcaggaagaagctccatgggcactggtctcagtggtgggaaacgtcctagtcaggaagaggacacacagagtattggtcctaaagtccagagacagagcactaattaggtaaatattttagagctgtatttcttgctttagaagagtatataattaacataaattaagataatttcaaaaatggagcaaatctctattttcaaaccagaaaatcttgaggcattaatttttaagcaatttttacaaactcagttaatttttggtcaagagacatgcatctgtactggagaaattgttgcaccagttttatattcatctgaaccaatgctctttaaattagagatgtttatgattttgtggtcaagttttttcttagaaaaagacaacttttttatttccttactatgtaactatgagtctaaaacaattaaagtggcctgtttattttagtgacattaatataatctttttatgaactttcccctaaatctttgcctcttaaatgttgataaatttcttttatctgttatgatgcttctaaaatctaaattatttccaatttgggaatagttcaaaattttttaaaatgctggcccttattagaagtatcagaaagccttgcctgcattcaatttaattggatttgggatgtcattttgtgatttaaattaatatgaaaaatatttatacgttggatttgccagtttttaaaaattttctgtttcttcagtttctaacactgtttacattttttattgcttagtttttttatgtcaacctaattagactataagtatcttgaagataaggtcaataaacactcatcacatttttgtcattgaattatttgcaatcaagctttacctagtttttttttcccccttaaatcacagaaaacattcaggaggaatactgttgcagctgaaattggtggggagttcaatacttttcaattaagttatttaaaaatattcttcattgatggaaagcagttacatattgaaatatgttgtttctaatgacatttctgtggtttttaactttttaatgaatttcacagaggacaattggtaatttgtatataaagaacttggcaagagaatttgcttaatgtaaatataaacagtcacaattagtatagacccatcgatatatttttgataatttttcatgtatggtaaagttaaaatgacaaattgatattctgatataaaactcaaagttttgaagtcagtgggaaaaaaggaggtttttagactttcttaaaagacgttaaaattttaggacagaattttcttgatgttgtttgatctaactttgcactctttgataataatgttttagataatgtgcgtaatccaaattggtattgtagcctctgttaacacagacagtatatgttttaaactttgatgtaaacctttttagacccaaacttgtggaagtatcatgtgttaagttctctgtctctgtttctttgttcatttattactaaaatgaacttgttattaaagtatatgcaaatatg

SEQ ID NO: 4894 - DNA, 621 bp, Homo sapiens
  source 1..621: mol_type = unassigned DNA; mol_type = unassigned DNA
atcgaaaggatgaaacagatctatcagcagctttcacgatatagaggactaggtcttctggcatcagtaccttctaatcctaatgggaatggaggcttcatgggatattctgcagaaaatatcccaggttgtagcagcagtggaagttgctctcaagggagtggtattttacactatgctcatggcgacagtcagcaaactcacctgttgaagcaaggaagaagctccatgggcactggtctcagtggtgggaaacgtcctagtcaggaagaggacacacagagtattggtcctaaagtccagagacagagcactaattaggtaaatattttagagctgtatttcttgctttagaagagtatataattaacataaattaagataatttcaaaaatggagcaaatctctattttcaaaccagaaaatcttgaggcattaatttttaagcaatttttacaaactcagttaatttttggtcaagagacatgcatctgtactggagaaattgttgcaccagttttatattcatctgaaccaatgctctttaaattagagatgtttatgattttgtggtcaagttttttcttagaaaaagacaacttttttatttccttactatgt

SEQ ID NO: 4895 - DNA, 471 bp, Homo sapiens
  source 1..471: mol_type = unassigned DNA; mol_type = unassigned DNA
attacttcagaagtgatagaaaagtgcacaactcctctgtctgatgaccatgatgagaaatatggagtcccttcactggaagagctaggttttgatacagatggcttatcctctgcagtgtggccaggtggagaaactgaagcacttactcgtttggaaaggcatttggaaagaaaagcttgggtggcaaattttgaaagacctcgaatgaatgcgaattctctgcttgcaagccctactggacttagtccttatctccgatttggttgtttgtcatgtcgactgttttacttcaaactaacagatctctacaaaaaggtattctctaaaattagagcttattgtttaatactttaaaaaaaaattctgataatacttctttgctttttaaccataggtaaagaagaacagttcccctcccctttccctttatgggcaactgttatggcgtgaatttttctatacagcagc

SEQ ID NO: 4896 - DNA, 830 bp, Homo sapiens
  source 1..830: mol_type = unassigned DNA; mol_type = unassigned DNA
cggcaaccgtccagcggcctcgaccaccgcctctagcctccgttcccggtcctttctcccgggccgagagacagcgtcgccgacaggggctcattcccctccggttctcctcggtgactcacctcgggcgggccgttttgtctttaggggccgccttggtggggcgaggtttccgtgacgaatctcctggggccgtccgtgccggctcgggccgtcgtggcggctcgagctcctggaacttgctcaggctccggaggtccgaggccctcgaagttatgcgtcgcctccaggcggttgcggcgggcgcgggctcctaaagggcgtcacacccggactccgccgactaggcaacctccattcatctttccactgcgcctccggcgcccccgccttctccggtcccctcctcggagtcattttttcctgttccccctctgccgccctttcctcacgccccgggtgaggcaattctcttggaagcgaaggtgtcggctatgagccggagcctccttccttgaatttctccgtggaggacccgccgcgccccccggcatgggggtgaacgccgtgcactggttccgaaaggggctccggctccacgacaaccccgccctgaaggagtgcattcagggcgccgacaccatccgctgcgtctacatcctggacccctggttcgccggctcctccaatgtgggcatcaacaggtggcgaatttacattgacactgaggttacactctaacttctttttccccaaatgatgatcattttccacaaaatgatggccagttattccaacactacttattggatcatttccaattcagtgag

SEQ ID NO: 4897 - DNA, 1017 bp, Homo sapiens
  source 1..1017: mol_type = unassigned DNA; mol_type = unassigned DNA
gggtgccattgggtgtggacagaaagctagtgaaacaagaccatgacaagtcactggccggctcagacgtgtttgtgtctctcttttcttagctcagtgagtactgggtatgtgtcacattgccaaatcccggatcacaagtctccatgaactgctggtgagctaggataataaaacccctgacatcaccattccagaagcttcacaagactgcatatataaggggctggctgtagctgcagctgaaggagctgaccagccagctgacccctcacactcacctagccaccatggacatcgccatccaccacccctggatccgccgccccttctttcctttccactcccccagccgcctctttgaccagttcttcggagagcacctgttggagtctgatcttttcccgacgtctacttccctgagtcccttctaccttcggccaccctccttcctgcgggcacccagctggtttgacactggactctcagagatgcgcctggagaaggacaggttctctgtcaacctggatgtgaagcacttctccccagaggaactcaaagttaaggtgttgggagatgtgattgaggtgcatggaaaacatgaagagcgccaggatgaacatggtttcatctccagggagttccacaggaaataccggatcccagctgatgtagaccctctcaccattacttcatccctgtcatctgatggggtcctcactgtgaatggaccaaggaaacaggtctctggccctgagcgcaccattcccatcacccgtgaagagaagcctgctgtcaccgcagcccccaagaaatagatgccctttcttgaattgcattttttaaaacaagaaagtttccccaccagtgaatgaaagtcttgtgactagtgctgaagcttattaatgctaagggcaggcccaaattatcaagctaataaaatatcattcagcaacagataactgtcttgtgtttgaatattccacacacttttaaataaatatacagataccacag

SEQ ID NO: 4898 - DNA, 464 bp, Homo sapiens
  source 1..464: mol_type = unassigned DNA; mol_type = unassigned DNA
aggcccagccaacattgatctaaacctttgggaaatacccctaaacatatctatgcctcagggtttgaaaaacaatgaagtgttggactgtttcagacttctcagattctcactggatgaacatggtttcatctccagggagttccacaggaaataccggatcccagctgatgtagaccctctcaccattacttcatccctgtcatctgatggggtcctcactgtgaatggaccaaggaaacaggtctctggccctgagcgcaccattcccatcacccgtgaagagaagcctgctgtcaccgcagcccccaagaaatagatgccctttcttgaattgcattttttaaaacaagaaagtttccccaccagtgaatgaaagtcttgtgactagtgctgaagcttattaatgctaagggcaggcccaaattatcaagctaataaaatatcattcagcaacagataac

SEQ ID NO: 4899 - DNA, 545 bp, Homo sapiens
  source 1..545: mol_type = unassigned DNA; mol_type = unassigned DNA
gaggcagcagatgccaggcttgcacccatccttgcgactggtcccctgggtgatctgtcttcttctctgtccctatgcgcctggagaaggacaggttctctgtcaacctggatgtgaagcacttctccccagaggaactcaaagttaaggtgttgggagatgtgattgaggtgcatggaaaacatgaagagcgccaggatgaacatggtttcatctccagggagttccacaggaaataccggatcccagctgatgtagaccctctcaccattacttcatccctgtcatctgatggggtcctcactgtgaatggaccaaggaaacaggtctctggccctgagcgcaccattcccatcacccgtgaagagaagcctgctgtcaccgcagcccccaagaaatagatgccctttcttgaattgcattttttaaaacaagaaagtttccccaccagtgaatgaaagtcttgtgactagtgctgaagcttattaatgctaagggcaggcccaaattatcaagctaataaaatatcattcagcaacagataa

SEQ ID NO: 4900 - DNA, 915 bp, Homo sapiens
  source 1..915: mol_type = unassigned DNA; mol_type = unassigned DNA
ggagctgagtgggcaagggctttggaaggacaagcaggaccagcagaacattccagattgggtgggtggaaaactggcaaagagacctgagccagaagaagaggcctttgtctcacagacaaaccacaaagccaggcattggagtcagagaggcagcagatgccaggcttgcacccatccttgcgactggtcccctgggtgatctgtcttcttctctgtccctgtaaataaagtttgggtctgatcaccatgagccttaggtatcactgtggtggctccctgaagcagacagctatgtttatttaaaaaggagattttttaagcagagaagagaaggatgaattacccggacagaaagcagctctgcagaataagacagcacctgtgtaatcagtatttttgccctctttctcccatcccattcccttaccttgctatttctagatgcgcctggagaaggacaggttctctgtcaacctggatgtgaagcacttctccccagaggaactcaaagttaaggtgttgggagatgtgattgaggtgcatggaaaacatgaagagcgccaggatgaacatggtttcatctccagggagttccacaggaaataccggatcccagctgatgtagaccctctcaccattacttcatccctgtcatctgatggggtcctcactgtgaatggaccaaggaaacaggtctctggccctgagcgcaccattcccatcacccgtgaagagaagcctgctgtcaccgcagcccccaagaaatagatgccctttcttgaattgcattttttaaaacaagaaagtttccccaccagtgaatgaaagtcttgtgactagtgctgaagcttattaatgctaagggcaggcccaaattatcaagctaataaaatatcattcagcaacagataa

SEQ ID NO: 4901 - DNA, 1119 bp, Homo sapiens
  source 1..1119: mol_type = unassigned DNA; mol_type = unassigned DNA
ggcgcagggagcagggagatgtagacctcattgacctctgtgtccaaatgtcggccaccccgaggtgcttccaggtttaagatgccatcatgggagagagcagctcggactcgccaggggtcgacatcagcaggcaggacataggtgcggcagaactctcgggacacgaagccgtggcggtccaggcgctgggggtgccgggcagacacctccagcaggttatccacagtcctcacagtcacctcgtctgggctcagtgagtactgggtatgtgtcacattgccaaatcccggatcacaagtctccatgaactgctggtgagctaggataataaaacccctgacatcaccattccagaagcttcacaagactgcatatataaggggctggctgtagctgcagctgaaggagctgaccagccagctgacccctcacactcacctagccaccatggacatcgccatccaccacccctggatccgccgccccttctttcctttccactcccccagccgcctctttgaccagttcttcggagagcacctgttggagtctgatcttttcccgacgtctacttccctgagtcccttctaccttcggccaccctccttcctgcgggcacccagctggtttgacactggactctcagagatgcgcctggagaaggacaggttctctgtcaacctggatgtgaagcacttctccccagaggaactcaaagttaaggtgttgggagatgtgattgaggtgcatggaaaacatgaagagcgccaggatgaacatggtttcatctccagggagttccacaggaaataccggatcccagctgatgtagaccctctcaccattacttcatccctgtcatctgatggggtcctcactgtgaatggaccaaggaaacaggtctctggccctgagcgcaccattcccatcacccgtgaagagaagcctgctgtcaccgcagcccccaagaaatagatgccctttcttgaattgcattttttaaaacaagaaagtttccccaccagtgaatgaaagtcttgtgactagtgctgaagcttattaatgctaagggcaggcccaaattatcaagctaataaaatatcattcagcaacaga

SEQ ID NO: 4902 - DNA, 887 bp, Homo sapiens
  source 1..887: mol_type = unassigned DNA; mol_type = unassigned DNA
aacagggagcactgaatttgctcagtgagtactgggtatgtgtcacattgccaaatcccggatcacaagtctccatgaactgctggtgagctaggataataaaacccctgacatcaccattccagaagcttcacaagactgcatatataaggggctggctgtagctgcagctgaaggagctgaccagccagctgacccctcacactcacctagccaccatggacatcgccatccaccacccctggatccgccgccccttctttcctttccactcccccagccgcctctttgaccagttcttcggagagcacctgttggagtctgatcttttcccgacgtctacttccctgagtcccttctaccttcggccaccctccttcctgcgggcacccagctggtttgacactggactctcagagatgcgcctggagaaggacaggttctctgtcaacctggatgtgaagcacttctccccagaggaactcaaagttaaggtgttgggagatgtgattgaggtgcatggaaaacatgaagagcgccaggatgaacatggtttcatctccagggagttccacaggaaataccggatcccagctgatgtagaccctctcaccattacttcatccctgtcatctgatggggtcctcactgtgaatggaccaaggaaacaggtctctggccctgagcgcaccattcccatcacccgtgaagagaagcctgctgtcaccgcagcccccaagaaatagatgccctttcttgaattgcattttttaaaacaagaaagtttccccaccagtgaatgaaagtcttgtgactagtgctgaagcttattaatgctaagggcaggcccaaattatcaagctaataaaatatcattcagcaacaga

SEQ ID NO: 4903 - DNA, 848 bp, Homo sapiens
  source 1..848: mol_type = unassigned DNA; mol_type = unassigned DNA
gccattgggtgtggacagaaagctagtgaaacaagaccatgacaagtcactggccggctcagacgtgtttgtgtctctcttttcttagctcaaagcttcacaagactgcatatataaggggctggctgtagctgcagctgaaggagctgaccagccagctgacccctcacactcacctagccaccatggacatcgccatccaccacccctggatccgccgccccttctttcctttccactcccccagccgcctctttgaccagttcttcggagagcacctgttggagtctgatcttttcccgacgtctacttccctgagtcccttctaccttcggccaccctccttcctgcgggcacccagctggtttgacactggactctcagagatgcgcctggagaaggacaggttctctgtcaacctggatgtgaagcacttctccccagaggaactcaaagttaaggtgttgggagatgtgattgaggtgcatggaaaacatgaagagcgccaggatgaacatggtttcatctccagggagttccacaggaaataccggatcccagctgatgtagaccctctcaccattacttcatccctgtcatctgatggggtcctcactgtgaatggaccaaggaaacaggtctctggccctgagcgcaccattcccatcacccgtgaagagaagcctgctgtcaccgcagcccccaagaaatagatgccctttcttgaattgcattttttaaaacaagaaagtttccccaccagtgaatgaaagtcttgtgactagtgctgaagcttattaatgctaagggcaggcccaaattatcaagctaataaaatatcattcagc

SEQ ID NO: 4904 - DNA, 1013 bp, Homo sapiens
  source 1..1013: mol_type = unassigned DNA; mol_type = unassigned DNA
aaacggcctgggtggatagaagggggacaaggaggcacacccaggccggcaaagagcaggtatcagcactgcaagcaccaagtgtgtcttgagggggtggggtctttctgcccagatgtgggatcctctcctaaacccaggtcaacccagggcacgaggcagatggctgctcagtgagtactgggtatgtgtcacattgccaaatcccggatcacaagtctccatgaactgctggtgagctaggataataaaacccctgacatcaccattccagaagcttcacaagactgcatatataaggggctggctgtagctgcagctgaaggagctgaccagccagctgacccctcacactcacctagccaccatggacatcgccatccaccacccctggatccgccgccccttctttcctttccactcccccagccgcctctttgaccagttcttcggagagcacctgttggagtctgatcttttcccgacgtctacttccctgagtcccttctaccttcggccaccctccttcctgcgggcacccagctggtttgacactggactctcagagatgcgcctggagaaggacaggttctctgtcaacctggatgtgaagcacttctccccagaggaactcaaagttaaggtgttgggagatgtgattgaggtgcatggaaaacatgaagagcgccaggatgaacatggtttcatctccagggagttccacaggaaataccggatcccagctgatgtagaccctctcaccattacttcatccctgtcatctgatggggtcctcactgtgaatggaccaaggaaacaggtctctggccctgagcgcaccattcccatcacccgtgaagagaagcctgctgtcaccgcagcccccaagaaatagatgccctttcttgaattgcattttttaaaacaagaaagtttccccaccagtgaatgaaagtcttgtgactagtgctgaagcttattaatgctaagggcaggcccaaattatcaagcta

SEQ ID NO: 4905 - DNA, 353 bp, Homo sapiens
  source 1..353: mol_type = unassigned DNA; mol_type = unassigned DNA
gcaggaccagcagaacattccagattggatgcgcctggagaaggacaggttctctgtcaacctggatgtgaagcacttctccccagaggaactcaaagttaaggtgttgggagatgtgattgaggtgcatggaaaacatgaagagcgccaggatgaacatggtttcatctccagggagttccacaggaaataccggatcccagctgatgtagaccctctcaccattacttcatccctgtcatctgatggggtcctcactgtgaatggaccaaggaaacaggtctctggccctgagcgcaccattcccatcacccgtgaagagaagcctgctgtcaccgcagcccccaagaaat

SEQ ID NO: 4906 - DNA, 965 bp, Homo sapiens
  source 1..965: mol_type = unassigned DNA; mol_type = unassigned DNA
agcaagaggggagtcaggaggagtagggaacgggagggaggccacactgtagctaggaggagaaggcagctcggaagaggggaaagagaacggaaaggaaagggaggaggaggaggagaaggaggaggagggggaggaggaggaggcaccaaacggcctgggtggatagaagggggacaaggaggcacacccaggccggcaaagagcaggtatcagcactgcaagcaccaagtgtgtcttgagctcagtgagtactgggtatgtgtcacattgccaaatcccggatcacaagtctccatgaactgctggtgagctaggataataaaacccctgacatcaccattccagaagcttcacaagactgcatatataaggggctggctgtagctgcagctgaaggagctgaccagccagctgacccctcacactcacctagccaccatggacatcgccatccaccacccctggatccgccgccccttctttcctttccactcccccagccgcctctttgaccagttcttcggagagcacctgttggagtctgatcttttcccgacgtctacttccctgagtcccttctaccttcggccaccctccttcctgcgggcacccagctggtttgacactggactctcagagatgcgcctggagaaggacaggttctctgtcaacctggatgtgaagcacttctccccagaggaactcaaagttaaggtgttgggagatgtgattgaggtgcatggaaaacatgaagagcgccaggatgaacatggtttcatctccagggagttccacaggaaataccggatcccagctgatgtagaccctctcaccattacttcatccctgtcatctgatggggtcctcactgtgaatggaccaaggaaacaggtctctggccctgagcgcaccattcccatcacccgtgaagagaagcctgctgtcaccgcagcccccaagaa

SEQ ID NO: 4907 - DNA, 517 bp, Homo sapiens
  source 1..517: mol_type = unassigned DNA; mol_type = unassigned DNA
gggtggaaaactggcaaagagacctgagccagaagaagaggcctttgtctcacagacaaaccacaaagccaggcattggagtcagagaggcagcagatgccaggcttgcacccatccttgcgactggtcccctgggtgatctgtcttcttctctgtccctgtaaataaagtttgggtctgatcaccatgagccttagatgcgcctggagaaggacaggttctctgtcaacctggatgtgaagcacttctccccagaggaactcaaagttaaggtgttgggagatgtgattgaggtgcatggaaaacatgaagagcgccaggatgaacatggtttcatctccagggagttccacaggaaataccggatcccagctgatgtagaccctctcaccattacttcatccctgtcatctgatggggtcctcactgtgaatggaccaaggaaacaggtctctggccctgagcgcaccattcccatcacccgtgaagagaagcctgctgtcaccgcagcccccaa

SEQ ID NO: 4908 - DNA, 695 bp, Homo sapiens
  source 1..695: mol_type = unassigned DNA; mol_type = unassigned DNA
agaaatgcctggaacttgccctcactgagcctaagctcggaggcccctgccctgctgccctccccagctggggcggcccgaggccggacatagtagccatggtagagtctcagtgagtactgggtatgtgtcacattgccaaatcccggatcacaagtctccatgaactgctggtgagctaggataataaaacccctgacatcaccattccagaagcttcacaagactgcatatataaggggctggctgtagctgcagctgaaggagctgaccagccagctgacccctcacactcacctagccaccatggacatcgccatccaccacccctggatccgccgccccttctttcctttccactcccccagccgcctctttgaccagttcttcggagagcacctgttggagtctgatcttttcccgacgtctacttccctgagtcccttctaccttcggccaccctccttcctgcgggcacccagctggtttgacactggactctcagagatgcgcctggagaaggacaggttctctgtcaacctggatgtgaagcacttctccccagaggaactcaaagttaaggtgttgggagatgtgattgaggtgcatggaaaacatgaagagcgccaggatgaacatggtttcatctccagggagttccacaggaaataccggatcccagctgatgtagaccc

SEQ ID NO: 4909 - DNA, 981 bp, Homo sapiens
  source 1..981: mol_type = unassigned DNA; mol_type = unassigned DNA
agcttcacaagactgcatatataaggggctggctgtagctgcagctgaaggagctgaccagccagctgacccctcacactcacctagccaccatggacatcgccatccaccacccctggatccgccgccccttctttcctttccactcccccagccgcctctttgaccagttcttcggagagcacctgttggagtctgatcttttcccgacgtctacttccctgagtcccttctaccttcggccaccctccttcctgcgggcacccagctggtttgacactggactctcagagatgcgcctggagaaggacaggttctctgtcaacctggatgtgaagcacttctccccagaggaactcaaagttaaggtgttgggagatgtgattgaggtgcatggaaaacatgaagagcgccaggtatgtagcttgtttttttgttttctgctcattcattcagtgcatactgtaatagtccaggtagtgctatcagctttggaggctggctacattccagtcccaagccataacagtcgggatcaggggttacaaatcaatgtctagaagactaagttaggatagacatattgctgttgttactattatggccagagatgtggcctttgatttgatcgccttagatgggatgatgggatgctgatgccccatttaagccagtggttctgaatctgggccacattagaatcaccaggggaactttcaaaaaacctaatgctcgggcatactccagaccaattagcatatgtgctgccgaagcgagcactactccagaccaattaaatcagcatttttaagggtgggacccaggcatcagcaatttttaaggtaattctaatctacagtcaaggttgagaaccactgattaggtatagggctgtcagacacctagttgctttgcataattacattaactacaggtaccctaaaagcacttgagttgtgacttctcttttagctgtgcaag

SEQ ID NO: 4910 - DNA, 624 bp, Homo sapiens
  source 1..624: mol_type = unassigned DNA; mol_type = unassigned DNA
ataccttctccgaagcgctgctcacccaggcggctcgggttggcaaattcgtactcggcggtggccgggtgggcatgtggcactgagcggcccgacatggctgcagatgcagcagaagccctggtccgaggtgcagccccaacaggcgcagcgcgacccctccagctgcccggagagccagggctcgataggagctcagtgagtactgggtatgtgtcacattgccaaatcccggatcacaagtctccatgaactgctggtgagctaggataataaaacccctgacatcaccattccagaagcttcacaagactgcatatataaggggctggctgtagctgcagctgaaggagctgaccagccagctgacccctcacactcacctagccaccatggacatcgccatccaccacccctggatccgccgccccttctttcctttccactcccccagccgcctctttgaccagttcttcggagagcacctgttggagtctgatcttttcccgacgtctacttccctgagtcccttctaccttcggccaccctccttcctgcgggcacccagctggtttgacactggactctcagagatgcgcctggagaaggacaggttctctgtca

SEQ ID NO: 4911 - DNA, 479 bp, Homo sapiens
  source 1..479: mol_type = unassigned DNA; mol_type = unassigned DNA
aggaggaggaggcaccaaacggcctgggtggatagaagggggacaaggaggcacacccaggccggcaaagagcagctcagtgagtactgggtatgtgtcacattgccaaatcccggatcacaagtctccatgaactgctggtgagctaggataataaaacccctgacatcaccattccagaagcttcacaagactgcatatataaggggctggctgtagctgcagctgaaggagctgaccagccagctgacccctcacactcacctagccaccatggacatcgccatccaccacccctggatccgccgccccttctttcctttccactcccccagccgcctctttgaccagttcttcggagagcacctgttggagtctgatcttttcccgacgtctacttccctgagtcccttctaccttcggccaccctccttcctgcgggcacccagctggtttgacactggactctcagagatgcg

SEQ ID NO: 4912 - DNA, 977 bp, Homo sapiens
  source 1..977: mol_type = unassigned DNA; mol_type = unassigned DNA
aggaggaggaggcaccaaacggcctgggtggatagaagggggacaaggaggcacacccaggccggcaaagagcaggtatcagcactgcaagcaccaagtgtgtcttgagctcagtgagtactgggtatgtgtcacattgccaaatcccggatcacaagtctccatgaactgctggtgagctaggataataaaacccctgacatcaccattccagaagcttcacaagactgcatatataaggggctggctgtagctgcagctgaaggagctgaccagccagctgacccctcacactcacctagccaccatggacatcgccatccaccacccctggatccgccgccccttctttcctttccactcccccagccgcctctttgaccagttcttcggagagcacctgttggagtctgatcttttcccgacgtctacttccctgagtcccttctaccttcggccaccctccttcctgcgggcacccagctggtttgacactggactctcagagatgcgcctggagaaggacaggttctctgtcaacctggatgtgaagcacttctccccagaggaactcaaagttaaggtgttgggagatgtgattgaggtgcatggaaaacatgaagagcgccaggatgaacatggtttcatctccagggagttccacaggaaataccggatcccagctgatgtagaccctctcaccattacttcatccctgtcatctgatggggtcctcactgtgaatggaccaaggaaacaggtctctggccctgagcgcaccattcccatcacccgtgaagagaagcctgctgtcaccgcagcccccaagaaatagatgccctttcttgaattgcattttttaaaacaagaaagtttccccaccagtgaatgaaagtcttgtgactagtgctgaagcttattaatgctaagggcaggcccaaattatcaagctaataaaatatcattcagcaacagat

SEQ ID NO: 4913 - DNA, 708 bp, Homo sapiens
  source 1..708: mol_type = unassigned DNA; mol_type = unassigned DNA
gcctcgcagccggtccatttccctcgcgtgccgcgctcacccacccgcggcatgagcagcgcccccgcgccgggcccggcgcccgccagcctcacgctctgggacgaggaggacttccagggccgtcgctgtcggctgctaagcgactgtgcgaacgtctgcgagcgcggaggcctgcccagggtgcgctcggtcaaggtggaaaacggcgtttgggtggcctttgagtaccccgacttccagggacagcagttcattctggagaagggagactatcctcgctggagcgcctggagtggcagcagcagccacaacagcaaccagctgctgtccttccggccagtgctctgcgcgaaccacaatgacagccgtgtgacactgtttgagggggacaacttccaaggctgcaagtttgacctcgttgatgactacccatccctgccctccatgggctgggccagcaaggatgtgggttccctcaaagtcagctccggagcgtgggtggcctaccagtacccaggctaccgaggctaccagtatgtgttggagcgggaccggcacagcggagagttctgtacttacggtgagctcggcacacaggcccacactgggcagctgcagtccatccggagagtccagcactaggctccacggccccagacaccttccctgaggacactcaataaaggttcctgaatcttcctgccc

SEQ ID NO: 4914 - DNA, 566 bp, Homo sapiens
  source 1..566: mol_type = unassigned DNA; mol_type = unassigned DNA
aagtcatgggaggggccaggttcgggggaacctctgagcgatccatttcccagactgccagggagctgatggggtgagctctgggagtgcctgtgggtcctagacagcttcacagcttgtgaggtgcagtgggtgggggaagtgaggcagaggatgtatccgttaaccctttggaagccctgatctttctgtcctgatcttgctgtgcctcagaaccacaatgacagccgtgtgacactgtttgagggggacaacttccaaggctgcaagtttgacctcgttgatgactacccatccctgccctccatgggctgggccagcaaggatgtgggttccctcaaagtcagctccggagcgtgggtggcctaccagtacccaggctaccgaggctaccagtatgtgttggagcgggaccggcacagcggagagttctgtacttacggtgagctcggcacacaggcccacactgggcagctgcagtccatccggagagtccagcactaggctccacggccccagacaccttccctgaggacactcaataaaggttcctgaatcttcctgcc

SEQ ID NO: 4915 - DNA, 437 bp, Homo sapiens
  source 1..437: mol_type = unassigned DNA; mol_type = unassigned DNA
ggagccaagatgcaatcagtattgatgccctgacatgtctattctgattctgccacccagtacctcttagctgggcactaatctaaccacaatgacagccgtgtgacactgtttgagggggacaacttccaaggctgcaagtttgacctcgttgatgactacccatccctgccctccatgggctgggccagcaaggatgtgggttccctcaaagtcagctccggagcgtgggtggcctaccagtacccaggctaccgaggctaccagtatgtgttggagcgggaccggcacagcggagagttctgtacttacggtgagctcggcacacaggcccacactgggcagctgcagtccatccggagagtccagcactaggctccacggccccagacaccttccctgaggacactcaataaaggttcctgaatcttcctgcc

SEQ ID NO: 4916 - DNA, 893 bp, Homo sapiens
  source 1..893: mol_type = unassigned DNA; mol_type = unassigned DNA
gccggtccatttccctcgcgtgccgcgctcacccacccggtgaatgccctctgctggggtggggaagggaggggagcgcgggaagactgcgagcccctggcagccgggtccagagctaggccgggtccagcccccgggttcttcatccgctacccaggttgggcaggctgtgtgtggctcgaaacggggctcttgagacgctgagcgcgtggtgccacccttcctgtccgcagcggcatgagcagcgcccccgcgccgggcccggcgcccgccagcctcacgctctgggacgaggaggacttccagggccgtcgctgtcggctgctaagcgactgtgcgaacgtctgcgagcgcggaggcctgcccagggtgcgctcggtcaaggtggaaaacggcgtttgggtggcctttgagtaccccgacttccagggacagcagttcattctggagaagggagactatcctcgctggagcgcctggagtggcagcagcagccacaacagcaaccagctgctgtccttccggccagtgctctgcgcgaaccacaatgacagccgtgtgacactgtttgagggggacaacttccaaggctgcaagtttgacctcgttgatgactacccatccctgccctccatgggctgggccagcaaggatgtgggttccctcaaagtcagctccggagcgtgggtggcctaccagtacccaggctaccgaggctaccagtatgtgttggagcgggaccggcacagcggagagttctgtacttacggtgagctcggcacacaggcccacactgggcagctgcagtccatccggagagtccagcactaggctccacggccccagacaccttccctgaggacactcaataaaggttcctgaatcttcctgcc

SEQ ID NO: 4917 - DNA, 493 bp, Homo sapiens
  source 1..493: mol_type = unassigned DNA; mol_type = unassigned DNA
ccctcgcgtgccgcgctcacccacccggttgggcaggctgtgtgtggctcgaaacggggctcttgagacgctgagcgcgtggtgccacccttcctgtccgcagcggcatgagcagcgcccccgcgccgggcccggcgcccgccagcctcacgctctgggacgaggaggacttccagggccgtcgctgtcggctgctaagcgactgtgcgaacgtctgcgagcgcggaggcctgcccagggtgcgctcggtcaaggtggaaaacggcgtttgggtggcctttgagtaccccgacttccagggacagcagttcattctggagaagggagactatcctcgctggagcgcctggagtggcagcagcagccacaacagcaaccagctgctgtccttccggccagtgctctgcgcgaaccacaatgacagccgtgtgacactgtttgagggggacaacttccaaggctgcaagtttgacctcgttgatgactacccatc

SEQ ID NO: 4918 - DNA, 560 bp, Homo sapiens
  source 1..560: mol_type = unassigned DNA; mol_type = unassigned DNA
gcatgagcagcgcccccgcgccgggcccggcgcccgccagcctcacgctctgggacgaggaggacttccagggccgtcgctgtcggctgctaagcgactgtgcgaacgtctgcgagcgcggaggcctgcccagggtgcgctcggtcaaggtggaaaacggcgtttgggtggcctttgagtaccccgacttccagggacagcagttcattctggagaagggagactatcctcgctggagcgcctggagtggcagcagcagccacaacagcaaccagctgctgtccttccggccagtgctctgcgcggtgagcacagcccacttctcctcccctgcctcctagctccaggccctggcctcaccatggcacctagaaaggctgttcaagccctgcatggggtgtgtgtaaacaaactccgagatgggtggtagtagcattatttctcagaatcagaagggtgtctccaagaaagttgggattgtgggcgtaggcccggagcccagaaatcatcaccacggacagcgctgaggccatcccagtcctgagtgcccagggttcccc

SEQ ID NO: 4919 - DNA, 10729 bp, Homo sapiens
  source 1..10729: mol_type = unassigned DNA; mol_type = unassigned DNA
gtcgcgtccgcacttctcctgcccgagagagactgagccgcgctggcagctcgcgtcgagtcggtctgccctagccgcatcccgcggcgcccggtcgggctccgggcaccaggcaacacctaggccgttcccttcagacagccccgggccagcggccccctcgggaaatgtccagcggccgcagaaggggcagcgccccctggcacagcttctcccggttcttcgctccccgaagtccttcccgggacaaggaagaggaagaggaggagaggccggggacgagcccgcctccagctccaggccggtccgctgccagtgttgaaaatgagcccatgagcacaagtcagaaaaaggaaaatgtactttcatcagaagcagtaaagattcgccaaagtgaggacaaaaggaaccatgctgagaagccagtcactcttccagtgcaggaagatcccaaaaaggcatatgatctttccagttccacttcagataccaaaataggagaaagtgacagacagccaaaagaaagcttttttcagtttcttggtaacttattcaatatctcggggaaatcatctctaggtgaagctaagcagtcttctttcaaagatgaccaggataaaactgagaaggatttacaaaatcccagtgaccatcatgaagacgggatcaaaagggagagagagattttcagtggctccctaagaacccagacacatccaacagaagaacaagactctaactcatccgaactctcagatgctttttctttggatacaacacaagacagtgaccaagaaaccactaatttgctaaaacaaatcgatggtaaaccagagaagccttcagtaacatatgcaacatatcgaggcccaagacacattgggaaatatttaaagcaacagacaggcttggcaactgtgaataccttggacagagaaaatgaaagttctgactctagtacaaacagacacattgaccctggaagtgagattgaggctggggtactgccactgttgttatcagctagtacagactcatctatgaaaggaaatctacttgaaggcccattagaagactctgattgtagcaaaacaagtttcaacaaggaaaattctttgacaaataacccagaactgcagaatattgcctcttccaataatcttttaaataaaaatgcttgggggagtattgagagaaataggtcatccccttcttctgtgactaactccagctacgatggagaatctgactcacagcaccatttaagttgtgaaccggtttctcagactaacagaaatttggtatgttcagcattgttaacaggaagtaaccatcgcaaagtcccttgcagcccagattttcagagagtaactacaacagaaaatacgataaaagaaaacagcactgtgatgagtaataggacattggtgcaaagagaggagcttgttgagcctcagggccctgctatttctgatttctcttgtagtaaatctgatgggagtgacactactgagcaggaaagtacaaatttgccaagtccaaataaatcaattaggcatgaacatctgcagttgccagagagtgagtgttctgacaagcaaaccatagatagctcatcaaagcaagctgccactcacaccaatatcattgctcttcagagacatgctgtgacagacacagaatttgtaaatgaaggaaagagattgtctgcccaagactcacagaaaaatgtggctgttagagaaatcaggcgagaaacagaaagtgcctcagctggtgaatccatagcttcaagtcatgtaaaagctccagaagataaaattgagtcattacccaaagatactgaccaatactttgaaaccaaagccaaaaagcttgattttaggtcacatgataaaattcctcatattagaatgaataaaaaagacctggcctctttaaattacatcagtgaatcagcagttgtagcaagcttaggaaatgaaaatgcacctgagttgaaatttgaacttaatagaagtcacatttcagaaactcctcttgactctgagagtcctcaacaagctgaagtatcacctgatgctaaaacatctcttagccttgactgtaaaaaactaaatttcagtatttcacctcctacctttgtttctggagttgggatgctgagcaagttggatattcctgatttaatgaatgagggttctcctgtgcccattgaaactgggaatgtcaacattgttggtatttcctatcagcctaggaagtgtaaagaagaaaatgtgaaaaaccatgttgaggctgcaggcaggaagagtcctcctccttccttttgccttgaatatacatctgcaatttttgaattcaaagaagttctttctaatagtgaaaaatgccaggttcttccaggttctgaagccagtggccctcacttaactgggttggagctattgagctttgactctggaaacctctctaaggattgcagttccattttatctcaagaccctaatagagtagagttagtgtcttcaaacactaaagcaaatatgagcataatagagaagtctgattctctttccttggaagccaaaactgctaacattgtatcaaaagctgaaattgatggtcagaacaatgttcttgtggagtcacattctggaagaggaaaaactatatccttgtccaaggtatctctttcaaaagtggagcccagaaacatttctcaggataaaatgtcttcttttccattgaaaattacccatgttccagaaaagcctattttgtcagaattaacctttctagaagttgaacagggcaaacgttttcaatcaattaatcataatgagataggagagaaatgttcagatgctggccttaaagagaattgccaagctgagctttctcctgctgcctccaaatatgaagataagccagaaccagaggtagatgccttaggctctcctcctgctcttcttaaaagtaatatatcttggattttaccacctattcatgatgaaaaaatcagtaggcaaatggcgcagaattgtgaagctcacacttgtgtgtttcatcaatctttggatatttgtgggactaaaaagatttctggtcactcagaaatggcggaactcagcttaactaatatttcccctaaattccaagaaactggcagcatgaaagtaaattcaccttttctggattctgattccagtttggaaaaaaattcttctgcatctgaggactcaagcttccttaaagtaccttctgtgctgaaattggaaaagaaatcctcatcttacagaaagaaagagaacatccattttttaaatggtggtattgatagtgtgtcatcttcctctagttaccctgaagaagttagcatgatagtaaattcacataagccccaaaataatttggattctatacaagttaccaaagatctcacacatgaaggtacctctgtaactaacctgttgtaccctactacctcttatttggaatttgaaacgtctgtctcaattgggacagaagtaaccccatttcaggaacattttgggatttatactgggaagatatccattgatttcccaactgctgcccaatttgacaatctcgtggaagcagagactggagcagttgctgggcctgcagcgtcagttaacagctcaggccaacagtgttctgaagcctctgctgagcacatagaagccaggagaagagcacatgaccaacttttggacctcaaaagtagtttactcaaaaaggccgatacattgattggtgagatttttaattctgtcagggaagaactaaaattcaaacacacagtgagtacctgccaggagcatatagccatagaaggtataatgaatctgggtaccctgaaagaagacatctctgagaaaaacccatcagaagtgacactaacagaaatacaacagacagagggtttggaagagcaaggcatggaaaacatgtcagaagtcaaagagaagccctgtgtttcaccaacagttggtgagaagaatcttcttgttgatcctaatagtatgaatgtatcttgtttgttagaagataaagctagggaattagtcaatgagattatttatgtagcccaagaaaaattgagaaatgatacttttgaagatactgaggatacttgggattctgaacttcaggctaatacttcaaaaattctgaacagtgatagtgttaagccacatgatgtagttagagagttcttggtttcagaacagccagtaaatcaaagcacacaaattagtgaaaataaagtattaaatgaattcttctccctaagtaacttagctagtggcacagagtcaattaagggaggagaaattgttctctaccaaaaatccctattttctggaaatggatctggactgtctgatagtataaatttgcaggaatcagatacggttttactagctgaagacatgtcacataaacggttagatgatagggtaaaaacacatttatttcgcagtgaggactgtaatgagacaatggaaatagagaatgtggataataacaaaactgagacagaggacagaagaactcttgtattaaatttcaaatggcctccacttgtgaatgatgacatccatgcacctggtacatctaaaagcagtttgtctgatagccttgtatgtatatctgaaaaaaacttgccaggacacagtaaaaacacacctcttgcaatgtcagatgtagggaaagtacacaagaaggataatgaaataaatatagggaaaattgaacttataccttccatgttagaaacagggaaaacaaacaaaaaggatgctgaattgaatattctgaaatatgaggcagtccctcctatgatagaaatgggaagaatacataaaatggatgctgaattgaatgtcacgaaaactgagccaaaagctaatgtttttaaaatgggagaagtataccaaatggatgccgagagctgtattgaaaaaactgagggatcagctgtcattttaggaatggaaaaagcttataagatgaaggatactgaaggggatattggcaaaattgaggtgatacctatgatgccagaagtgaaaaatatccaccaaaaggatgctgaaggggatattgtaaagactgagatgacacctgttacagtagacatggaaaatatttaccaaacgcatgctgaaggggatattggcaagactgggacgatagccttgtcagaagtggaaaatatccaccaaaaaggtggtgaagggattagtgaaaaggctgaagtgatacccgttacattagcaatggaaaatacttaccaaaaggatgctgaaggggatattggaaaggctgaagtgatgcctgtgaggttagaaatggaaaatacttacccaaaggatactgaaagagacggtggcaaaactgaggtgatgccccttgcattagaggtagtaaatacttaccaaaaaaatgccaaaggttttaccgggaacactgaagggtctgtgttgaaaatggaagctacttaccgaaagactgctgaagaggtcattaagaatactgaaatagtaccgtgtgtgttaaaagtgaaggaagcacacgagacagcacctgcccccttagaaatggaaaaagcatgcaagagagatgttaaagagactattggagcaactgtgtccacaccctctgtgatagaaatggaaaaaatatccccagaagatcgtggtgagaatattgggaaacacaaagtgttacccgcagtggtagacattgagaaaatacatggaacaggactagaattgaccactaaacaaggggaggccatgcttcctgcatttgaaagtaaaacaccacaagagtatgctgaagggagtgttgaagaaacaaaggaagagcctacagaaataaaggaaggcttgatagcacatgaaaatagacttcctacatatttcaggggatatgaatcccctacattaagtaaggattatgagggctacccagccccagcaatgccagattttcaacctggggataccacagtaagactagacaaaagaatgtctcttactgcaatatatgacaagaggagagagacagattatagtgacaaaggatataatttagcttttgtttctcaagatgaacaagaaaattcttcctttactatattatacgaagagccccttcaagaggaggacaagtatgcttccgcagaagcaagacaaacacagtctgtcttgtttcatgatacgtccgctgacagcatgcctgttctggcatgtgaaaggtctgagagtagaactgaccttgtccatcactttgaaaaaggtactaaattaggtgagacatttgatagtgatagttcagaaatgttcttatcagtggaggccaaaaggtacaaaatttatcctttagcattgtctcccatttatgaggatgacagctcacaggaggacattctatctagtgaggtttcacctggtcaccatggccccaggaaatcaagagacagtgaaaaccagtcctcttctgttttatcccttctccagtcagtgtcagaacgtttaaagatgaattttgatgaagatgacagagaggcagctgatgaggaagaagaggaggaggaggcagcagtattgcataaaggagatctgagagctggaagtggggagcgtgttaccttccagttgccagatccttccatcacattttaccctgatgaccaggagagcgttggaatttctaagaattcatatgtgatgccaaatgaacctactacctccaatctgcaagttggtctgtggccagaaaagacctcgtttctccagaaatctgaccttacttctaaactacattcttctttaaagagtgcttatcatcagtatctgcagacttcccaaagtcattcctcagaaaaaggagccagatttggtggaatttttcaggaaccagtgtcaaaatatttccgtgttcaagacagcccaggcagattgagcccatttatagagaatgttgacaaacaaactctgagatgtaacccaagacctgggaagatggttatctatgatctccatgaaagtacatataaacaagaagtctactgtaatattcctgatgctacatcatggtcttttccaaatggagttctaataaaagttgtaaggggctgctggattttatatgagaaaccacatttccgaggtcagaaatgtgtgctagaagaaggggaaaaggtgttaaatcgtgactggattcttcagaacagaaggcatccacaaagaaactttatattgggttctctcaaacgtgtcttaaaggactgcagcattccagaaatagagcttttcccacaatctgacccagcctgttgtcctgtctacatacagagagcagtccccaatttggaagaactgaatatctccaaatctgtgtccttcactgtgaagtcaggagtttggcttgcctacccagatattaattttaagggacaagctacagttctggaggaagaccatgggctctttgagatttctacagcagaaatgaaatcattacatccgcttcaaatgggtggactgaaagtggaaatgcccatgaacttaaaggttattatttatgaaaaacctcacttccatggacaggctaaagagtttagtgaacatatagattctgttcctaattttttgaaaaataatggagattttcacagaattggatcaattcgtgtcattggtggagtgtgggttgcctatgaaaaagaacattttaaaggccagcagtttctgcttgaagaaggagactttgaagacagtaatgcttgtggtgcattaagtagccctatcttgtctttccggtacttacaagctaattttatagaatcttctgtcacactatttgaatctgacctagaaagtgggaagtttattgacattacaaatcaggaaatttctgatttggaagaaattggctttggcagtaaaacaagatccattcatgttaaaagtggagtatgggttgcctaccagcaaaagttcttctgtggagaacaatacattttagaaaaagggaaatacaaatgcttttttgactggggaggatcaaataatataatcatgtcgatacggccaatccaactggaaccacttgggataaatgaacctccgcatttgctcaaagcattcagcaaaccagggttccaaggtgaatgtatagattttacagaagaaacttctgatttgacttcactcatgccatgttcttttaaagttcttcgaggttgctggctcctctattaccaagaagacatgtttgttaatcactgtgtgttagaagaaggcctctatgctgaccttacttcctgcggttgcccagcatctaaagtcaaatctctcaagcccattgactatgtttttgaagaaccctccatcagcctttttgctctggagcattgtgagggaagagagttacatctagaagaggctgtgaactctgttctgaacaaggacctacacttctacacccagtctgtgtgggtaaaaagtggactatggatagcttatgaaggatccaatttcttgggaagacaaatcctactcaggcctaatgagatcccaaactggacagcattcagcagatggaaaacaattggttccctccgtcctatgaagcagcctgcagtgtacatcagaataaagaaccgtgcccagggtgaatatctgacagtcactggaagtctagcagacaccagggcaacatctgtgtgcatttctccctatagtggaaagaatactcagatctggtactactgccgaggactctttaaatccaaggccagtgatacatgtcttgatgtgattggtggccgggacacacctggagctaaagtagctctatggactgaacatgggcaattcaggcagaagtggagactgaataaaaatggaactatcagctcttatctcagtgatcaacttgtccttgatgttaaaggaggaaattattgtgacaagactcatgtaattgtaaatcagcccctggagggagaagaaacacagaaatgggacattgaaatattgtgagagaatcaacatccctagaaagatccctagaaagagcaaagaaggaaacacatctgtcattgtcttgtggacgtggaaaggaagctactgtcctcacactcctggatcactgagcagaatgaacattttctccagcctctgagactatcgctcttaaccatggaaaagctcaaaatattcttgccattactcagtgttcctataaagaaaatattatgatatcttggaaaggttctattcctgatctccagctgtggtgagcaagtttcctgaagtgtttattttctctcatatccaccaaacgtgaatcctgttcctgatggcccgttattggacactggtgatgctattatcctgtattatttattaatatcctacctagatgcttgtatgagtacaaagcataaagaaacagatttctataggtcaagtcatacttttgcaaacagatgagtaattttttagcaacacctgaaaatatactaaactttcctagataaactttaaggtttctatactgaggcttttataatgaacgcacctcgttaagtatttatacttgtaactaaccccaggcagggacctcagctttgttaggaataaggcacaagaagtattttctgtagctattgtttcctcagtccttcaaactaaaaaagtacaaataaataacctatggccaaacttgcactgttacgtgttaaccaagacatccctttaggtgacaagactctataacagtggttacctgtctccatgttgacacttcatcctagatttaaggagaggcatcaatttttttttttttttgcctcaagagaaatttcaaatatccaaattaaaacacagtagcatttgaaccttgaccttaccatctctttaagtaaacgtggagttgatttctctactaaataacagaaacctcagtttttcactcccattgtaagtaacttttatttaagtaagtaaaatcaggtaggaaatcacctttgacttagcttccagtagtcattaccaccttttactgcacaattcacaagcatgttttcctggtgaattggactgaaaattacattttgacaactttttttccttttatccccaacttttgccagaaagcagaaaaatgctctatttttataaagaaagattaaattctccaatgatattttaaaaaatatcaacctacatgcactttagaatgtaaaataacaatgactattttaaactcgaagacccactattttgagtattttttatagactttaaatactgggtttttttcctccttcaatctcaggcttttctccatcttttaagcagcctctgtaactcccttttgtccataggtgttgcgtgcctctcatctgtggggaagtattatttaataaaatttatgttacaggataactttattttaatgggcatgggcttgtctatacacaaaggtatgtatattttcattataaaaaaccagtttaaaattttttcttattttaattgtttgaaatttttctagagccaaagaagctctttaaagaagttgtttcttccaaagaacaaagccaggttaatgacattcaattctaaatgatacattggaattgtgccttttctaccacactggattaaataaacttgtcaaaata

SEQ ID NO: 4920 - DNA, 578 bp, Homo sapiens
  source 1..578: mol_type = unassigned DNA; mol_type = unassigned DNA
aattgacccattccatggaaaaagatagttagaatcctactttactccaaacacaaaaataagttccagatggattaataacaagctaaatgtgaaaagcaaactttacaacttagaagaaaatataggaatctaccctgatgatactgcagtaggatggatttcttcaaacagaaaaagcacaaatgaataagaaaaaggtttttgaagaaccctccatcagcctttttgctctggagcattgtgagggaagagagttacatctagaagaggctgtgaactctgttctgaacaaggacctacacttctacacccagtctgtgtgggtaaaaagtggactatggatagcttatgaaggatccaatttcttgggaagacaaatcctactcaggcctaatgagatcccaaactggacagcattcagcagatggaaaacaattggttccctccgtcctatgaagcagcctgcagtgtacatcagaataaagaaccgtgcccagggtgaatatctgacagtcactggaagtctagcagacaccagggcaacatctgtgtgcatttctccctatagtggaaag

SEQ ID NO: 4921 - DNA, 1252 bp, Homo sapiens
  source 1..1252: mol_type = unassigned DNA; mol_type = unassigned DNA
aattgacccattccatggaaaaagatagttagaatcctactttactccaaacacaaaaataagttccagatggattaataacaagctaaatgtgaaaagcaaactttacaacttagaagaaaatataggaatctaccctgatgatactgcagtaggatggatttcttcaaacagaaaaagcacaaatgaataagaaaaaggtttttgaagaaccctccatcagcctttttgctctggagcattgtgagggaagagagttacatctagaagaggctgtgaactctgttctgaacaaggacctacacttctacacccagtctgtgtgggtaaaaagtggactatggatagcttatgaaggatccaatttcttgggaagacaaatcctactcaggcctaatgagatcccaaactggacagcattcagcagatggaaaacaattggttccctccgtcctatgaagcagcctgcagtgtacatcagaataaagaaccgtgcccagggtgaatatctgacagtcactggaagtctagcagacaccagggcaacatctgtgtgcatttctccctatagtggaaagaatactcagatctggtactactgccgaggactctttaaatccaaggccagtgatacatgtcttgatgtgattggtggccgggacacacctggagctaaagtagctctatggactgaacatgggcaattcaggcagaagtggagactgaataaaaatggaactatcagctcttatctcagtgatcaacttgtccttgatgttaaaggaggaaattattgtgacaagactcatgtaattgtaaatcagcccctggagggagaagaaacacagaaatgggacattgaaatattgtgagagaatcaacatccctagaaagatccctagaaagagcaaagaaggaaacacatctgtcattgtcttgtggacgtggaaaggaagctactgtcctcacactcctggatcactgagcagaatgaacattttctccagcctctgagactatcgctcttaaccatggaaaagctcaaaatattcttgccattactcagtgttcctataaagaaaatattatgatatcttggaaaggttctattcctgatctccagctgtgagccaaagaagctctttaaagaagttgtttcttccaaagaacaaagccaggttaatgacattcaattctaaatgatacattggaattgtgccttttctaccacactggattaaataaacttgtc

SEQ ID NO: 4922 - DNA, 1035 bp, Homo sapiens
  source 1..1035: mol_type = unassigned DNA; mol_type = unassigned DNA
gcagctgtcactcatcagtggttgtcccaatatccaagaagcagtagagggtgccatgcacattcaggaatgtgttccagaagatctagaactgaagaagaagatttttgctcagttagattccatcattgatgatcgagtgatcttaagcagttccacttcttgtctcatgccttccaagttgtttgctggcttggtccatgtgaagcaatgcatcgtggctcatcctgtgaatccgccatactacatcccgctggttgagctggtcccccacccggagacggcccctacgacagtggacagaacccacgccctgatgaagaagattggacagtgccccatgcgagtccagaaggaggtggccggcttcgttctgaaccgcctgcaatatgcaatcatcagcgaggcctggcggctagtggagttggcttcagttttgggatgaagcagccctgtggtcttggaaatgccagatggacatgtctggccacaatctactgacacttacttcccctgccggaggcgtgctccctgggtcacgtgatcttattggctgggatgtcatttcaagtctacatttttaaggcattagcataatgaaggacattgtgttgtgacaatagacttttggctggacagtagctaagtttgttgcctgtaaattctttcccatgagggcagggtatgtggaggtgcctgggaatgaatctgcaaccctcggcaggttctcagcctgctggtgtgagttggtggtgatgagcttcggaaattgctgaccttgggttctgcctgtccttcggaatgatgtcatccctgtgctggactgctgtccttagggcctgggccgcagagattgagttcttggtctcttgatttgtcagggtgggtgtggtctggggcatctggatggggccctgagattccagaacttcatcgttgagctttacttcagacatgtctgccaactgttaggagacattgttttagttaatgaagtgtatctcaaagatcatgtagtaaaattgacagatgagg

SEQ ID NO: 4923 - DNA, 1581 bp, Homo sapiens
  source 1..1581: mol_type = unassigned DNA; mol_type = unassigned DNA
agagctcgcagctccgccggcgcctggtcccagcgcccgcggcgccgcgtccccggcccaaccatggcgtcctccgcggccggctgcgtggtgatcgttggcagaattaaaactctgtacccattgaacaacagctgctcatttcccccagccccagcccctggcatccacccttctagctttctgtctctatgggtacctcagtggagtcattgggcgaagctgggccatgctgtttgccagtggaggcttccaggtgaaactctatgacattgagcaacagcagataaggaacgccctggaaaacatcagaaaggagatgaagttgctggagcaggcaggttctctgaaaggctccctgagtgtggaagagcagctgtcactcatcagtggttgtcccaatatccaagaagcagtagagggtgccatgcacattcaggaatgtgttccagaagatctagaactgaagaagaagatttttgctcagttagattccatcattgatgatcgagtgatcttaagcagttccacttcttgtctcatgccttccaagttgtttgctggcttggtccatgtgaagcaatgcatcgtggctcatcctgtgaatccgccatactacatcccgctggttgagctggtcccccacccggagacggcccctacgacagtggacagaacccacgccctgatgaagaagattggacagtgccccatgcgagtccagaaggaggtggccggcttcgttctgaaccgcctgcaatatgcaatcatcagcgaggcctggcggctagtggaggaaggaatcgtgtctcctagtgacctggaccttgtcatgtcagaagggttgggcatgcggtatgcattcattggacccctggaaaccatgcatctcaatgcagaaggtatgttaagctactgcgacagatacagcgaaggcataaaacatgtcctacagacttttggacccattccagagttttccagggccactgctgagaaggttaaccaggacatgtgcatgaaggtccctgatgacccggagcacttagctgccaggaggcagtggagggacgagtgcctcatgagactcgccaagttgaagagtcaagtgcagccccagtgaatttcttgtaatgcagcttccactcctctcattggaggccctatttgggaacactgcaagcccttaatcagccctctgtgacataggtagcagcccacggagatcctaagctggctgtcttgtgtgcagcctgagtggggtggtgcaggccggtagtctgcccgtcactttggatcatagccctgggcctggcggcacagcagcacttgcgttctcggggctgtcgatttcctgccacctgggcagataacctggagattttcaccttttcttttcagcttgattgcatttgactatattttacagccagtgattgtagtttcatgttaatatgtggcaaaatatttttgtaattattttctaatccctttctgagtactctggggccctgcatttatgaggcacctaccttcattttgctaacgcttattctgaataaaagtttttgattccttaaa

SEQ ID NO: 4924 - DNA, 1485 bp, Homo sapiens
  source 1..1485: mol_type = unassigned DNA; mol_type = unassigned DNA
agagctcgcagctccgccggcgcctggtcccagcgcccgcggcgccgcgtccccggcccaaccatggcgtcctccgcggccggctgcgtggtgatcgttggcagtggagtcattgggcgaagctgggccatgctgtttgccagtggaggcttccaggtgaaactctatgacattgagcaacagcagataaggaacgccctggaaaacatcagaaaggagatgaagttgctggagcaggcaggttctctgaaaggctccctgagtgtggaagagcagctgtcactcatcagtggttgtcccaatatccaagaagcagtagagggtgccatgcacattcaggaatgtgttccagaagatctagaactgaagaagaagatttttgctcagttagattccatcattgatgatcgagtgatcttaagcagttccacttcttgtctcatgccttccaagttgtttgctggcttggtccatgtgaagcaatgcatcgtggctcatcctgtgaatccgccatactacatcccgctggttgagctggtcccccacccggagacggcccctacgacagtggacagaacccacgccctgatgaagaagattggacagtgccccatgcgagtccagaaggaggtggccggcttcgttctgaaccgcctgcaatatgcaatcatcagcgaggcctggcggctagtggaggaaggaatcgtgtctcctagtgacctggaccttgtcatgtcagaagggttgggcatgcggtatgcattcattggacccctggaaaccatgcatctcaatgcagaaggtatgttaagctactgcgacagatacagcgaaggcataaaacatgtcctacagacttttggacccattccagagttttccagggccactgctgagaaggttaaccaggacatgtgcatgaaggtccctgatgacccggagcacttagctgccaggaggcagtggagggacgagtgcctcatgagactcgccaagttgaagagtcaagtgcagccccagtgaatttcttgtaatgcagcttccactcctctcattggaggccctatttgggaacactgcaagcccttaatcagccctctgtgacataggtagcagcccacggagatcctaagctggctgtcttgtgtgcagcctgagtggggtggtgcaggccggtagtctgcccgtcactttggatcatagccctgggcctggcggcacagcagcacttgcgttctcggggctgtcgatttcctgccacctgggcagataacctggagattttcaccttttcttttcagcttgattgcatttgactatattttacagccagtgattgtagtttcatgttaatatgtggcaaaatatttttgtaattattttctaatccctttctgagtactctggggccctgcatttatgaggcacctaccttcattttgctaacgcttattctgaataaaagtttttgattccttaaagaca

SEQ ID NO: 4925 - DNA, 1191 bp, Homo sapiens
  source 1..1191: mol_type = unassigned DNA; mol_type = unassigned DNA
aggttagaaggcacaggtggcgagatgagccgggtaccagcgttcctgagcgcggccgaggtggaggaacacctccgcagctccagcctcctcatcccgcctctagagacggccctggccaacttctccagcggtcccgaaggaggggtcatgcagcccgtgcgcaccgtggtgccggtgaccaagcacaggggctacctgggggtcatgcccgcctacagtgctgcagaggatgcactgaccaccaagttggtcaccttctacgaggaccgcggcatcacctcggtcgtcccttcccaccaggctactgtgctactctttgagcccagcaatggcaccctgctggcggtcatggatggaaatgtcataactgcaaagagaacagctgcagtttctgccattgccaccaagtttctgaaacctcccagcagtgaagtgctgtgcatccttggggctggggtccaggcctacagccattatgagatcttcacagagcagttctcctttaaggaggttatctaatttttgcataaaatttgcatagtcttctatcaagaagggtgaagaggttaaccatgcacttccggccgggcaaaatgtcctgtttttcaccttgcttggtgaacttgcttagacataaagtttgtttccgtgaggatatggaaccgcaccaaagaaaatgcagagaagtttgcagacacagtgcaaggagaggtacgggtctgttcttcggtccaggaggctgtggcaggtgcagatgtgatcatcacagtcaccctggcaacagagcccattttgtttggtgaatgggtgaagccaggggctcacatcaatgctgttggagccagcagacctgactggagagaactggatgatgagctcatgaaagaagctgtgctgtacgtggattcccaggaggctgccctgaaggagtctggagatgtcctgctgtcaggggccgagatctttgctgagctgggagaagtgattaagggagtgaaaccagcccactgtgagaagaccaccgtgttcaagtctttggctgcacccatttcactgaatcttaaatgatgctttcaagacagaaggaagaacagtacacctgagatgaccccaaagcctacatcaggcctgctcaacacagcagatcccagatgcttttgagggcaatgaaacaaatctgagatgtac

SEQ ID NO: 4926 - DNA, 461 bp, Homo sapiens
  source 1..461: mol_type = unassigned DNA; mol_type = unassigned DNA
ctgttggagccagcagacctgactggagagaactggatgatgagctcatgaaagaagctgtgctgtacgtggattcccaggaggctgccctgaaggagtctggagatgtcctgctgtcaggggccgagatctttgctgagctgggagaagtgattaagggagtgaaaccagcccactgtgagaagaccaccgtgttcaagtctttgggaatggcagtggaagacacagttgcagccaaactcatctatgattcctggtcatctgctgcacccatttcactgaatcttaaatgatgctttcaagacagaaggaagaacagtacacctgagatgaccccaaaggtgggccttcttttgagaaaatttcaaatgcaaaattccagatttacagatgaaactgtcagtaagacaattcatgggttttcctagtggctttaagctattaaaacttgcaaaactttg

SEQ ID NO: 4927 - DNA, 1471 bp, Homo sapiens
  source 1..1471: mol_type = unassigned DNA; mol_type = unassigned DNA
cttgtctgccactatgtgagatatacctttcaccttctgccgtgattgtgaggcctcctcagccacgtggaactgtaaaaactcctggaagaaaagatcctgcaatttggctttttgtgagatggaaaagattacaccttgccctgcaaacttcccccctttaaaggcgaaggtttgttagagcagcgggcgcgctcataaagggcacagccgagggtacgtggatcgcggtgcggagactgaggttagaaggcacaggtggcgagatgagccgggtaccagcgttcctgagcgcggccgaggtggaggaacacctccgcagctccagcctcctcatcccgcctctagagacggccctggccaacttctccagcggtcccgaaggaggggtcatgcagcccgtgcgcaccgtggtgccggtgaccaagcacaggggctacctgggggtcatgcccgcctacagtgctgcagaggatgcactgaccaccaagttggtcaccttctacgaggaccgcggcatcacctcggtcgtcccttcccaccaggctactgtgctactctttgagcccagcaatggcaccctgctggcggtcatggatggaaatgtcataactgcaaagagaacagctgcagtttctgccattgccaccaagtttctgaaacctcccagcagtgaagtgctgtgcatccttggggctggggtccaggcctacagccattatgagatcttcacagagcagttctcctttaaggaggtgaggatatggaaccgcaccaaagaaaatgcagagaagtttgcagacacagtgcaaggagaggtacgggtctgttcttcggtccaggaggctgtggcaggtgcagatgtgatcatcacagtcaccctggcaacagagcccattttgtttggtgaatgggtgaagccaggggctcacatcaatgctgttggagccagcagacctgactggagagaactggatgatgagctcatgaaagaagctgtgctgtacgtggattcccaggaggctgccctgaaggagtctggagatgtcctgctgtcaggggccgagatctttgctgagctgggagaagtgattaagggagtgaaaccagcccactgtgagaagaccaccgtgttcaagtctttgggaatggcagtggaagacacagttgcagccaaactcatctatgattcctggtcatctggtaaataaaacaaaggaacttgatgttgagatggatgcttgaggaatattgctgctggttctcataatttctagagtaaatgagggagtccagtccccagtgaactctccttttgtgcttatcatgttttaccttaaatgctgagatcctcatttatgtttgtagttggaaagcaaagctaggtagccatttcttctgttctaccaagttataatagcattcatttccctttatatttccctgaaataaagcacattccaattgtgca

SEQ ID NO: 4928 - DNA, 556 bp, Homo sapiens
  source 1..556: mol_type = unassigned DNA; mol_type = unassigned DNA
ctatttcttaataagtatttcgtcctactgattgggagagcatggcctggggaatgagggggtattttgaatctgagtgtgttcacgagtcctttgttcacctctctcctgtgctttgggcttcttagcagcctttggcactaatcctgggcttaaggtctgttttgctgtctcttagctgttggagccagcagacctgactggagagaactggatgatgagctcatgaaagaagctgtgctgtacgtggattcccaggaggctgccctgaaggagtctggagatgtcctgctgtcaggggccgagatctttgctgagctgggagaagtgattaagggagtgaaaccagcccactgtgagaagaccaccgtgttcaagtctttgggtaagatccattgctccctgggcacaaatccaactagcgcacaaggcaggttcacccattggtggaaagagcaatgagtcaccagactctgcagctgaatcattgtgctccatcattcaggtcaattatttacatggtttagcctagtgctaagcccatgaactctggaac

SEQ ID NO: 4929 - DNA, 874 bp, Homo sapiens
  source 1..874: mol_type = unassigned DNA; mol_type = unassigned DNA
tttcaaatggggagtttccctgcacaagctttcttgtctgccactatgtgagatatacctttcaccttctgccgtgattgtgaggcctcctcagccacgtggaactagacggccctggccaacttctccagcggtcccgaaggaggggtcatgcagcccgtgcgcaccgtggtgccggtgaccaagcacaggggctacctgggggtcatgcccgcctacagtgctgcagaggatgcactgaccaccaagttggtcaccttctacgaggaccgcggcatcacctcggtcgtcccttcccaccaggctactgtgctactctttgagcccagcaatggcaccctgctggcggtcatggatggaaatgtcataactgcaaagagaacagctgcagtttctgccattgccaccaagtttctgaaacctcccagcagtgaagtgctgtgcatccttggggctggggtccaggcctacagccattatgagatcttcacagagcagttctcctttaaggaggtgaggatatggaaccgcaccaaagaaaatgcagagaagtttgcagacacagtgcaaggagaggtacgggtctgttcttcggtccaggaggctgtggcaggtgcagatgtgatcatcacagtcaccctggcaacagagcccattttgtttggtgaatgggtgaagccaggggctcacatcaatgctgttggagccagcagacctgactggagagaactggatgatgagctcatgaaagaagctgtgctgtacgtggattcccaggaggctgccctgaaggagtctggagatgtcctgctgtcaggggccgagatctttgctgagctgggagaagtgattaagggagtgaaaccagcccact

SEQ ID NO: 4930 - DNA, 1507 bp, Homo sapiens
  source 1..1507: mol_type = unassigned DNA; mol_type = unassigned DNA
cgggtaccagcgttcctgagcgcggccgaggtggaggaacacctccgcagctccagcctcctcatcccgcctctagagacggccctggccaacttctccagcggtcccgaaggaggggtcatgcagcccgtgcgcaccgtggtgccggtgaccaagcacaggggtgctgcagaggatgcactgaccaccaagttggtcaccttctacgaggaccgcggcatcacctcggtcgtcccttcccaccaggctactgtgctactctttgagcccagcaatggcaccctgctggcggtcatggatggaaatgtcataactgcaaagagaacagctgcagtttctgccattgccaccaagtttctgaaacctcccagcagtgaagtgctgtgcatccttggggctggggtccaggcctacagccattatgagatcttcacagagcagttctcctttaaggaggtgaggatatggaaccgcaccaaagaaaatgcagagaagtttgcagacacagtgcaaggagaggtacgggtctgttcttcggtccaggaggctgtggcaggtgcagatgtgatcatcacagtcaccctggcaacagagcccattttgtttggtgaatgggtgaagccaggggctcacatcaatgctgttggagccagcagacctgactggagagaactggatgatgagctcatgaaagaagctgtgctgtacgtggattcccaggaggctgccctgaaggagtctggagatgtcctgctgtcaggggtgaggcccttctgaccccagtcagggctgccacctggctggcctcacctggatcccagggtttcattaacttcccttccagtttggtctgctccagacctcagccaccccacctccttgtaggggaaggagctcctaaacattttgcaaccctctttaattccattccagaaaaatatgggcattatgggtggtgacatgtgtgttcctggaaggagaagctcagtggattttatttttttgctgggctgtcctctaaagaagtgggattggaagcttcttgcagcctggaaaccttcccaatgtggccaacatgataagactgtgttgcccaccttctggcctcattttacggttataatcagcataaaacaagaagggagctgctggcatgcatgttcagataacagcatgtctatttcctcactgacacaatgatcttggcaggacagctccctgagcaccaactcgaatctctgtgtttatggtatcacaaaagcaaatgccaccccaaaaggatttcggggccagcctcctccctaatatcattcagtgtacaaaggatctctctctttttttttttttttttaatcaaatttatctcttatccaattcaggaattccctgggctggcttcaaaagccaaccctgcacagactttagcttcatgcctgggtcagcgtatgtttgtttcctaggccgagatctttgctgagctgggagaagtgattaagggagtgaaacc

SEQ ID NO: 4931 - DNA, 696 bp, Homo sapiens
  source 1..696: mol_type = unassigned DNA; mol_type = unassigned DNA
tggaccaaacaatattgactcccagcacgccaccgcgatgtccatcttggggaatccgttgctggaagggacccatctcgcccacccttaggggtcgaggtgggcgaagggggaggagagggctggcggggcggggcggggttgctccgcccccggaggctgggctgtgaccagcaggcggctccacagagcagcgggcgcgctcataaagggcacagccgagggtacgtggatcgcggtgcggagactgaggttagaaggcacaggtggcgagatgagccgggtaccagcgttcctgagcgcggccgaggtggaggaacacctccgcagctccagcctcctcatcccgcctctagagacggccctggccaacttctccagcggtcccgaaggaggggtcatgcagcccgtgcgcaccgtggtgccggtgaccaagcacaggggctacctgggggtcatgcccgcctacagtgctgcagaggatgcactgaccaccaagttggtcaccttctacgaggaccgcggcatcacctcggtcgtcccttcccaccaggctactgtgctactctttgagcccagcaatggcaccctgctggcggtcatggatggaaatgtcataactgcaaagagaacagctgcagtttctgccattgccaccaagtttctgaaacctcccagcagtgaagtgctgtgcat

SEQ ID NO: 4932 - DNA, 457 bp, Homo sapiens
  source 1..457: mol_type = unassigned DNA; mol_type = unassigned DNA
tttgttagaggcgcgcgctttcgagctccgcgcgccgaccacgggcagcgggtgggccccctggcgtctggagcagcggccagcgcagaggacgcaggcagaaggaggaagggctggccggggctcccgagcactcactgctcaagcctcgccgccgcctccgccgctgcggggtgcgcgtccatctggttggggctcctcatcccaacaccctccccaacggcccgccgcgcagccgcccgcgggcgagtctgtagcctgatcctgcgcggacccgccagaggcacaccaggagagcagcgggcgcgctcataaagggcacagccgagggtacgtggatcgcggtgcggagactgaggttagaaggcacaggtggcgagatgagccgggtaccagcgttcctgagcgcggccgaggtggaggaacacctccgcagctccagcctcctcatcccgcc

SEQ ID NO: 4933 - DNA, 445 bp, Homo sapiens
  source 1..445: mol_type = unassigned DNA; mol_type = unassigned DNA
cgcgcggaggagccgggagcgccacctcagtccccccaccgccccaccccgcgcatgctcccaagagccccagaccacccttctccggcttccgagatacttcatccgttgcttgtcctggcccaccgctcagtcccccaactctaggacgacagaggttagggataaggggaatgagacacgcgccttggctgcagcattcaaggtaaaaactcctggaagaaaagatcctgcaatttggctttttgtgagatggaaaagattacaccttgccctgcaaacttcccccctttaaaggcgaaggtttgttaggttagttagcctgtgagaaaactgtgcgttcttagcaatcaaaggccagacatctgggggtacaggggggaggaagactaggataagagactctagacggggacagaattaaaaggaaaaaaaaattaaataa

SEQ ID NO: 4934 - DNA, 1400 bp, Homo sapiens
  source 1..1400: mol_type = unassigned DNA; mol_type = unassigned DNA
gtaaaaactcctggaagaaaagatcctgcaatttggctttttgtgagatggaaaagattacaccttgccctgcaaacttcccccctttaaaggcgaaggtttgttagagcagcgggcgcgctcataaagggcacagccgagggtacgtggatcgcggtgcggagactgaggttagaaggcacaggtggcgagatgagccgggtaccagcgttcctgagcgcggccgaggtggaggaacacctccgcagctccagcctcctcatcccgcctctagagacggccctggccaacttctccagcggtcccgaaggaggggtcatgcagcccgtgcgcaccgtggtgccggtgaccaagcacaggggctacctgggggtcatgcccgcctacagtgctgcagaggatgcactgaccaccaagttggtcaccttctacgaggaccgcggcatcacctcggtcgtcccttcccaccaggctactgtgctactctttgagcccagcaatggcaccctgctggcggtcatggatggaaatgtcataactgcaaagagaacagctgcagtttctgccattgccaccaagtttctgaaacctcccagcagtgaagtgctgtgcatccttggggctggggtccaggcctacagccattatgagatcttcacagagcagttctcctttaaggaggtgaggatatggaaccgcaccaaagaaaatgcagagaagtttgcagacacagtgcaaggagaggtacgggtctgttcttcggtccaggaggctgtggcaggtgcagatgtgatcatcacagtcaccctggcaacagagcccattttgtttggtgaatgggtgaagccaggggctcacatcaatgctgttggagccagcagacctgactggagagaactggatgatgagctcatgaaagaagctgtgctgtacgtggattcccaggaggctgccctgaaggagtctggagatgtcctgctgtcaggggccgagatctttgctgagctgggagaagtgattaagggagtgaaaccagcccactgtgagaagaccaccgtgttcaagtctttgggaatggcagtggaagacacagttgcagccaaactcatctatgattcctggtcatctggtaaataaaacaaaggaacttgatgttgagatggatgcttgaggaatattgctgctggttctcataatttctagagtaaatgagggagtccagtccccagtgaactctccttttgtgcttatcatgttttaccttaaatgctgagatcctcatttatgtttgtagttggaaagcaaagctaggtagccatttcttctgttctaccaagttataatagcattcatttccctttatatttccctgaaataaagcacattccaattgtgcagtg

SEQ ID NO: 4935 - DNA, 1191 bp, Homo sapiens; identical to SEQ ID NO: 4925
  source 1..1191: mol_type = unassigned DNA; mol_type = unassigned DNA

SEQ ID NO: 4936 - DNA, 461 bp, Homo sapiens; identical to SEQ ID NO: 4926
  source 1..461: mol_type = unassigned DNA; mol_type = unassigned DNA

SEQ ID NO: 4937 - DNA, 1400 bp, Homo sapiens; identical to SEQ ID NO: 4934
  source 1..1400: mol_type = unassigned DNA; mol_type = unassigned DNA

SEQ ID NO: 4938 - DNA, 1471 bp, Homo sapiens; identical to SEQ ID NO: 4927
  source 1..1471: mol_type = unassigned DNA; mol_type = unassigned DNA

SEQ ID NO: 4939 - DNA, 556 bp, Homo sapiens; identical to SEQ ID NO: 4928
  source 1..556: mol_type = unassigned DNA; mol_type = unassigned DNA

SEQ ID NO: 4940 - DNA, 874 bp, Homo sapiens; identical to SEQ ID NO: 4929
  source 1..874: mol_type = unassigned DNA; mol_type = unassigned DNA

SEQ ID NO: 4941 - DNA, 1507 bp, Homo sapiens; identical to SEQ ID NO: 4930
  source 1..1507: mol_type = unassigned DNA; mol_type = unassigned DNA

SEQ ID NO: 4942 - DNA, 696 bp, Homo sapiens; identical to SEQ ID NO: 4931
  source 1..696: mol_type = unassigned DNA; mol_type = unassigned DNA

SEQ ID NO: 4943 - DNA, 457 bp, Homo sapiens; identical to SEQ ID NO: 4932
  source 1..457: mol_type = unassigned DNA; mol_type = unassigned DNA

SEQ ID NO: 4944 - DNA, 445 bp, Homo sapiens; identical to SEQ ID NO: 4933
  source 1..445: mol_type = unassigned DNA; mol_type = unassigned DNA

SEQ ID NO: 4945 - DNA, 1661 bp, Homo sapiens
  source 1..1661: mol_type = unassigned DNA; mol_type = unassigned DNA
gagaattggggtggggcgcgccaagaggagcaagcattatagaacgtggggagcatgagaaatacacggaggtggaaacgccggagtggctggcgggtaaaggcagcgggcgcagatgaagcgggctgggcgtcccacgcgcagaaccgtcccggacagaagccgcagggctgcgctggctggaaaaaggaacgcgagtacagcgcgcgtggcgcggggtctgctccaggacggaatcttttgggtggcccgcatgaggggtttgcaggaccccgggcctttgggaagttatctgctaaactccagtagaccctgaggagcagcggctcatgaatcttcttaaacttctgtcatcagcggctgggccagctgaaggtgaccatggcacacgagggagagagaagcccgcgagaggcggagaaatgtggggtcgtccaggagggtcgacaaggcaaagaacctgaagacgacccaaaagggtacctagagttgaacttcctctctttttagaagaatggatttctcggagtctgaaaaatttatggttcttctctggaagaattttattttaaagaggcggcgatgtattgctttagttgtggaaatggtcctcacatttctgtttagtgctgcgcttttggcaacacgctctgttattactataaataagaacggacctttcgattttgctgctcagcctgtcgatgaagtgcctttctacatcacagcttccttaatttctccttctcctttggaattggcttacgtgccttccagaagtactgtggttcagggtattattgaaagagtgaaaatggatttaaaccctcaaatgaaaggttagaaattaacattttctgaaaaaacatacagaattactaaatcgatttagtgaagacatacttacaaccttattaactggttcttaacctcccaagtaaaacatcgttggaatcctcatactaagtataaatattatggactttgttaaacttgaaagttaaatttatataaaatattttgttcatagagcccagaacaaatagtaatatttcaaaatgagatgaccaattattattattattctaagttgttatccagttttgtgatactgttttttctatctggttgtgcttcttgaacctgggtaagtatacctccaggggtgtgtgattttgtgccacaggtcagtggtcagttatttaaaataatgttttatattaaaatgtggtgtgagtaatataggaaggctttagaaaacacttaagctatgtagaattattttaaaagccctcagtctctcacttaccttcatattcccggatcagtttcttacctctttctcttagaggtaaatactgtgagaagtttaggtcggccgggcccagtggctcacgcctgtaatcccagcattttgggaggctgaggtgggcagatcacctgaggtcaggagttcaagaccagcctggccaacatggcaaaaccccatctctactaaaaatataagaattagccagacatggtggtatgcacctatagtcccagctacttgggaggctgaggcatgcgaattgcttgaacccaggaggaggaggaggttgcagtgaggtgaaattgcaccactgcactccagcctgggtgacagaccaagactctgtctc

SEQ ID NO: 4946 - DNA, 559 bp, Homo sapiens
  source 1..559: mol_type = unassigned DNA; mol_type = unassigned DNA
agcattatagaacgtggggagcatgagaaatacacggaggtggaaacgccggagtggctggcgggtaaaggcagcgggcgcagatgaagcgggctgggcgtcccacgcgcagaaccgtcccggacagaagccgcagggctgcgctggctggaaaaaggaacgcgagtacagcgcgcgtggcgcggggtctgctccaggacggaatcttttgggtggcccgcatgaggggtttgcaggaccccgggcctttgggaagttatctgctaaactccagtagaccctgaggagcagcggctcatgaatcttcttaaacttctgtcatcagcggctgggccagctgaaggtgaccatggcacacgagggagagagaagcccgcgagaggcggagaaatgtggggtcgtccaggagggtcgacaaggcaaagaacctgaagacgacccaaaaggagttgaacttcctctctttttagaagaatggatttctcggagtctgaaaaatttatggttcttctctggaagaattttattttaaagaggcggcgatgtattgctttagttg

SEQ ID NO: 4947 - DNA, 2028 bp, Homo sapiens
  source 1..2028: mol_type = unassigned DNA; mol_type = unassigned DNA
gctctaagaaaagaaagttttgggcctagagtcaggaaaaagccttttcaagtcaagctgagaactttaaggtggtcttggctacctcattttatgcaaagtaggcagaaaatttaaaagaaaagaaacatatttaagtacaattaagaaaattacagtgtttcagttaaagcagttcagtgctttttagaaaaggagctgaaattaaataagttgaacttcctctctttttagaagaatggatttctcggagtctgaaaaatttatggttcttctctggaagaattttattttaaagaggcggcgatgtattgctttagttgtggaaatggtcctcacatttctgtttagtgctgcgcttttggcaacacgctctgttattactataaataagaacggacctttcgattttgctgctcagcctgtcgatgaagtgcctttctacatcacagcttccttaatttctccttctcctttggaattggcttacgtgccttccagaagtactgtggttcagggtattattgaaagagtgaaaatggatttaaaccctcaaatgaaaggttagaaattaacattttctgaaaaaacatacagaattactaaatcgatttagtgaagacatacttacaaccttattaactggttcttaacctcccaagtaaaacatcgttggaatcctcatactaagtataaatattatggactttgttaaacttgaaagttaaatttatataaaatattttgttcatagagcccagaacaaatagtaatatttcaaaatgagatgaccaattattattattattctaagttgttatccagttttgtgatactgttttttctatctggttgtgcttcttgaacctgggtaagtatacctccaggggtgtgtgattttgtgccacaggtcagtggtcagttatttaaaataatgttttatattaaaatgtggtgtgagtaatataggaaggctttagaaaacacttaagctatgtagaattattttaaaagccctcagtctctcacttaccttcatattcccggatcagtttcttacctctttctcttagaggtaaatactgtgagaagtttaggtcggccgggcccagtggctcacgcctgtaatcccagcattttgggaggctgaggtgggcagatcacctgaggtcaggagttcaagaccagcctggccaacatggcaaaaccccatctctactaaaaatataagaattagccagacatggtggtatgcacctatagtcccagctacttgggaggctgaggcatgcgaattgcttgaacccaggaggaggaggaggttgcagtgaggtgaaattgcaccactgcactccagcctgggtgacagaccaagactctgtctcaaaaaaaaaaaaaaaaaagtttgtgggcatctccctagcacacctctctctacacatgtgcgtgcatgtgcacacacacacacacacacacacacacacacagtcaggcaacttttccatctttttttgtctttcaagagatatgagagtccttgagagtagatgccatctcaaagcattcttttttgttgtttgcttttttttatcaaagcattctttaaaataaagactgaaacaggagaatatgaagttcccagtaatttttaaattctacaacaaaaatatctcaacaaatttaaagtctattatgggttactccaatagtcgctttgggttactcaaaatattttctgatttccactctgatgtcttctttgatgcatggaatttcaaaatttttagaaatgtgttgctgaacttccaaacactgggggcttcttatctttctgttgttgatttctgttttaatttcctttcatcagagagtatactcaattccagttctttgacattttgagaactgtttatgactagtacatggtatattttgataaatgttttctgtgaatttgtaaaaactatgtgtgctataggttttgcttctggtgttctataaatgccacctgggcaaagttggctaagt

SEQ ID NO: 4948 - DNA, 556 bp, Homo sapiens
  source 1..556: mol_type = unassigned DNA; mol_type = unassigned DNA
atggatttctcggagtctgaaaaatttatggttcttctctggaagaattttattttaaagaggcggcgatgtattgctttagttgtggaaatggtcctcacatttctgtttagtgctgcgcttttggcaacacgctctgttattactataaataagaacggacctttcgattttgctgctcagcctgtcgatgaagtgcctttctacatcacagcttccttaatttctccttctcctttggaattggcttacgtgccttccagaagtactgtggttcagggtattattgaaagagtgaaaatggatttaaaccctcaaatgaaaggagtaccagctcatgataggagtcagtaattggatgctctgggcagcctatttcttcacgttcctctctttgtattttattatcatcatttttatgtgcataattttctttgtcaaggaacctgcaccagtcatccaaagcagtgacccaacgcttatctttatctttttgctgttttatgccatcgccacaatatgcttcagctttatggttagcactttcttcagtaga

SEQ ID NO: 4949 - DNA, 3697 bp, Homo sapiens
  source 1..3697: mol_type = unassigned DNA; mol_type = unassigned DNA
ggatcagcccaaggaggaggaagaggaaaacaagacaaacagccagtgcagaggagaggaacgtgtgtccagtgtcccgatccctgcggagctagtagctgagagctctgtgccctgggcaccttgcagccctgcacctgcctgccacttccccaccgaggccatgggcccaggagttctgctgctcctgctggtggccacagcttggcatggtcagggaatcccagtgatagagcccagtgtccctgagctggtcgtgaagccaggagcaacggtgaccttgcgatgtgtgggcaatggcagcgtggaatgggatggccccccatcacctcactggaccctgtactctgatggctccagcagcatcctcagcaccaacaacgctaccttccaaaacacggggacctatcgctgcactgagcctggagaccccctgggaggcagcgccgccatccacctctatgtcaaagaccctgcccggccctggaacgtgctagcacaggaggtggtcgtgttcgaggaccaggacgcactactgccctgtctgctcacagacccggtgctggaagcaggcgtctcgctggtgcgtgtgcgtggccggcccctcatgcgccacaccaactactccttctcgccctggcatggcttcaccatccacagggccaagttcattcagagccaggactatcaatgcagtgccctgatgggtggcaggaaggtgatgtccatcagcatccggctgaaagtgcagaaagtcatcccagggcccccagccttgacactggtgcctgcagagctggtgcggattcgaggggaggctgcccagatcgtgtgctcagccagcagcgttgatgttaactttgatgtcttcctccaacacaacaacaccaagctcgcaatccctcaacaatctgactttcataataaccgttaccaaaaagtcctgaccctcaacctcgatcaagtagatttccaacatgccggcaactactcctgcgtggccagcaacgtgcagggcaagcactccacctccatgttcttccgggtggtagagagtgcctacttgaacttgagctctgagcagaacctcatccaggaggtgaccgtgggggaggggctcaacctcaaagtcatggtggaggcctacccaggcctgcaaggttttaactggacctacctgggacccttttctgaccaccagcctgagcccaagcttgctaatgctaccaccaaggacacatacaggcacaccttcaccctctctctgccccgcctgaagccctctgaggctggccgctactccttcctggccagaaacccaggaggctggagagctctgacgtttgagctcacccttcgataccccccagaggtaagcgtcatatggacattcatcaacggctctggcacccttttgtgtgctgcctctgggtacccccagcccaacgtgacatggctgcagtgcagtggccacactgataggtgtgatgaggcccaagtgctgcaggtctgggatgacccataccctgaggtcctgagccaggagcccttccacaaggtgacggtgcagagcctgctgactgttgagaccttagagcacaaccaaacctacgagtgcagggcccacaacagcgtggggagtggctcctgggccttcatacccatctctgcaggagcccacacgcatcccccggatgagttcctcttcacaccagtggtggtcgcctgcatgtccatcatggccttgctgctgctgctgctcctgctgctattgtacaagtataagcagaagcccaagtaccaggtccgctggaagatcatcgagagctatgagggcaacagttatactttcatcgaccccacgcagctgccttacaacgagaagtgggagttcccccggaacaacctgcagtttggtaagaccctcggagctggagcctttgggaaggtggtggaggccacggcctttggtctgggcaaggaggatgctgtcctgaaggtggctgtgaagatgctgaagtccacggcccatgctgatgagaaggaggccctcatgtccgagctgaagatcatgagccacctgggccagcacgagaacatcgtcaaccttctgggagcctgtacccatggagggacagtggcttctccagccagggtgtggacacctatgtggagatgaggcctgtctccacttcttcaaatgactccttctctgagcaagacctggacaaggaggatggacggcccctggagctccgggacctgcttcacttctccagccaagtagcccagggcatggccttcctcgcttccaagaattgcatccaccgggacgtggcagcgcgtaacgtgctgttgaccaatggtcatgtggccaagattggggacttcgggctggctagggacatcatgaatgactccaactacattgtcaagggcaatgcccgcctgcctgtgaagtggatggccccagagagcatctttgactgtgtctacacggttcagagcgacgtctggtcctatggcatcctcctctgggagatcttctcacttgggctgaatccctaccctggcatcctggtgaacagcaagttctataaactggtgaaggatggataccaaatggcccagcctgcatttgccccaaagaatatatacagcatcatgcaggcctgctgggccttggagcccacccacagacccaccttccagcagatctgctccttccttcaggagcaggcccaagaggacaggagagagcgggactataccaatctgccgagcagcagcagaagcggtggcagcggcagcagcagcagtgagctggaggaggagagctctagtgagcacctgacctgctgcgagcaaggggatatcgcccagcccttgctgcagcccaacaactatcagttctgctgaggagttgacgacagggagtaccactctcccctcccacaaacttcaactcctccatggatggggcgacacggggagaacatacaaactctgccttcggtcatttcactcaacagctcggcccagctctgaaacttgggaaggtgagggattcaggggaggtcagaggatcccacttcctgagcatgggccatcactgccagtcaggggctgggggctgagccctcacccccccctcccctactgttctcatggtgttggcctcgtgtttgctatgccaactagtagaaccttctttcctaatccccttatcttcatggaaatggactgactttatgcctatgaagtccccaggagctacactgatactgagaaaaccaggctctttggggctagacagactggcagagagtgagatctccctctctgagaggagcagcagatgctcacagaccacactcagctcaggccccttggagcaggatggctcctctaagaatctcacaggacctcttagtctctgccctatacgccgccttcactccacagcctcacccctcccacccccatactggtactgctgtaatgagccaagtggcagctaaaagttgggggtgttctgcccagtcccgtcattctgggctagaaggcaggggaccttggcatgtggctggccacaccaagcaggaagcacaaactcccccaagctgactcatcctaactaacagtcacgccgtgggatgtctctgtccacattaaactaacagcattaatgcagtca

SEQ ID NO: 4950 - DNA, 3989 bp, Homo sapiens
  source 1..3989: mol_type = unassigned DNA; mol_type = unassigned DNA
gaagggcagacagagtgtccaaaagcgtgagagcacgaagtgaggagaaggtggagaagagagaagaggaagaggaagaggaagagaggaagcggagggaactgcggccaggctaaaaggggaagaagaggatcagcccaaggaggaggaagaggaaaacaagacaaacagccagtgcagaggagaggaacgtgtgtccagtgtcccgatccctgcggagctagtagctgagagctctgtgccctgggcaccttgcagccctgcacctgcctgccacttccccaccgaggccatgggcccaggagttctgctgctcctgctggtggccacagcttggcatggtcagggaatcccagtgatagagcccagtgtccctgagctggtcgtgaagccaggagcaacggtgaccttgcgatgtgtgggcaatggcagcgtggaatgggatggccccccatcacctcactggaccctgtactctgatggctccagcagcatcctcagcaccaacaacgctaccttccaaaacacggggacctatcgctgcactgagcctggagaccccctgggaggcagcgccgccatccacctctatgtcaaagaccctgcccggccctggaacgtgctagcacaggaggtggtcgtgttcgaggaccaggacgcactactgccctgtctgctcacagacccggtgctggaagcaggcgtctcgctggtgcgtgtgcgtggccggcccctcatgcgccacaccaactactccttctcgccctggcatggcttcaccatccacagggccaagttcattcagagccaggactatcaatgcagtgccctgatgggtggcaggaaggtgatgtccatcagcatccggctgaaagtgcagaaagtcatcccagggcccccagccttgacactggtgcctgcagagctggtgcggattcgaggggaggctgcccagatcgtgtgctcagccagcagcgttgatgttaactttgatgtcttcctccaacacaacaacaccaagctcgcaatccctcaacaatctgactttcataataaccgttaccaaaaagtcctgaccctcaacctcgatcaagtagatttccaacatgccggcaactactcctgcgtggccagcaacgtgcagggcaagcactccacctccatgttcttccgggtggtagagagtgcctacttgaacttgagctctgagcagaacctcatccaggaggtgaccgtgggggaggggctcaacctcaaagtcatggtggaggcctacccaggcctgcaaggttttaactggacctacctgggacccttttctgaccaccagcctgagcccaagcttgctaatgctaccaccaaggacacatacaggcacaccttcaccctctctctgccccgcctgaagccctctgaggctggccgctactccttcctggccagaaacccaggaggctggagagctctgacgtttgagctcacccttcgataccccccagaggtaagcgtcatatggacattcatcaacggctctggcacccttttgtgtgctgcctctgggtacccccagcccaacgtgacatggctgcagtgcagtggccacactgataggtgtgatgaggcccaagtgctgcaggtctgggatgacccataccctgaggtcctgagccaggagcccttccacaaggtgacggtgcagagcctgctgactgttgagaccttagagcacaaccaaacctacgagtgcagggcccacaacagcgtggggagtggctcctgggccttcatacccatctctgcaggagcccacacgcatcccccggatgagttcctcttcacaccagtggtggtcgcctgcatgtccatcatggccttgctgctgctgctgctcctgctgctattgtacaagtataagcagaagcccaagtaccaggtccgctggaagatcatcgagagctatgagggcaacagttatactttcatcgaccccacgcagctgccttacaacgagaagtgggagttcccccggaacaacctgcagtttggtaagaccctcggagctggagcctttgggaaggtggtggaggccacggcctttggtctgggcaaggaggatgctgtcctgaaggtggctgtgaagatgctgaagtccacggcccatgctgatgagaaggaggccctcatgtccgagctgaagatcatgagccacctgggccagcacgagaacatcgtcaaccttctgggagcctgtacccatggaggccctgtactggtcatcacggagtactgttgctatggcgacctgctcaactttctgcgaaggaaggctgaggccatgctgggacccagcctgagccccggccaggaccccgagggaggcgtcgactataagaacatccacctcgagaagaaatatgtccgcagggacagtggcttctccagccagggtgtggacacctatgtggagatgaggcctgtctccacttcttcaaatgactccttctctgagcaagacctggacaaggaggatggacggcccctggagctccgggacctgcttcacttctccagccaagtagcccagggcatggccttcctcgcttccaagaattgcatccaccgggacgtggcagcgcgtaacgtgctgttgaccaatggtcatgtggccaagattggggacttcgggctggctagggacatcatgaatgactccaactacattgtcaagggcaatgcccgcctgcctgtgaagtggatggccccagagagcatctttgactgtgtctacacggttcagagcgacgtctggtcctatggcatcctcctctgggagatcttctcacttgggctgaatccctaccctggcatcctggtgaacagcaagttctataaactggtgaaggatggataccaaatggcccagcctgcatttgccccaaagaatatatacagcatcatgcaggcctgctgggccttggagcccacccacagacccaccttccagcagatctgctccttccttcaggagcaggcccaagaggacaggagagagcgggactataccaatctgccgagcagcagcagaagcggtggcagcggcagcagcagcagtgagctggaggaggagagctctagtgagcacctgacctgctgcgagcaaggggatatcgcccagcccttgctgcagcccaacaactatcagttctgctgaggagttgacgacagggagtaccactctcccctcccacaaacttcaactcctccatggatggggcgacacggggagaacatacaaactctgccttcggtcatttcactcaacagctcggcccagctctgaaacttgggaaggtgagggattcaggggaggtcagaggatcccacttcctgagcatgggccatcactgccagtcaggggctgggggctgagccctcacccccccctcccctactgttctcatggtgttggcctcgtgtttgctatgccaactagtagaaccttctttcctaatccccttatcttcatggaaatggactgactttatgcctatgaagtccccaggagctacactgatactgagaaaaccaggctctttggggctagacagactggcagagagtgagatctccctctctgagaggagcagcagatgctcacagaccacactcagctcaggccccttggagcaggatggctcctctaagaatctcacaggacctcttagtctctgccctatacgccgccttcactccacagcctcacccctcccacccccatactggtactgctgtaatgagccaagtggcagctaaaagttgggggtgttctgcccagtcccgtcattctgggctagaaggcaggggaccttggcatgtggctggccacaccaagcaggaagcacaaactcccccaagctgactcatcctaactaacagtcacgccgtgggatgtctctgtccacattaaactaacagcattaatgcagtca

SEQ ID NO: 4951 - DNA, 886 bp, Homo sapiens
  source 1..886: mol_type = unassigned DNA; mol_type = unassigned DNA
gagatgggatctcactatgttgtccaggctggtctggaactcctggccttatgcaatcctcctgcatcaacctcccaaagtgttgggattacaggaatgagccactgcacctgtccctaaacagacttttaagagatcgttattacagttaccctgaggataccaaaatggcctcatctgtcagaatgagggtgatgagagtacccttctgcaagggttactgtgaggattaaatggtaaagcatgccaaggacttggcataggttttatactaaacttactttgactgggtttggggacctctgctgggtaggtctctctaggggtgtgtgttaatggcccctggaccctagggagctgcccatgggcatcctctgtcctatctcccagatacagcatcatgcaggcctgctgggccttggagcccacccacagacccaccttccagcagatctgctccttccttcaggagcaggcccaagaggacaggagagagcgggactataccaatctgccgagcagcagcagaagcggtggcagcggcagcagcagcagtgagctggaggaggagagctctagtgagcacctgacctgctgcgagcaaggggatatcgcccagcccttgctgcagcccaacaactatcagttctgctgaggagttgacgacagggagtaccactctcccctcccacaaacttcaactcctccatggatggggcgacacggggagaacatacaaactctgccttcggtcatttcactcaacagctcggcccagctctgaaacttgggaaggtgagggattcaggggaggtcagaggatcccacttcctgagcatgggccatcactgccagtcaggggctgggggctgagccctcacccccc

SEQ ID NO: 4952 - DNA, 723 bp, Homo sapiens
  source 1..723: mol_type = unassigned DNA; mol_type = unassigned DNA
gcagggagcccatgggcccttggacagaggccctttggtgcccagggacttaagggacctgtgtgcgtggcagccacggcccatgctgatgagaaggaggccctcatgtccgagctgaagatcatgagccacctgggccagcacgagaacatcgtcaaccttctgggagcctgtacccatggaggcatctcttgaggactgttggaagtgcaccacctcaggcccatccacccaggcctgctgattcaaaatctgcattgcagagattcccggggtgatttatctgcacatgagttgcagcggacagtggcttctccagccagggtgtggacacctatgtggagatgaggcctgtctccacttcttcaaatgactccttctctgagcaagacctggacaaggaggatggacggcccctggagctccgggacctgcttcacttctccagccaagtagcccagggcatggccttcctcgcttccaagaattgcatccaccgggacgtggcagcgcgtaacgtgctgttgaccaatggtcatgtggccaagattggggacttcgggctggctagggacatcatgaatgactccaactacattgtcaagggcaatgcccgcctgcctgtgaagtggatggccccagagagcatctttgactgtgtctacacggttcagagcgacgtctggtcctatggcatcctcctctgggagatcttctcacttg

SEQ ID NO: 4953 - DNA, 584 bp, Homo sapiens
  source 1..584: mol_type = unassigned DNA; mol_type = unassigned DNA
agggttggcactgggccccaggggcttctgtccctagagcccatggcctccactgcctgcctgcccacacaaagaccatgtgcaatgtgatcagaagctgagaggaccaggccagagggctgtgggagttcagaggtggacggacttttcaggctgaagcccaagtaccaggtccgctggaagatcatcgagagctatgagggcaacagttatactttcatcgaccccacgcagctgccttacaacgagaagtgggagttcccccggaacaacctgcagtttggtaagaccctcggagctggagcctttgggaaggtggtggaggccacggcctttggtctgggcaaggaggatgctgtcctgaaggtggctgtgaagatgctgaagtccacggcccatgctgatgagaaggaggccctcatgtccgagctgaagatcatgagccacctgggccagcacgagaacatcgtcaaccttctgggagcctgtacccatggaggccctgtactggtcatcacggagtactgttgctatggcgacctgctcaactttctgcgaaggaaggctgaggccatgctgggacc

SEQ ID NO: 4954 - DNA, 711 bp, Homo sapiens
  source 1..711: mol_type = unassigned DNA; mol_type = unassigned DNA
agggttggcactgggccccaggggcttctgtccctagagcccatggcctccactgcctgcctgcccacacaaagaccatgtgcaatgtgatcagaagctgagaggaccaggccagagggctgtgggagttcagaggtggacggacttttcaggctgaagcccaagtaccaggtccgctggaagatcatcgagagctatgagggcaacagttatactttcatcgaccccacgcagctgccttacaacgagaagtgggagttcccccggaacaacctgcagtttggtgagatggcagctcatcactccacagcttcctatcacagggcctgtgggggttgcagggagcccatgggcccttggacagaggccctttggtgcccagggacttaagggacctgtgtgcgtggcaggtaagaccctcggagctggagcctttgggaaggtggtggaggccacggcctttggtctgggcaaggaggatgctgtcctgaaggtggctgtgaagatgctgaagtccacggcccatgctgatgagaaggaggccctcatgtccgagctgaagatcatgagccacctgggccagcacgagaacatcgtcaaccttctgggagcctgtacccatggaggccctgtactggtcatcacggagtactgttgctatggcgacctgctcaactttctgcgaaggaaggctgaggccatgctgggacc

SEQ ID NO: 4955 - DNA, 1388 bp, Homo sapiens
  source 1..1388: mol_type = unassigned DNA; mol_type = unassigned DNA
aaacagccagtgcagaggagaggaacgtgtgtccagtgtcccgatccctgcggagctagtagctgagagctctgtgccctgggcaccttgcagccctgcacctgcctgccacttccccaccgaggccatgggcccaggagttctgctgctcctgctggtggccacagcttggcatggtcagggaatcccagtgatagagcccagtgtccctgagctggtcgtgaagccaggagcaacggtgaccttgcgatgtgtgggcaatggcagcgtggaatgggatggccccccatcacctcactggaccctgtactctgatggctccagcagcatcctcagcaccaacaacgctaccttccaaaacacggggacctatcgctgcactgagcctggagaccccctgggaggcagcgccgccatccacctctatgtcaaagaccctgcccggccctggaacgtgctagcacaggaggtggtcgtgttcgaggaccaggacgcactactgccctgtctgctcacagacccggtgctggaagcaggcgtctcgctggtgcgtgtgcgtggccggcccctcatgcgccacaccaactactccttctcgccctggcatggcttcaccatccacagggccaagttcattcagagccaggactatcaatgcagtgccctgatgggtggcaggaaggtgatgtccatcagcatccggctgaaagtgcagaaagtcatcccagggcccccagccttgacactggtgcctgcagagctggtgcggattcgaggggaggctgcccagatcgtgtgctcagccagcagcgttgatgttaactttgatgtcttcctccaacacaacaacaccaagctcgcaatccctcaacaatctgactttcataataaccgttaccaaaaagtcctgaccctcaacctcgatcaagtagatttccaacatgccggcaactactcctgcgtggccagcaacgtgcagggcaagcactccacctccatgttcttccgggtggtaggtaagcatcagggtggtggtggacagtcggtagggatcctgcaggagtgtgagcagaagggttttgaggaggaagctgatgtcagggaaggagacctgctgaggatatctctgctggagtttgtttatccaaggcctggctaaggagccactctccaggagctttcccttaccctctcctgggatctctctcccatcttggagctcttacagtgcatggctgcattgggtgcaccttagtgccattttttgtttatttggggattggggtccagtagctccctactggacttcatttgttcattctttcatgcattcctttatggaaacatgaaaagacaatgatcacccagtgattatgggggaagcacaa

SEQ ID NO: 4956 - DNA, 655 bp, Homo sapiens
  source 1..655: mol_type = unassigned DNA; mol_type = unassigned DNA
gaagggcagacagagtgtccaaaagcgtgagagcacgaagtgaggagaaggtggagaagagagaagaggaagaggaagaggaagagaggaagcggagggaactgcggccagggtcagggaatcccagtgatagagcccagtgtccctgagctggtcgtgaagccaggagcaacggtgaccttgcgatgtgtgggcaatggcagcgtggaatgggatggccccccatcacctcactggaccctgtactctgatggctccagcagcatcctcagcaccaacaacgctaccttccaaaacacggggacctatcgctgcactgagcctggagaccccctgggaggcagcgccgccatccacctctatgtcaaagaccctgcccggccctggaacgtgctagcacaggaggtggtcgtgttcgaggaccaggacgcactactgccctgtctgctcacagacccggtgctggaagcaggcgtctcgctggtgcgtgtgcgtggccggcccctcatgcgccacaccaactactccttctcgccctggcatggcttcaccatccacagggccaagttcattcagagccaggactatcaatgcagtgccctgatgggtggcaggaaggtgatgtccatcagcatccggctgaaagtgcagaaag

SEQ ID NO: 4957 - DNA, 921 bp, Homo sapiens
  source 1..921: mol_type = unassigned DNA; mol_type = unassigned DNA
atgggcccaggagttctgctgctcctgctggtggccacagcttggcatggtcagggaatcccagtgatagagcccagtgtccctgagctggtcgtgaagccaggagcaacggtgaccttgcgatgtgtgggcaatggcagcgtggaatgggatggccccccatcacctcactggaccctgtactctgatggctccagcagcatcctcagcaccaacaacgctaccttccaaaacacggggacctatcgctgcactgagcctggagaccccctgggaggcagcgccgccatccacctctatgtcaaagaccctgcccggccctggaacgtgctagcacaggaggtggtcgtgttcgaggaccaggacgcactactgccctgtctgctcacagacccggtgctggaagcaggcgtctcgctggtgcgtgtgcgtggccggcccctcatgcgccacaccaactactccttctcgccctggcatggcttcaccatccacagggccaagttcattcagagccaggactatcaatgcagtgccctgatgggtggcaggaaggtgatgtccatcagcatccggctgaaagtgcagaaagtcatcccagggcccccagccttgacactggtgcctgcagagctggtgcggattcgaggggaggctgcccagatcgtgtgctcagccagcagcgttgatgttaactttgatgtcttcctccaacacaacaacaccaagctcgcaatccctcaacaatctgactttcataataaccgttaccaaaaagtcctgaccctcaacctcgatcaagtagatttccaacatgccggcaactactcctgcgtggccagcaacgtgcagggcaagcactccacctccatgttcttccgggtggtaggcacaccttcaccctctctctgccccgcctga

SEQ ID NO: 4958 - DNA, 12134 bp, Homo sapiens
  source 1..12134: mol_type = unassigned DNA; mol_type = unassigned DNA
agaaattgaaaagggagggtgtggggatcctggaatccccgcctatgggaagcggacgggcagcagtttcctccatggagatacactcacctttgaatgcccggcggcctttgagctggtgggggagagagttatcacctgtcagcagaacaatcagtggtctggcaacaagcccagctgtgtattttcatgtttcttcaactttacggcatcatctgggattattctgtcaccaaattatccagaggaatatgggaacaacatgaactgtgtctggttgattatctcggagccaggaagtcgaattcacctaatctttaatgattttgatgttgagcctcagtttgactttctcgcggtcaaggatgatggcatttctgacataactgtcctgggtactttttctggcaatgaagtgccttcccagctggccagcagtgggcatatagttcgcttggaatttcagtctgaccattccactactggcagagggttcaacatcacttacaccacatttggtcagaatgagtgccatgatcctggcattcctataaacggacgacgttttggtgacaggtttctactcgggagctcggtttctttccactgtgatgatggctttgtcaagacccagggatccgagtccattacctgcatactgcaagacgggaacgtggtctggagctccaccgtgccccgctgtgaagctccatgtggtggacatctgacagcgtccagcggagtcattttgcctcctggatggccaggatattataaggattctttacattgtgaatggataattgaagcaaaaccaggccactctatcaaaataacttttgacagatttcagacagaggtcaattatgacaccttggaggtcagagatgggccagccagttcgtccccactgatcggcgagtaccacggcacccaggcaccccagttcctcatcagcaccgggaacttcatgtacctgctgttcaccactgacaacagccgctccagcatcggcttcctcatccactatgagagtgtgacgcttgagtcggattcctgcctggacccgggcatccctgtgaacggccatcgccacggtggagactttggcatcaggtccacagtgactttcagctgtgacccggggtacacactaagtgacgacgagcccctcgtctgtgagaggaaccaccagtggaaccacgccttgcccagctgcgacgctctatgtggaggctacatccaagggaagagtggaacagtcctttctcctgggtttccagatttttatccaaactctctaaactgcacgtggaccattgaagtgtctcatgggaaaggagttcaaatgatctttcacacctttcatcttgagagttcccacgactatttactgatcacagaggatggaagtttttccgagcccgttgccaggctcaccgggtcggtgttgcctcatacgatcaaggcaggcctgtttggaaacttcactgcccagcttcggtttatatcagacttctcaatttcgtacgagggcttcaatatcacattttcagaatatgacctggagccatgtgatgatcctggagtccctgccttcagccgaagaattggttttcactttggtgtgggagactctctgacgttttcctgcttcctgggatatcgtttagaaggtgccaccaagcttacctgcctgggtgggggccgccgtgtgtggagtgcacctctgccaaggtgtgtggccgaatgtggagcaagtgtcaaaggaaatgaaggaacattactgtctccaaattttccatccaattatgataataaccatgagtgtatctataaaatagaaacagaagccggcaagggcatccaccttagaacacgaagcttccagctgtttgaaggagatactctaaaggtatatgatggaaaagacagttcctcacgtccactgggcacgttcactaaaaatgaacttctggggctgatcctaaacagcacatccaatcacctgtggctagagttcaacaccaatggatctgacaccgaccaaggttttcaactcacctataccagttttgatctggtaaaatgtgaggatccgggcatccctaactacggctataggatccgtgatgaaggccactttaccgacactgtagttctgtacagttgcaacccggggtacgccatgcatggcagcaacaccctgacctgtttgagtggagacaggagagtgtgggacaaaccactaccttcgtgcatagcggaatgtggtggtcagatccatgcagccacatcaggacgaatattgtcccctggctatccagctccgtatgacaacaacctccactgcacctggattatagaggcagacccaggaaagaccattagcctccatttcattgttttcgacacggagatggctcacgacatcctcaaggtctgggacgggccggtggacagtgacatcctgctgaaggagtggagtggctccgcccttccggaggacatccacagcaccttcaactcactcaccctgcagttcgacagcgacttcttcatcagcaagtctggcttctccatccagttctccacctcaattgcagccacctgtaacgatccaggtatgccccaaaatggcacccgctatggagacagcagagaggctggagacaccgtcacattccagtgtgaccctggctatcagctccaaggacaagccaaaatcacctgtgtgcagctgaataaccggttcttttggcaaccagaccctcctacatgcatagctgcttgtggagggaatctgacgggcccagcaggtgttattttgtcacccaactacccacagccgtatcctcctgggaaggaatgtgactggagagtaaaagtgaacccggactttgtcatcgccttgatattcaaaagtttcaacatggagcccagctatgacttcctacacatctatgaaggggaagattccaacagccccctcattgggagttaccagggctctcaggccccagaaagaatagagagtagcggaaacagcctgtttctggcatttcggagtgatgcctccgtgggcctttcagggttcgccattgaatttaaagagaaaccacgggaagcttgttttgacccaggaaatataatgaatgggacaagagttggaacagacttcaagcttggctccaccatcacctaccagtgtgactctggctataagattcttgacccctcatccatcacctgtgtgattggggctgatgggaaaccctcctgggaccaagtgctgccctcctgcaatgctccctgtggaggccagtacacgggatcagaaggggtagttttatcaccaaactacccccataattacacagctggtcaaatatgcctctattccatcacggtaccaaaggaattcgtggtctttggacagtttgcctatttccagacagccctgaatgatttggcagaattatttgatggaacccatgcacaggccagacttctcagctcactctcggggtctcactcaggggaaacattgcccttggctacgtcaaatcaaattctgctccgattcagtgcaaagagcggtgcctctgcccgcggcttccacttcgtgtatcaagctgttcctcgtaccagtgacacccaatgcagctctgtccccgagcccagatacggaaggagaattggttctgagttttctgccggctccatcgtccgattcgagtgcaacccgggatacctgcttcagggttccacggcgctccactgccagtccgtgcccaacgccttggcacagtggaacgacacgatccccagctgtgtggtaccctgcagtggcaatttcactcaacgaagaggtacaatcctgtcccccggctaccctgagccatacggaaacaacttgaactgtatatggaagatcatagttacggagggctcgggaattcagatccaagtgatcagttttgccacggagcagaactgggactcccttgagatccacgatggtggggatgtgaccgcacccagactgggaagcttctcaggcaccacagtaccggcactgctgaacagtacttccaaccaactctacctgcatttccagtctgacattagtgtggcagctgctggtttccacctggaatacaaaactgtaggtcttgctgcatgccaagaaccagccctccccagcaacagcatcaaaatcggagatcggtacatggtgaacgacgtgctctccttccagtgcgagcccgggtacaccctgcagggccgttcccacatttcctgtatgccagggaccgttcgccgttggaactatccgtctcccctgtgcattgcaacctgtggagggacgctgagcaccttgggtggtgtgatcctgagccccggcttcccaggttcttaccccaacaacttagactgcacctggaggatctcattacccatcggctatggtgcacatattcagtttctgaatttttctaccgaagctaatcatgacttccttgaaattcaaaatggaccttaccacaccagccccatgattggacaatttagcggcacggatctccccgcggccctgctgagcacaacgcatgaaaccctcatccacttttatagtgaccattcgcaaaaccggcaaggatttaaacttgcttaccaagcctatgaattacagaactgtccagatccacccccatttcagaatgggtacatgatcaactcggattacagcgtggggcaatcagtatctttcgagtgttatcctgggtacattctaataggccatcctgtcctcacttgtcagcatgggatcaacagaaactggaactacccttttccaagatgtgatgccccttgtgggtacaacgtaacttctcagaacggcaccatctactcccctggctttcctgatgagtatccgatcctgaaggactgcatttggctcatcacggtgcctccagggcacggagtttacatcaacttcaccctgttacagacggaagctgtcaacgattacattgctgtttgggacggtcccgatcagaactcaccccagctgggagttttcagtggcaacacagccctcgaaacggcgtatagctccaccaaccaagtcctgctcaagttccacagcgacttttcaaatggaggcttctttgtcctcaatttccacgcatttcagctcaagaaatgtcaacctcccccagcggttccacaggcagaaatgcttactgaggatgatgatttcgaaataggagattttgtgaagtaccagtgccaccccgggtacaccttggtggggaccgacattctgacttgcaagctcagttcccagttgcagtttgagggttctctcccaacatgtgaaggttcttctgggcaaagtcctctgctagtagtcttaagtgggaatcatactgaacaatcaaattttacaagcaggagtaatcagttatatctccgctggtccactgaccatgccaccagtaagaaaggattcaagattcgctatgcagcaccttactgcagtttgacccaccccctgaagaatgggggtattctaaacaggactgcaggagcggttggaagcaaagtgcattatttttgcaagcctggataccgaatggtcggccacagcaatgcaacctgtagacgaaacccacttggcatgtaccagtgggactccctcacgccactctgccaggctgtgtcctgtggaatcccagaatccccaggaaacggttcatttaccgggaacgagttcactttggacagtaaagtggtctatgaatgtcatgagggcttcaagcttgaatccagccagcaagcaacagccgtgtgtcaagaagatgggttgtggagtaacaaggggaagccgcccacgtgtaagccggtcgcttgccccagcattgaagctcagctctcagaacatgtcatctggaggctggtttcaggatccttgaatgagtacggtgctcaagtattgctgagctgcagtcctggttactacttagaaggctggaggctcctgcggtgccaggccaatgggacgtggaacataggagatgagaggccaagctgtcgagttatctcgtgtggaagcctttcctttcccccaaatggcaacaagattggaacgttgacagtttatggggccacagctatatttacgtgcaacaccggctacacgcttgtggggtctcatgtcagagagtgcttggcaaatgggctctggagcggcagcgaaactcgatgtctggctggccactgcggttccccagacccgattgtgaacggtcacattagtggagatggcttcagttacagagacacggtggtttaccagtgcaatcctggtttccggcttgtgggaacttccgtgaggatatgcctgcaagaccacaagtggtctggacaaacgcctgtctgtgtccccatcacatgtggtcaccctggaaaccctgcccacggattcactaatggcagtgagttcaacctgaatgatgtcgtgaatttcacctgcaacacgggctatttgctgcagggcgtgtctcgagcccagtgtcggagcaacggccagtggagtagccctctgcccacgtgtcgagtggtgaactgttctgatccaggctttgtggaaaatgccattcgtcacgggcaacagaacttccctgagagttttgagtatggaatgagtatcctgtaccattgcaagaagggattttacttgctgggatcttcagccttgacctgtatggcaaatggcttatgggaccgatccctgcccaagtgtttggctatatcgtgtggacacccaggggtccctgccaacgccgtcctcactggagagctgtttacctatggcgccgtcgtgcactactcctgcagagggagcgagagcctcataggcaacgacacgagagtgtgccaggaagacagtcactggagcggggcactgccccactgcacaggaaataatcctggattctgtggtgatccggggaccccagcacatgggtctcggcttggtgatgactttaagacaaagagtcttctccgcttctcctgtgaaatggggcaccagctgaggggctcccctgaacgcacgtgtttgctcaatgggtcatggtcaggactgcagccggtgtgtgaggccgtgtcctgtggcaaccctggcacacccaccaacggaatgattgtcagtagtgatggcattctgttctccagctcggtcatctatgcctgctgggaaggctacaagacctcagggctcatgacacggcattgcacagccaatgggacctggacaggcactgctcccgactgcacaattataagttgtggggatccaggcacactagcaaatggcatccagtttgggaccgacttcaccttcaacaagactgtgagctatcagtgtaacccaggctatgtcatggaagcagtcacatccgccactattcgctgtaccaaagacggcaggtggaatccgagcaaacctgtctgcaaagccgtgctgtgtcctcagccgccgccggtgcagaatggaacagtggagggaagtgatttccgctggggctccagcataagttacagctgcatggacggttaccagctctctcactccgccatcctctcctgtgaaggtcgcggggtgtggaaaggagagatcccccagtgtctccctgtgttctgcggagaccctggcatccccgcagaagggcgacttagtgggaaaagtttcacctataagtccgaagtcttcttccagtgcaaatctccatttatactcgtgggatcctccagaagagtctgccaagctgacggcacgtggagcggcatacaacccacctgcattgatcctgctcataacacctgcccagaccctggtacgccacactttggaatacagaatagctccagaggctatgaggttggaagcacggtttttttcaggtgcagaaaaggctaccatattcaaggttccacgactcgcacctgccttgccaatttaacatggagtgggatacagaccgaatgtatacctcatgcctgcagacagccagaaaccccggcacacgcggatgtgagagccatcgatcttcctactttcggctacaccttagtgtacacctgccatccaggctttttcctcgcagggggatctgagcacagaacatgtaaagcagacatgaaatggacaggaaagtcgcctgtgtgtaaaattccttcagatgtctttttcgtcaattcactgtggaaggggtattatgaatatttagggaaaagacaacccgccactctaactgttgactggttcaatgcaacaagcagtaaggtgaatgccaccttcagcgaagcctcgccagtggagctgaagttgacaggcatttacaagaaggaggaggcccacttactcctgaaagcttttcaaattaaaggccaggcagatatttttgtaagcaagttcgaaaatgacaactggggactagatggttatgtgtcatctggacttgaaagaggaggatttacttttcaaggtgacattcatggaaaagactttggaaaatttaagctagaaaggcaagatcctttaaacccagatcaagactcttccagtcattaccacggcaccagcagtggctctgtggcggctgccattctggttcctttctttgctctaattttatcagggtttgcattttacctctacaaacacagaacgagaccaaaagttcaatacaatggctatgctgggcatgaaaacagcaatggacaagcatcgtttgaaaaccccatgtatgatacaaacttaaaacccacagaagccaaggctgtgaggtttgacacaactctgaacacagtctgtacagtggtatagccctcagtgccccaacaggactgattcatagccatacctctgatggacaagcagtgattcctttggtgccatataccactctcccttccactctggctttactgcagcgatcttcaaccttgtctactggcataagtgcagcggggatctctactcaaatgtgtcagggtcttctacggatcaaactacacatgcgttttcattccaaaagtgggttctaaatgcctggctgcatctgtatgaaatcaaggcacactccaggaagactgccacgtcgcgccaacacgtcatactcaatgcctcagactttcatatttctgtgttgctgagatgcctttcaatgcaatcgtctgggctcgtggatatgtccctcaggtgcggtgacagaatggtggcaccacgatatgtgttctcttgtgttgtttttcctttttaaacccccatgaacacgaatactctgaaaaaaataaaaagctttctggaagaagacacctttctgatagaggctcacacctacaaatgcttcactctgtccttccgagacctgacaagctttgaggacctcacagctcccctgtgtgttcatctctagggatgtttgcaatttcccagtcagctgttctgtcgcagaatgtttaatgcacaattttttgcactagtgtgttatgaatgactaagattctgataaaaaaaataaattatttacacagggtttatacacactatccattgtatataagcattatttcatattatcaagctaaacattcccccatcagcttagttggagtgttagggaaaagtattcctagatatggcacagattttaaaaggaaatacagtattgaagagatttattttattattgcttcaattagctccatttacgtgttgaattcattgaagaggtccaatgagaaaaaaacagaagcctccttatttcacacgttttcctcctttagtaccatcctcatccaattactgtctctctgatactacttaatagcagggggtttgcagaaatttctgtttgccatgtaaaactgtgaatagtaatttattttagatagtcgatgaacttgtgggttttagctcacaatgcagccttcccttttgcagtgttttttttttgtttttttttttttttgtcttttactgtgccatcgatctttgatattgcattgaaagacaatataccacagtagcaccttgaactcagtgaaaattgttcaggatcaaaataccaagtgttcttttagagggaaggaaaaagtacacacactctcctctcacaatgatatattttatacattcatttgttatttgtttcatgctttatgattccagatggaaaggtaatttcagtgacttttcaagtttaaattccattataggtaaatgataagttatgatgcaaataaaatctataagatccccagggcaaataaaaatcaaaacatgaagtagaagatgtggccgtgaggtagtttatgtaacaaattcaaagtgaaaatcatgtttacttttacttatacttatttgataaaaatatttttgaaacgatagtacttattttattatttgatatttcagttcctattcaattgtggcagattttctctgtttcacattttagattggcgttggtaatagaaatgtcagaatgttcaaattggccttcacgttgtcggagtgaacacattgacacctagctttaagactgatttatctgttggtgtactgaaggtttccatgtaggacttcaaatgtggaaaaggaaaagcagtcaggaaaatggggcattctttggagagtcacgcgttttgattcggacatttccgtagagctcggctcccagtgttgtgttcctcggtcgaaagggtctctgctgtttggggactcactggcctctcctagggactcctttgtcttgtgaaccccacgctgttggattctgtatcattatgctgaattctctgcacagttttccctggccaacctgcccacatccttggagatttgctttgccagtgggaatccttacattgctgtttcacagtagacgggacgaggtcagcgggagtcgtgctcctaacacacacattgaacgaaacagaagatgattgaaagtgtgaggaggctcgtgtgcaagggagaacagggttactatacatattagtgtatatatatacatacatatatatatatatatattgtacatatctaagtttgagtcattcaaactaggtgcaaaatgctgacttcagagtctgaattaacatctctgttcccatatccctgacctgctccctggtcaacgatgctatgaaatcctgaaatgacaggacatacatacatacaagaaaccacatatcaaattagatatgattttcctttgtgtgcaaagtcaaactgtcctagggttgccagtttgaagcatgttatttaaatgaaaaaaaaaatcagtgaaattctcgtgtgagaattctgcctagtttcttcctaaggttgtgtgcagtgttgaacggcgtctccgcaaggtgttggaggatctcattttagggcagtcaggagctgtgcttgctgagttaggtctagaagactcttccctgaaggcaacgggaacacgcgtgagggacgcgaccacacactaacagaggacacgtgcttcagagctgtttaaaactgctgcttgttttacacacacatcttgccttttttcaggctagctgcaataatttttttcttctgtaaaatattttgtaaacaacaacaaaaagctattataaaaagggggtaaaaaaaagaacgctggcattatgatcaggaaaacccattgtcatcgccgaccctccctcccgtcccaccacacgctgctgtcacgacgtaggtgcgaaagacctttttgtacagagatatattttttatgaagaatttgtaaaattattaaatatgctgtaattttttgattaatgtaggtacattgttaaaaaataaatgtttttacaatacagaactgtaattttcccaataatgtaaaatgtaccatctctagctgattttcagttccaatcctattacacatgtattaatattaaagtggcctgttaaaatgaacagtatcttttttttgtcaaaaaaattataaagagggtgtaatatagcctgtgcaatgccaccaatctttaaagcaaatcagagttctaattaaatatttaattttagatttcta

SEQ ID NO: 4959 - DNA, 10938 bp, Homo sapiens
  source 1..10938: mol_type = unassigned DNA; mol_type = unassigned DNA
ccttcctgcccggctcggccggcgctcgtccccggccccggccccgccagcccgggtctccgcgctcggagcagctcagccctgcagtggctcgggacccgatgctatgagagggaagcgagccgggcgcccagaccttcaggaggcgtcggatgcgcggcgggtcttgggaccgggctctctctccggctcgccttgccctcgggtgattatttggctccgctcatagccctgccttcctcggaggagccatcggtgtcgcgtgcgtgtggagtatctgcagacatgactgcgtggaggagattccagtcgctgctcctgcttctcgggctgctggtgctgtgcgcgaggctcctcactgcagcgaagggtcagaactgtggaggcttagtccagggtcccaatggcactattgagagcccagggtttcctcacgggtatccgaactatgccaactgcacctggatcatcatcacgggcgagcgcaataggatacagttgtccttccatacctttgctcttgaagaagattttgatattttatcagtttacgatggacagcctcaacaagggaatttaaaagtgagattatcgggatttcagctgccctcctctatagtgagtacaggatctatcctcactctgtggttcacgacagacttcgctgtgagtgcccaaggtttcaaagcattatatgaagttttacctagccacacttgtggaaatcctggagaaatcctgaaaggagttctgcatggaacgagattcaacataggagacaaaatccggtacagctgcctccctggctacatcttggaaggccacgccatcctgacctgcatcgtcagcccaggaaatggtgcatcgtgggacttcccagctcccttttgcagagctgagggagcctgcggaggaaccttacgcgggaccagcagctccatctccagcccgcacttcccttcagagtacgagaacaacgcggactgcacctggaccattctggctgagcccggggacaccattgcgctggtcttcactgactttcagctagaagaaggatatgatttcttagagatcagtggcacggaagctccatccatatggctaactggcatgaacctcccctctccagttatcagtagcaagaattggctacgactccatttcacctctgacagcaaccaccgacgcaaaggatttaacgctcagttccaagtgaaaaaggcgattgagttgaagtcaagaggagtcaagatgctgcccagcaaggatggaagccataaaaactctgtcttgagccaaggaggtgttgcattggtctctgacatgtgtccagatcctgggattccagaaaatggtagaagagcaggttccgacttcagtagggttggtgcaaatgtacagttttcatgtgaggacaattacgtgctccagggatctaaaagcatcacctgtcagagagttacagagacgctcgctgcttggagtgaccacaggcccatctgccgagcgagaacatgtggatccaatctgcgtgggcccagcggcgtcattacctcccctaattatccggttcagtatgaagataatgcacactgtgtgtgggtcatcaccaccaccgacccggacaaggtcatcaagcttgcctttgaagagtttgagctggagcgaggctatgacaccctgacggttggtgatgctgggaaggtgggagacaccagatcggtcttgtacgtgctcacgggatccagtgttcctgacctcattgtgagcatgagcaaccagatgtggctacatctgcagtcggatgatagcattggctcacctgggtttaaagctgtttaccaagaaattgaaaagggagggtgtggggatcctggaatccccgcctatgggaagcggacgggcagcagtttcctccatggagatacactcacctttgaatgcccggcggcctttgagctggtgggggagagagttatcacctgtcagcagaacaatcagtggtctggcaacaagcccagctgtgtattttcatgtttcttcaactttacggcatcatctgggattattctgtcaccaaattatccagaggaatatgggaacaacatgaactgtgtctggttgattatctcggagccaggaagtcgaattcacctaatctttaatgattttgatgttgagcctcagtttgactttctcgcggtcaaggatgatggcatttctgacataactgtcctgggtactttttctggcaatgaagtgccttcccagctggccagcagtgggcatatagttcgcttggaatttcagtctgaccattccactactggcagagggttcaacatcacttacaccacatttggtcagaatgagtgccatgatcctggcattcctataaacggacgacgttttggtgacaggtttctactcgggagctcggtttctttccactgtgatgatggctttgtcaagacccagggatccgagtccattacctgcatactgcaagacgggaacgtggtctggagctccaccgtgccccgctgtgaagctccatgtggtggacatctgacagcgtccagcggagtcattttgcctcctggatggccaggatattataaggattctttacattgtgaatggataattgaagcaaaaccaggccactctatcaaaataacttttgacagatttcagacagaggtcaattatgacaccttggaggtcagagatgggccagccagttcgtccccactgatcggcgagtaccacggcacccaggcaccccagttcctcatcagcaccgggaacttcatgtacctgctgttcaccactgacaacagccgctccagcatcggcttcctcatccactatgagagtgtgacgcttgagtcggattcctgcctggacccgggcatccctgtgaacggccatcgccacggtggagactttggcatcaggtccacagtgactttcagctgtgacccggggtacacactaagtgacgacgagcccctcgtctgtgagaggaaccaccagtggaaccacgccttgcccagctgcgacgctctatgtggaggctacatccaagggaagagtggaacagtcctttctcctgggtttccagatttttatccaaactctctaaactgcacgtggaccattgaagtgtctcatgggaaaggagttcaaatgatctttcacacctttcatcttgagagttcccacgactatttactgatcacagaggatggaagtttttccgagcccgttgccaggctcaccgggtcggtgttgcctcatacgatcaaggcaggcctgtttggaaacttcactgcccagcttcggtttatatcagacttctcaatttcgtacgagggcttcaatatcacattttcagaatatgacctggagccatgtgatgatcctggagtccctgccttcagccgaagaattggttttcactttggtgtgggagactctctgacgttttcctgcttcctgggatatcgtttagaaggtgccaccaagcttacctgcctgggtgggggccgccgtgtgtggagtgcacctctgccaaggtgtgtggccgaatgtggagcaagtgtcaaaggaaatgaaggaacattactgtctccaaattttccatccaattatgataataaccatgagtgtatctataaaatagaaacagaagccggcaagggcatccaccttagaacacgaagcttccagctgtttgaaggagatactctaaaggtatatgatggaaaagacagttcctcacgtccactgggcacgttcactaaaaatgaacttctggggctgatcctaaacagcacatccaatcacctgtggctagagttcaacaccaatggatctgacaccgaccaaggttttcaactcacctataccagttttgatctggtaaaatgtgaggatccgggcatccctaactacggctataggatccgtgatgaaggccactttaccgacactgtagttctgtacagttgcaacccggggtacgccatgcatggcagcaacaccctgacctgtttgagtggagacaggagagtgtgggacaaaccactaccttcgtgcatagcggaatgtggtggtcagatccatgcagccacatcaggacgaatattgtcccctggctatccagctccgtatgacaacaacctccactgcacctggattatagaggcagacccaggaaagaccattagcctccatttcattgttttcgacacggagatggctcacgacatcctcaaggtctgggacgggccggtggacagtgacatcctgctgaaggagtggagtggctccgcccttccggaggacatccacagcaccttcaactcactcaccctgcagttcgacagcgacttcttcatcagcaagtctggcttctccatccagttctccacctcaattgcagccacctgtaacgatccaggtatgccccaaaatggcacccgctatggagacagcagagaggctggagacaccgtcacattccagtgtgaccctggctatcagctccaaggacaagccaaaatcacctgtgtgcagctgaataaccggttcttttggcaaccagaccctcctacatgcatagctgcttgtggagggaatctgacgggcccagcaggtgttattttgtcacccaactacccacagccgtatcctcctgggaaggaatgtgactggagagtaaaagtgaacccggactttgtcatcgccttgatattcaaaagtttcaacatggagcccagctatgacttcctacacatctatgaaggggaagattccaacagccccctcattgggagttaccagggctctcaggccccagaaagaatagagagtagcggaaacagcctgtttctggcatttcggagtgatgcctccgtgggcctttcagggttcgccattgaatttaaagagaaaccacgggaagcttgttttgacccaggaaatataatgaatgggacaagagttggaacagacttcaagcttggctccaccatcacctaccagtgtgactctggctataagattcttgacccctcatccatcacctgtgtgattggggctgatgggaaaccctcctgggaccaagtgctgccctcctgcaatgctccctgtggaggccagtacacgggatcagaaggggtagttttatcaccaaactacccccataattacacagctggtcaaatatgcctctattccatcacggtaccaaaggaattcgtggtctttggacagtttgcctatttccagacagccctgaatgatttggcagaattatttgatggaacccatgcacaggccagacttctcagctcactctcggggtctcactcaggggaaacattgcccttggctacgtcaaatcaaattctgctccgattcagtgcaaagagcggtgcctctgcccgcggcttccacttcgtgtatcaagctgttcctcgtaccagtgacacccaatgcagctctgtccccgagcccagatacggaaggagaattggttctgagttttctgccggctccatcgtccgattcgagtgcaacccgggatacctgcttcagggttccacggcgctccactgccagtccgtgcccaacgccttggcacagtggaacgacacgatccccagctgtgtggtaccctgcagtggcaatttcactcaacgaagaggtacaatcctgtcccccggctaccctgagccatacggaaacaacttgaactgtatatggaagatcatagttacggagggctcgggaattcagatccaagtgatcagttttgccacggagcagaactgggactcccttgagatccacgatggtggggatgtgaccgcacccagactgggaagcttctcaggcaccacagtaccggcactgctgaacagtacttccaaccaactctacctgcatttccagtctgacattagtgtggcagctgctggtttccacctggaatacaaaactgtaggtcttgctgcatgccaagaaccagccctccccagcaacagcatcaaaatcggagatcggtacatggtgaacgacgtgctctccttccagtgcgagcccgggtacaccctgcagggccgttcccacatttcctgtatgccagggaccgttcgccgttggaactatccgtctcccctgtgcattgcaacctgtggagggacgctgagcaccttgggtggtgtgatcctgagccccggcttcccaggttcttaccccaacaacttagactgcacctggaggatctcattacccatcggctatggtgcacatattcagtttctgaatttttctaccgaagctaatcatgacttccttgaaattcaaaatggaccttaccacaccagccccatgattggacaatttagcggcacggatctccccgcggccctgctgagcacaacgcatgaaaccctcatccacttttatagtgaccattcgcaaaaccggcaaggatttaaacttgcttaccaagcctatgaattacagaactgtccagatccacccccatttcagaatgggtacatgatcaactcggattacagcgtggggcaatcagtatctttcgagtgttatcctgggtacattctaataggccatcctgtcctcacttgtcagcatgggatcaacagaaactggaactacccttttccaagatgtgatgccccttgtgggtacaacgtaacttctcagaacggcaccatctactcccctggctttcctgatgagtatccgatcctgaaggactgcatttggctcatcacggtgcctccagggcacggagtttacatcaacttcaccctgttacagacggaagctgtcaacgattacattgctgtttgggacggtcccgatcagaactcaccccagctgggagttttcagtggcaacacagccctcgaaacggcgtatagctccaccaaccaagtcctgctcaagttccacagcgacttttcaaatggaggcttctttgtcctcaatttccacgcatttcagctcaagaaatgtcaacctcccccagcggttccacaggcagaaatgcttactgaggatgatgatttcgaaataggagattttgtgaagtaccagtgccaccccgggtacaccttggtggggaccgacattctgacttgcaagctcagttcccagttgcagtttgagggttctctcccaacatgtgaagcacaatgcccagcaaatgaagtccggactggatcatcgggagtcattctcagtccagggtatccgggtaattattttaactcccagacttgctcttggagtattaaagtggaaccaaactacaacattaccatctttgtggacacatttcaaagtgaaaagcagtttgatgcactggaagtgtttgatggttcttctgggcaaagtcctctgctagtagtcttaagtgggaatcatactgaacaatcaaattttacaagcaggagtaatcagttatatctccgctggtccactgaccatgccaccagtaagaaaggattcaagattcgctatgcagcaccttactgcagtttgacccaccccctgaagaatgggggtattctaaacaggactgcaggagcggttggaagcaaagtgcattatttttgcaagcctggataccgaatggtcggccacagcaatgcaacctgtagacgaaacccacttggcatgtaccagtgggactccctcacgccactctgccaggctgtgtcctgtggaatcccagaatccccaggaaacggttcatttaccgggaacgagttcactttggacagtaaagtggtctatgaatgtcatgagggcttcaagcttgaatccagccagcaagcaacagccgtgtgtcaagaagatgggttgtggagtaacaaggggaagccgcccacgtgtaagccggtcgcttgccccagcattgaagctcagctctcagaacatgtcatctggaggctggtttcaggatccttgaatgagtacggtgctcaagtattgctgagctgcagtcctggttactacttagaaggctggaggctcctgcggtgccaggccaatgggacgtggaacataggagatgagaggccaagctgtcgagctggccactgcggttccccagacccgattgtgaacggtcacattagtggagatggcttcagttacagagacacggtggtttaccagtgcaatcctggtttccggcttgtgggaacttccgtgaggatatgcctgcaagaccacaagtggtctggacaaacgcctgtctgtgtccccatcacatgtggtcaccctggaaaccctgcccacggattcactaatggcagtgagttcaacctgaatgatgtcgtgaatttcacctgcaacacgggctatttgctgcagggcgtgtctcgagcccagtgtcggagcaacggccagtggagtagccctctgcccacgtgtcgagtggtgaactgttctgatccaggctttgtggaaaatgccattcgtcacgggcaacagaacttccctgagagttttgagtatggaatgagtatcctgtaccattgcaagaagggattttacttgctgggatcttcagccttgacctgtatggcaaatggcttatgggaccgatccctgcccaagtgtttggctatatcgtgtggacacccaggggtccctgccaacgccgtcctcactggagagctgtttacctatggcgccgtcgtgcactactcctgcagagggagcgagagcctcataggcaacgacacgagagtgtgccaggaagacagtcactggagcggggcactgccccactgcacaggaaataatcctggattctgtggtgatccggggaccccagcacatgggtctcggcttggtgatgactttaagacaaagagtcttctccgcttctcctgtgaaatggggcaccagctgaggggctcccctgaacgcacgtgtttgctcaatgggtcatggtcaggactgcagccggtgtgtgaggccgtgctgtgtcctcagccgccgccggtgcagaatggaacagtggagggaagtgatttccgctggggctccagcataagttacagctgcatggacggttaccagctctctcactccgccatcctctcctgtgaaggtcgcggggtgtggaaaggagagatcccccagtgtctccctgtgttctgcggagaccctggcatccccgcagaagggcgacttagtgggaaaagtttcacctataagtccgaagtcttcttccagtgcaaatctccatttatactcgtgggatcctccagaagagtctgccaagctgacggcacgtggagcggcatacaacccacctgcattgatcctgctcataacacctgcccagaccctggtacgccacactttggaatacagaatagctccagaggctatgaggttggaagcacggtttttttcaggtgcagaaaaggctaccatattcaaggttccacgactcgcacctgccttgccaatttaacatggagtgggatacagaccgaatgtatacctcatgcctgcagacagccagaaaccccggcacacgcggatgtgagagccatcgatcttcctactttcggctacaccttagtgtacacctgccatccaggctttttcctcgcagggggatctgagcacagaacatgtaaagcagacatgaaatggacaggaaagtcgcctgtgtgtaaaagtaaaggagtgagagaagttaatgaaacagttactaaaactccagttccttcagatgtctttttcgtcaattcactgtggaaggggtattatgaatatttagggaaaagacaacccgccactctaactgttgactggttcaatgcaacaagcagtaaggtgaatgccaccttcagcgaagcctcgccagtggagctgaagttgacaggcatttacaagaaggaggaggcccacttactcctgaaagcttttcaaattaaaggccaggcagatatttttgtaagcaagttcgaaaatgacaactggggactagatggttatgtgtcatctggacttgaaagaggaggatttacttttcaaggtgacattcatggaaaagactttggaaaatttaagctagaaaggcaagatcctttaaacccagatcaagactcttccagtcattaccacggcaccagcagtggctctgtggcggctgccattctggttcctttctttgctctaattttatcagggtttgcattttacctctacaaacacagaacgagaccaaaagttcaatacaatggctatgctgggcatgaaaacagcaatggacaagcatcgtttgaaaaccccatgtatgatacaaacttaaaacccacagaagccaaggctgtgaggtttgacacaactctgaacacagtctgtacagtggtatagccctcagtgccccaacaggactgattcatagccatacctctgatggacaagcagtgattcctttggtgccatataccactctcccttccactctggctttactgcagcgatcttcaaccttgtctactggcataagtgcagcggggatctctactcaaatgtgtcagggtcttctacggatcaaactacacatgcgttttcattccaaaagtgggttctaaatgcctggctgcatctgtatgaaatcaaggcacactccaggaagactgccacgtcgcgccaacacgtcatactcaatgcctcagactttcatatttctgtgttgctgagatgcctttcaatgcaatcgtctgggctcgtggatatgtccctcaggtgcggtgacagaatggtggcaccacgatatgtgttctcttgtgttgtttttcctttttaaacccccatgaacacgaatactctgaaaaaaataaaaagctttctggaaga

SEQ ID NO: 4960 - DNA, 10938 bp, Homo sapiens; identical to SEQ ID NO: 4959
  source 1..10938: mol_type = unassigned DNA; mol_type = unassigned DNA

SEQ ID NO: 4961 - DNA, 11737 bp, Homo sapiens
  source 1..11737: mol_type = unassigned DNA; mol_type = unassigned DNA
gactgcgccgtgcccagcctcggtcccctctctgtgggtaaggatggttgagtccagcctccacggcagcggctccttgtgccactagcagcccttcttctgcgctctccgccttttctctctagactggatctctcctcccccccgcgcccccctccccgcatctcccactcgctggctctctctccagctgcctcctctccaggtctctcctggctgcgcgcgctcctctccccgcttctccccctcccgcagcctcgccgccttggtgccttcctgcccggctcggccggcgctcgtccccggccccggccccgccagcccgggtctccgcgctcggagcagctcagccctgcagtggctcgggacccgatgctatgagagggaagcgagccgggcgcccagaccttcaggaggcgtcggatgcgcggcgggtcttgggaccgggctctctctccggctcgccttgccctcgggtgattatttggctccgctcatagccctgccttcctcggaggagccatcggtgtcgcgtgcgtgtggagtatctgcagacatgactgcgtggaggagattccagtcgctgctcctgcttctcgggctgctggtgctgtgcgcgaggctcctcactgcagcgaagggtcagaactgtggaggcttagtccagggtcccaatggcactattgagagcccagggtttcctcacgggtatccgaactatgccaactgcacctggatcatcatcacgggcgagcgcaataggatacagttgtccttccatacctttgctcttgaagaagattttgatattttatcagtttacgatggacagcctcaacaagggaatttaaaagtgagattatcgggatttcagctgccctcctctatagtgagtacaggatctatcctcactctgtggttcacgacagacttcgctgtgagtgcccaaggtttcaaagcattatatgaagttttacctagccacacttgtggaaatcctggagaaatcctgaaaggagttctgcatggaacgagattcaacataggagacaaaatccggtacagctgcctccctggctacatcttggaaggccacgccatcctgacctgcatcgtcagcccaggaaatggtgcatcgtgggacttcccagctcccttttgcagagctgagggagcctgcggaggaaccttacgcgggaccagcagctccatctccagcccgcacttcccttcagagtacgagaacaacgcggactgcacctggaccattctggctgagcccggggacaccattgcgctggtcttcactgactttcagctagaagaaggatatgatttcttagagatcagtggcacggaagctccatccatatggctaactggcatgaacctcccctctccagttatcagtagcaagaattggctacgactccatttcacctctgacagcaaccaccgacgcaaaggatttaacgctcagttccaagtgaaaaaggcgattgagttgaagtcaagaggagtcaagatgctgcccagcaaggatggaagccataaaaactctgtcttgagccaaggaggtgttgcattggtctctgacatgtgtccagatcctgggattccagaaaatggtagaagagcaggttccgacttcagggttggtgcaaatgtacagttttcatgtgaggacaattacgtgctccagggatctaaaagcatcacctgtcagagagttacagagacgctcgctgcttggagtgaccacaggcccatctgccgagcgagaacatgtggatccaatctgcgtgggcccagcggcgtcattacctcccctaattatccggttcagtatgaagataatgcacactgtgtgtgggtcatcaccaccaccgacccggacaaggtcatcaagcttgcctttgaagagtttgagctggagcgaggctatgacaccctgacggttggtgatgctgggaaggtgggagacaccagatcggtcttgtacgtgctcacgggatccagtgttcctgacctcattgtgagcatgagcaaccagatgtggctacatctgcagtcggatgatagcattggctcacctgggtttaaagctgtttaccaagaaattgaaaagggagggtgtggggatcctggaatccccgcctatgggaagcggacgggcagcagtttcctccatggagatacactcacctttgaatgcccggcggcctttgagctggtgggggagagagttatcacctgtcagcagaacaatcagtggtctggcaacaagcccagctgtgtattttcatgtttcttcaactttacggcatcatctgggattattctgtcaccaaattatccagaggaatatgggaacaacatgaactgtgtctggttgattatctcggagccaggaagtcgaattcacctaatctttaatgattttgatgttgagcctcagtttgactttctcgcggtcaaggatgatggcatttctgacataactgtcctgggtactttttctggcaatgaagtgccttcccagctggccagcagtgggcatatagttcgcttggaatttcagtctgaccattccactactggcagagggttcaacatcacttacaccacatttggtcagaatgagtgccatgatcctggcattcctataaacggacgacgttttggtgacaggtttctactcgggagctcggtttctttccactgtgatgatggctttgtcaagacccagggatccgagtccattacctgcatactgcaagacgggaacgtggtctggagctccaccgtgccccgctgtgaagctccatgtggtggacatctgacagcgtccagcggagtcattttgcctcctggatggccaggatattataaggattctttacattgtgaatggataattgaagcaaaaccaggccactctatcaaaataacttttgacagatttcagacagaggtcaattatgacaccttggaggtcagagatgggccagccagttcgtccccactgatcggcgagtaccacggcacccaggcaccccagttcctcatcagcaccgggaacttcatgtacctgctgttcaccactgacaacagccgctccagcatcggcttcctcatccactatgagagtgtgacgcttgagtcggattcctgcctggacccgggcatccctgtgaacggccatcgccacggtggagactttggcatcaggtccacagtgactttcagctgtgacccggggtacacactaagtgacgacgagcccctcgtctgtgagaggaaccaccagtggaaccacgccttgcccagctgcgacgctctatgtggaggctacatccaagggaagagtggaacagtcctttctcctgggtttccagatttttatccaaactctctaaactgcacgtggaccattgaagtgtctcatgggaaaggagttcaaatgatctttcacacctttcatcttgagagttcccacgactatttactgatcacagaggatggaagtttttccgagcccgttgccaggctcaccgggtcggtgttgcctcatacgatcaaggcaggcctgtttggaaacttcactgcccagcttcggtttatatcagacttctcaatttcgtacgagggcttcaatatcacattttcagaatatgacctggagccatgtgatgatcctggagtccctgccttcagccgaagaattggttttcactttggtgtgggagactctctgacgttttcctgcttcctgggatatcgtttagaaggtgccaccaagcttacctgcctgggtgggggccgccgtgtgtggagtgcacctctgccaaggtgtgtggccgaatgtggagcaagtgtcaaaggaaatgaaggaacattactgtctccaaattttccatccaattatgataataaccatgagtgtatctataaaatagaaacagaagccggcaagggcatccaccttagaacacgaagcttccagctgtttgaaggagatactctaaaggtatatgatggaaaagacagttcctcacgtccactgggcacgttcactaaaaatgaacttctggggctgatcctaaacagcacatccaatcacctgtggctagagttcaacaccaatggatctgacaccgaccaaggttttcaactcacctataccagttttgatctggtaaaatgtgaggatccgggcatccctaactacggctataggatccgtgatgaaggccactttaccgacactgtagttctgtacagttgcaacccggggtacgccatgcatggcagcaacaccctgacctgtttgagtggagacaggagagtgtgggacaaaccactaccttcgtgcatagcggaatgtggtggtcagatccatgcagccacatcaggacgaatattgtcccctggctatccagctccgtatgacaacaacctccactgcacctggattatagaggcagacccaggaaagaccattagcctccatttcattgttttcgacacggagatggctcacgacatcctcaaggtctgggacgggccggtggacagtgacatcctgctgaaggagtggagtggctccgcccttccggaggacatccacagcaccttcaactcactcaccctgcagttcgacagcgacttcttcatcagcaagtctggcttctccatccagttctccacctcaattgcagccacctgtaacgatccaggtatgccccaaaatggcacccgctatggagacagcagagaggctggagacaccgtcacattccagtgtgaccctggctatcagctccaaggacaagccaaaatcacctgtgtgcagctgaataaccggttcttttggcaaccagaccctcctacatgcatagctgcttgtggagggaatctgacgggcccagcaggtgttattttgtcacccaactacccacagccgtatcctcctgggaaggaatgtgactggagagtaaaagtgaacccggactttgtcatcgccttgatattcaaaagtttcaacatggagcccagctatgacttcctacacatctatgaaggggaagattccaacagccccctcattgggagttaccagggctctcaggccccagaaagaatagagagtagcggaaacagcctgtttctggcatttcggagtgatgcctccgtgggcctttcagggttcgccattgaatttaaagagaaaccacgggaagcttgttttgacccaggaaatataatgaatgggacaagagttggaacagacttcaagcttggctccaccatcacctaccagtgtgactctggctataagattcttgacccctcatccatcacctgtgtgattggggctgatgggaaaccctcctgggaccaagtgctgccctcctgcaatgctccctgtggaggccagtacacgggatcagaaggggtagttttatcaccaaactacccccataattacacagctggtcaaatatgcctctattccatcacggtaccaaaggaattcgtggtctttggacagtttgcctatttccagacagccctgaatgatttggcagaattatttgatggaacccatgcacaggccagacttctcagctcactctcggggtctcactcaggggaaacattgcccttggctacgtcaaatcaaattctgctccgattcagtgcaaagagcggtgcctctgcccgcggcttccacttcgtgtatcaagctgttcctcgtaccagtgacacccaatgcagctctgtccccgagcccagatacggaaggagaattggttctgagttttctgccggctccatcgtccgattcgagtgcaacccgggatacctgcttcagggttccacggcgctccactgccagtccgtgcccaacgccttggcacagtggaacgacacgatccccagctgtgtggtaccctgcagtggcaatttcactcaacgaagaggtacaatcctgtcccccggctaccctgagccatacggaaacaacttgaactgtatatggaagatcatagttacggagggctcgggaattcagatccaagtgatcagttttgccacggagcagaactgggactcccttgagatccacgatggtggggatgtgaccgcacccagactgggaagcttctcaggcaccacagtaccggcactgctgaacagtacttccaaccaactctacctgcatttccagtctgacattagtgtggcagctgctggtttccacctggaatacaaaactgtaggtcttgctgcatgccaagaaccagccctccccagcaacagcatcaaaatcggagatcggtacatggtgaacgacgtgctctccttccagtgcgagcccgggtacaccctgcagggccgttcccacatttcctgtatgccagggaccgttcgccgttggaactatccgtctcccctgtgcattgcaacctgtggagggacgctgagcaccttgggtggtgtgatcctgagccccggcttcccaggttcttaccccaacaacttagactgcacctggaggatctcattacccatcggctatggtgcacatattcagtttctgaatttttctaccgaagctaatcatgacttccttgaaattcaaaatggaccttaccacaccagccccatgattggacaatttagcggcacggatctccccgcggccctgctgagcacaacgcatgaaaccctcatccacttttatagtgaccattcgcaaaaccggcaaggatttaaacttgcttaccaagcctatgaattacagaactgtccagatccacccccatttcagaatgggtacatgatcaactcggattacagcgtggggcaatcagtatctttcgagtgttatcctgggtacattctaataggccatcctgtcctcacttgtcagcatgggatcaacagaaactggaactacccttttccaagatgtgatgccccttgtgggtacaacgtaacttctcagaacggcaccatctactcccctggctttcctgatgagtatccgatcctgaaggactgcatttggctcatcacggtgcctccagggcacggagtttacatcaacttcaccctgttacagacggaagctgtcaacgattacattgctgtttgggacggtcccgatcagaactcaccccagctgggagttttcagtggcaacacagccctcgaaacggcgtatagctccaccaaccaagtcctgctcaagttccacagcgacttttcaaatggaggcttctttgtcctcaatttccacgcatttcagctcaagaaatgtcaacctcccccagcggttccacaggcagaaatgcttactgaggatgatgatttcgaaataggagattttgtgaagtaccagtgccaccccgggtacaccttggtggggaccgacattctgacttgcaagctcagttcccagttgcagtttgagggttctctcccaacatgtgaagcacaatgcccagcaaatgaagtccggactggatcatcgggagtcattctcagtccagggtatccgggtaattattttaactcccagacttgctcttggagtattaaagtggaaccaaactacaacattaccatctttgtggacacatttcaaagtgaaaagcagtttgatgcactggaagtgtttgatggttcttctgggcaaagtcctctgctagtagtcttaagtgggaatcatactgaacaatcaaattttacaagcaggagtaatcagttatatctccgctggtccactgaccatgccaccagtaagaaaggattcaagattcgctatgcagcaccttactgcagtttgacccaccccctgaagaatgggggtattctaaacaggactgcaggagcggttggaagcaaagtgcattatttttgcaagcctggataccgaatggtcggccacagcaatgcaacctgtagacgaaacccacttggcatgtaccagtgggactccctcacgccactctgccaggctgtgtcctgtggaatcccagaatccccaggaaacggttcatttaccgggaacgagttcactttggacagtaaagtggtctatgaatgtcatgagggcttcaagcttgaatccagccagcaagcaacagccgtgtgtcaagaagatgggttgtggagtaacaaggggaagccgcccacgtgtaagccggtcgcttgccccagcattgaagctcagctctcagaacatgtcatctggaggctggtttcaggatccttgaatgagtacggtgctcaagtattgctgagctgcagtcctggttactacttagaaggctggaggctcctgcggtgccaggccaatgggacgtggaacataggagatgagaggccaagctgtcgagttatctcgtgtggaagcctttcctttcccccaaatggcaacaagattggaacgttgacagtttatggggccacagctatatttacgtgcaacaccggctacacgcttgtggggtctcatgtcagagagtgcttggcaaatgggctctggagcggcagcgaaactcgatgtctggctggccactgcggttccccagacccgattgtgaacggtcacattagtggagatggcttcagttacagagacacggtggtttaccagtgcaatcctggtttccggcttgtgggaacttccgtgaggatatgcctgcaagaccacaagtggtctggacaaacgcctgtctgtgtccccatcacatgtggtcaccctggaaaccctgcccacggattcactaatggcagtgagttcaacctgaatgatgtcgtgaatttcacctgcaacacgggctatttgctgcagggcgtgtctcgagcccagtgtcggagcaacggccagtggagtagccctctgcccacgtgtcgagtggtgaactgttctgatccaggctttgtggaaaatgccattcgtcacgggcaacagaacttccctgagagttttgagtatggaatgagtatcctgtaccattgcaagaagggattttacttgctgggatcttcagccttgacctgtatggcaaatggcttatgggaccgatccctgcccaagtgtttggctatatcgtgtggacacccaggggtccctgccaacgccgtcctcactggagagctgtttacctatggcgccgtcgtgcactactcctgcagagggagcgagagcctcataggcaacgacacgagagtgtgccaggaagacagtcactggagcggggcactgccccactgcacaggaaataatcctggattctgtggtgatccggggaccccagcacatgggtctcggcttggtgatgactttaagacaaagagtcttctccgcttctcctgtgaaatggggcaccagctgaggggctcccctgaacgcacgtgtttgctcaatgggtcatggtcaggactgcagccggtgtgtgaggccgtgtcctgtggcaaccctggcacacccaccaacggaatgattgtcagtagtgatggcattctgttctccagctcggtcatctatgcctgctgggaaggctacaagacctcagggctcatgacacggcattgcacagccaatgggacctggacaggcactgctcccgactgcacaattataagttgtggggatccaggcacactagcaaatggcatccagtttgggaccgacttcaccttcaacaagactgtgagctatcagtgtaacccaggctatgtcatggaagcagtcacatccgccactattcgctgtaccaaagacggcaggtggaatccgagcaaacctgtctgcaaagccgtgctgtgtcctcagccgccgccggtgcagaatggaacagtggagggaagtgatttccgctggggctccagcataagttacagctgcatggacggttaccagctctctcactccgccatcctctcctgtgaaggtcgcggggtgtggaaaggagagatcccccagtgtctccctgtgttctgcggagaccctggcatccccgcagaagggcgacttagtgggaaaagtttcacctataagtccgaagtcttcttccagtgcaaatctccatttatactcgtgggatcctccagaagagtctgccaagctgacggcacgtggagcggcatacaacccacctgcattgatcctgctcataacacctgcccagaccctggtacgccacactttggaatacagaatagctccagaggctatgaggttggaagcacggtttttttcaggtgcagaaaaggctaccatattcaaggttccacgactcgcacctgccttgccaatttaacatggagtgggatacagaccgaatgtatacctcatgcctgcagacagccagaaaccccggcacacgcggatgtgagagccatcgatcttcctactttcggctacaccttagtgtacacctgccatccaggctttttcctcgcagggggatctgagcacagaacatgtaaagcagacatgaaatggacaggaaagtcgcctgtgtgtaaaagtaaaggagtgagagaagttaatgaaacagttactaaaactccagttccttcagatgtctttttcgtcaattcactgtggaaggggtattatgaatatttagggaaaagacaacccgccactctaactgttgactggttcaatgcaacaagcagtaaggtgaatgccaccttcagcgaagcctcgccagtggagctgaagttgacaggcatttacaagaaggaggaggcccacttactcctgaaagcttttcaaattaaaggccaggcagatatttttgtaagcaagttcgaaaatgacaactggggactagatggttatgtgtcatctggacttgaaagaggaggatttacttttcaaggtgacattcatggaaaagactttggaaaatttaagctagaaaggcaagatcctttaaacccagatcaagactcttccagtcattaccacggcaccagcagtggctctgtggcggctgccattctggttcctttctttgctctaattttatcagggtttgcattttacctctacaaacacagaacgagaccaaaagttcaatacaatggctatgctgggcatgaaaacagcaatggacaagcatcgtttgaaaaccccatgtatgatacaaacttaaaacccacagaagccaaggctgtgaggtttgacacaactctgaacacagtctgtacagtggtatagccctcagtgccccaacaggactgattcatagccatacctctgatggacaagcagtgattcctttggtgccatataccactctcccttccactctggctttactgcagcgatcttcaaccttgtctactggcataagtgcagcggggatctctactcaaatgtgtcagggtcttctacggatcaaactacacatgcgttttcattccaaaagtgggttctaaatgcctggctgcatctgtatgaaatcaaggcacactccaggaagactgccacgtcgcgccaacacgtcatactcaatgcctcagactttcatatttctgtgttgctgagatgcctttcaatgcaatcgtctgggctcgtggatatgtccctcaggtgcggtgacagaatggtggcaccacgatatgtgttctcttgtgttgtttttcctttttaaacccccatgaacacgaatactctgaaaaaaataaaaagctttctggaaga

SEQ ID NO: 4962 - DNA, 11740 bp, Homo sapiens
  source 1..11740: mol_type = unassigned DNA; mol_type = unassigned DNA
gactgcgccgtgcccagcctcggtcccctctctgtgggtaaggatggttgagtccagcctccacggcagcggctccttgtgccactagcagcccttcttctgcgctctccgccttttctctctagactggatctctcctcccccccgcgcccccctccccgcatctcccactcgctggctctctctccagctgcctcctctccaggtctctcctggctgcgcgcgctcctctccccgcttctccccctcccgcagcctcgccgccttggtgccttcctgcccggctcggccggcgctcgtccccggccccggccccgccagcccgggtctccgcgctcggagcagctcagccctgcagtggctcgggacccgatgctatgagagggaagcgagccgggcgcccagaccttcaggaggcgtcggatgcgcggcgggtcttgggaccgggctctctctccggctcgccttgccctcgggtgattatttggctccgctcatagccctgccttcctcggaggagccatcggtgtcgcgtgcgtgtggagtatctgcagacatgactgcgtggaggagattccagtcgctgctcctgcttctcgggctgctggtgctgtgcgcgaggctcctcactgcagcgaagggtcagaactgtggaggcttagtccagggtcccaatggcactattgagagcccagggtttcctcacgggtatccgaactatgccaactgcacctggatcatcatcacgggcgagcgcaataggatacagttgtccttccatacctttgctcttgaagaagattttgatattttatcagtttacgatggacagcctcaacaagggaatttaaaagtgagattatcgggatttcagctgccctcctctatagtgagtacaggatctatcctcactctgtggttcacgacagacttcgctgtgagtgcccaaggtttcaaagcattatatgaagttttacctagccacacttgtggaaatcctggagaaatcctgaaaggagttctgcatggaacgagattcaacataggagacaaaatccggtacagctgcctccctggctacatcttggaaggccacgccatcctgacctgcatcgtcagcccaggaaatggtgcatcgtgggacttcccagctcccttttgcagagctgagggagcctgcggaggaaccttacgcgggaccagcagctccatctccagcccgcacttcccttcagagtacgagaacaacgcggactgcacctggaccattctggctgagcccggggacaccattgcgctggtcttcactgactttcagctagaagaaggatatgatttcttagagatcagtggcacggaagctccatccatatggctaactggcatgaacctcccctctccagttatcagtagcaagaattggctacgactccatttcacctctgacagcaaccaccgacgcaaaggatttaacgctcagttccaagtgaaaaaggcgattgagttgaagtcaagaggagtcaagatgctgcccagcaaggatggaagccataaaaactctgtcttgagccaaggaggtgttgcattggtctctgacatgtgtccagatcctgggattccagaaaatggtagaagagcaggttccgacttcagtagggttggtgcaaatgtacagttttcatgtgaggacaattacgtgctccagggatctaaaagcatcacctgtcagagagttacagagacgctcgctgcttggagtgaccacaggcccatctgccgagcgagaacatgtggatccaatctgcgtgggcccagcggcgtcattacctcccctaattatccggttcagtatgaagataatgcacactgtgtgtgggtcatcaccaccaccgacccggacaaggtcatcaagcttgcctttgaagagtttgagctggagcgaggctatgacaccctgacggttggtgatgctgggaaggtgggagacaccagatcggtcttgtacgtgctcacgggatccagtgttcctgacctcattgtgagcatgagcaaccagatgtggctacatctgcagtcggatgatagcattggctcacctgggtttaaagctgtttaccaagaaattgaaaagggagggtgtggggatcctggaatccccgcctatgggaagcggacgggcagcagtttcctccatggagatacactcacctttgaatgcccggcggcctttgagctggtgggggagagagttatcacctgtcagcagaacaatcagtggtctggcaacaagcccagctgtgtattttcatgtttcttcaactttacggcatcatctgggattattctgtcaccaaattatccagaggaatatgggaacaacatgaactgtgtctggttgattatctcggagccaggaagtcgaattcacctaatctttaatgattttgatgttgagcctcagtttgactttctcgcggtcaaggatgatggcatttctgacataactgtcctgggtactttttctggcaatgaagtgccttcccagctggccagcagtgggcatatagttcgcttggaatttcagtctgaccattccactactggcagagggttcaacatcacttacaccacatttggtcagaatgagtgccatgatcctggcattcctataaacggacgacgttttggtgacaggtttctactcgggagctcggtttctttccactgtgatgatggctttgtcaagacccagggatccgagtccattacctgcatactgcaagacgggaacgtggtctggagctccaccgtgccccgctgtgaagctccatgtggtggacatctgacagcgtccagcggagtcattttgcctcctggatggccaggatattataaggattctttacattgtgaatggataattgaagcaaaaccaggccactctatcaaaataacttttgacagatttcagacagaggtcaattatgacaccttggaggtcagagatgggccagccagttcgtccccactgatcggcgagtaccacggcacccaggcaccccagttcctcatcagcaccgggaacttcatgtacctgctgttcaccactgacaacagccgctccagcatcggcttcctcatccactatgagagtgtgacgcttgagtcggattcctgcctggacccgggcatccctgtgaacggccatcgccacggtggagactttggcatcaggtccacagtgactttcagctgtgacccggggtacacactaagtgacgacgagcccctcgtctgtgagaggaaccaccagtggaaccacgccttgcccagctgcgacgctctatgtggaggctacatccaagggaagagtggaacagtcctttctcctgggtttccagatttttatccaaactctctaaactgcacgtggaccattgaagtgtctcatgggaaaggagttcaaatgatctttcacacctttcatcttgagagttcccacgactatttactgatcacagaggatggaagtttttccgagcccgttgccaggctcaccgggtcggtgttgcctcatacgatcaaggcaggcctgtttggaaacttcactgcccagcttcggtttatatcagacttctcaatttcgtacgagggcttcaatatcacattttcagaatatgacctggagccatgtgatgatcctggagtccctgccttcagccgaagaattggttttcactttggtgtgggagactctctgacgttttcctgcttcctgggatatcgtttagaaggtgccaccaagcttacctgcctgggtgggggccgccgtgtgtggagtgcacctctgccaaggtgtgtggccgaatgtggagcaagtgtcaaaggaaatgaaggaacattactgtctccaaattttccatccaattatgataataaccatgagtgtatctataaaatagaaacagaagccggcaagggcatccaccttagaacacgaagcttccagctgtttgaaggagatactctaaaggtatatgatggaaaagacagttcctcacgtccactgggcacgttcactaaaaatgaacttctggggctgatcctaaacagcacatccaatcacctgtggctagagttcaacaccaatggatctgacaccgaccaaggttttcaactcacctataccagttttgatctggtaaaatgtgaggatccgggcatccctaactacggctataggatccgtgatgaaggccactttaccgacactgtagttctgtacagttgcaacccggggtacgccatgcatggcagcaacaccctgacctgtttgagtggagacaggagagtgtgggacaaaccactaccttcgtgcatagcggaatgtggtggtcagatccatgcagccacatcaggacgaatattgtcccctggctatccagctccgtatgacaacaacctccactgcacctggattatagaggcagacccaggaaagaccattagcctccatttcattgttttcgacacggagatggctcacgacatcctcaaggtctgggacgggccggtggacagtgacatcctgctgaaggagtggagtggctccgcccttccggaggacatccacagcaccttcaactcactcaccctgcagttcgacagcgacttcttcatcagcaagtctggcttctccatccagttctccacctcaattgcagccacctgtaacgatccaggtatgccccaaaatggcacccgctatggagacagcagagaggctggagacaccgtcacattccagtgtgaccctggctatcagctccaaggacaagccaaaatcacctgtgtgcagctgaataaccggttcttttggcaaccagaccctcctacatgcatagctgcttgtggagggaatctgacgggcccagcaggtgttattttgtcacccaactacccacagccgtatcctcctgggaaggaatgtgactggagagtaaaagtgaacccggactttgtcatcgccttgatattcaaaagtttcaacatggagcccagctatgacttcctacacatctatgaaggggaagattccaacagccccctcattgggagttaccagggctctcaggccccagaaagaatagagagtagcggaaacagcctgtttctggcatttcggagtgatgcctccgtgggcctttcagggttcgccattgaatttaaagagaaaccacgggaagcttgttttgacccaggaaatataatgaatgggacaagagttggaacagacttcaagcttggctccaccatcacctaccagtgtgactctggctataagattcttgacccctcatccatcacctgtgtgattggggctgatgggaaaccctcctgggaccaagtgctgccctcctgcaatgctccctgtggaggccagtacacgggatcagaaggggtagttttatcaccaaactacccccataattacacagctggtcaaatatgcctctattccatcacggtaccaaaggaattcgtggtctttggacagtttgcctatttccagacagccctgaatgatttggcagaattatttgatggaacccatgcacaggccagacttctcagctcactctcggggtctcactcaggggaaacattgcccttggctacgtcaaatcaaattctgctccgattcagtgcaaagagcggtgcctctgcccgcggcttccacttcgtgtatcaagctgttcctcgtaccagtgacacccaatgcagctctgtccccgagcccagatacggaaggagaattggttctgagttttctgccggctccatcgtccgattcgagtgcaacccgggatacctgcttcagggttccacggcgctccactgccagtccgtgcccaacgccttggcacagtggaacgacacgatccccagctgtgtggtaccctgcagtggcaatttcactcaacgaagaggtacaatcctgtcccccggctaccctgagccatacggaaacaacttgaactgtatatggaagatcatagttacggagggctcgggaattcagatccaagtgatcagttttgccacggagcagaactgggactcccttgagatccacgatggtggggatgtgaccgcacccagactgggaagcttctcaggcaccacagtaccggcactgctgaacagtacttccaaccaactctacctgcatttccagtctgacattagtgtggcagctgctggtttccacctggaatacaaaactgtaggtcttgctgcatgccaagaaccagccctccccagcaacagcatcaaaatcggagatcggtacatggtgaacgacgtgctctccttccagtgcgagcccgggtacaccctgcagggccgttcccacatttcctgtatgccagggaccgttcgccgttggaactatccgtctcccctgtgcattgcaacctgtggagggacgctgagcaccttgggtggtgtgatcctgagccccggcttcccaggttcttaccccaacaacttagactgcacctggaggatctcattacccatcggctatggtgcacatattcagtttctgaatttttctaccgaagctaatcatgacttccttgaaattcaaaatggaccttaccacaccagccccatgattggacaatttagcggcacggatctccccgcggccctgctgagcacaacgcatgaaaccctcatccacttttatagtgaccattcgcaaaaccggcaaggatttaaacttgcttaccaagcctatgaattacagaactgtccagatccacccccatttcagaatgggtacatgatcaactcggattacagcgtggggcaatcagtatctttcgagtgttatcctgggtacattctaataggccatcctgtcctcacttgtcagcatgggatcaacagaaactggaactacccttttccaagatgtgatgccccttgtgggtacaacgtaacttctcagaacggcaccatctactcccctggctttcctgatgagtatccgatcctgaaggactgcatttggctcatcacggtgcctccagggcacggagtttacatcaacttcaccctgttacagacggaagctgtcaacgattacattgctgtttgggacggtcccgatcagaactcaccccagctgggagttttcagtggcaacacagccctcgaaacggcgtatagctccaccaaccaagtcctgctcaagttccacagcgacttttcaaatggaggcttctttgtcctcaatttccacgcatttcagctcaagaaatgtcaacctcccccagcggttccacaggcagaaatgcttactgaggatgatgatttcgaaataggagattttgtgaagtaccagtgccaccccgggtacaccttggtggggaccgacattctgacttgcaagctcagttcccagttgcagtttgagggttctctcccaacatgtgaagcacaatgcccagcaaatgaagtccggactggatcatcgggagtcattctcagtccagggtatccgggtaattattttaactcccagacttgctcttggagtattaaagtggaaccaaactacaacattaccatctttgtggacacatttcaaagtgaaaagcagtttgatgcactggaagtgtttgatggttcttctgggcaaagtcctctgctagtagtcttaagtgggaatcatactgaacaatcaaattttacaagcaggagtaatcagttatatctccgctggtccactgaccatgccaccagtaagaaaggattcaagattcgctatgcagcaccttactgcagtttgacccaccccctgaagaatgggggtattctaaacaggactgcaggagcggttggaagcaaagtgcattatttttgcaagcctggataccgaatggtcggccacagcaatgcaacctgtagacgaaacccacttggcatgtaccagtgggactccctcacgccactctgccaggctgtgtcctgtggaatcccagaatccccaggaaacggttcatttaccgggaacgagttcactttggacagtaaagtggtctatgaatgtcatgagggcttcaagcttgaatccagccagcaagcaacagccgtgtgtcaagaagatgggttgtggagtaacaaggggaagccgcccacgtgtaagccggtcgcttgccccagcattgaagctcagctctcagaacatgtcatctggaggctggtttcaggatccttgaatgagtacggtgctcaagtattgctgagctgcagtcctggttactacttagaaggctggaggctcctgcggtgccaggccaatgggacgtggaacataggagatgagaggccaagctgtcgagttatctcgtgtggaagcctttcctttcccccaaatggcaacaagattggaacgttgacagtttatggggccacagctatatttacgtgcaacaccggctacacgcttgtggggtctcatgtcagagagtgcttggcaaatgggctctggagcggcagcgaaactcgatgtctggctggccactgcggttccccagacccgattgtgaacggtcacattagtggagatggcttcagttacagagacacggtggtttaccagtgcaatcctggtttccggcttgtgggaacttccgtgaggatatgcctgcaagaccacaagtggtctggacaaacgcctgtctgtgtccccatcacatgtggtcaccctggaaaccctgcccacggattcactaatggcagtgagttcaacctgaatgatgtcgtgaatttcacctgcaacacgggctatttgctgcagggcgtgtctcgagcccagtgtcggagcaacggccagtggagtagccctctgcccacgtgtcgagtggtgaactgttctgatccaggctttgtggaaaatgccattcgtcacgggcaacagaacttccctgagagttttgagtatggaatgagtatcctgtaccattgcaagaagggattttacttgctgggatcttcagccttgacctgtatggcaaatggcttatgggaccgatccctgcccaagtgtttggctatatcgtgtggacacccaggggtccctgccaacgccgtcctcactggagagctgtttacctatggcgccgtcgtgcactactcctgcagagggagcgagagcctcataggcaacgacacgagagtgtgccaggaagacagtcactggagcggggcactgccccactgcacaggaaataatcctggattctgtggtgatccggggaccccagcacatgggtctcggcttggtgatgactttaagacaaagagtcttctccgcttctcctgtgaaatggggcaccagctgaggggctcccctgaacgcacgtgtttgctcaatgggtcatggtcaggactgcagccggtgtgtgaggccgtgtcctgtggcaaccctggcacacccaccaacggaatgattgtcagtagtgatggcattctgttctccagctcggtcatctatgcctgctgggaaggctacaagacctcagggctcatgacacggcattgcacagccaatgggacctggacaggcactgctcccgactgcacaattataagttgtggggatccaggcacactagcaaatggcatccagtttgggaccgacttcaccttcaacaagactgtgagctatcagtgtaacccaggctatgtcatggaagcagtcacatccgccactattcgctgtaccaaagacggcaggtggaatccgagcaaacctgtctgcaaagccgtgctgtgtcctcagccgccgccggtgcagaatggaacagtggagggaagtgatttccgctggggctccagcataagttacagctgcatggacggttaccagctctctcactccgccatcctctcctgtgaaggtcgcggggtgtggaaaggagagatcccccagtgtctccctgtgttctgcggagaccctggcatccccgcagaagggcgacttagtgggaaaagtttcacctataagtccgaagtcttcttccagtgcaaatctccatttatactcgtgggatcctccagaagagtctgccaagctgacggcacgtggagcggcatacaacccacctgcattgatcctgctcataacacctgcccagaccctggtacgccacactttggaatacagaatagctccagaggctatgaggttggaagcacggtttttttcaggtgcagaaaaggctaccatattcaaggttccacgactcgcacctgccttgccaatttaacatggagtgggatacagaccgaatgtatacctcatgcctgcagacagccagaaaccccggcacacgcggatgtgagagccatcgatcttcctactttcggctacaccttagtgtacacctgccatccaggctttttcctcgcagggggatctgagcacagaacatgtaaagcagacatgaaatggacaggaaagtcgcctgtgtgtaaaagtaaaggagtgagagaagttaatgaaacagttactaaaactccagttccttcagatgtctttttcgtcaattcactgtggaaggggtattatgaatatttagggaaaagacaacccgccactctaactgttgactggttcaatgcaacaagcagtaaggtgaatgccaccttcagcgaagcctcgccagtggagctgaagttgacaggcatttacaagaaggaggaggcccacttactcctgaaagcttttcaaattaaaggccaggcagatatttttgtaagcaagttcgaaaatgacaactggggactagatggttatgtgtcatctggacttgaaagaggaggatttacttttcaaggtgacattcatggaaaagactttggaaaatttaagctagaaaggcaagatcctttaaacccagatcaagactcttccagtcattaccacggcaccagcagtggctctgtggcggctgccattctggttcctttctttgctctaattttatcagggtttgcattttacctctacaaacacagaacgagaccaaaagttcaatacaatggctatgctgggcatgaaaacagcaatggacaagcatcgtttgaaaaccccatgtatgatacaaacttaaaacccacagaagccaaggctgtgaggtttgacacaactctgaacacagtctgtacagtggtatagccctcagtgccccaacaggactgattcatagccatacctctgatggacaagcagtgattcctttggtgccatataccactctcccttccactctggctttactgcagcgatcttcaaccttgtctactggcataagtgcagcggggatctctactcaaatgtgtcagggtcttctacggatcaaactacacatgcgttttcattccaaaagtgggttctaaatgcctggctgcatctgtatgaaatcaaggcacactccaggaagactgccacgtcgcgccaacacgtcatactcaatgcctcagactttcatatttctgtgttgctgagatgcctttcaatgcaatcgtctgggctcgtggatatgtccctcaggtgcggtgacagaatggtggcaccacgatatgtgttctcttgtgttgtttttcctttttaaacccccatgaacacgaatactctgaaaaaaataaaaagctttctggaaga

SEQ ID NO: 4963 - DNA, 11740 bp, Homo sapiens; identical to SEQ ID NO: 4962
  source 1..11740: mol_type = unassigned DNA; mol_type = unassigned DNA

SEQ ID NO: 4964 - DNA, 590 bp, Homo sapiens
  source 1..590: mol_type = unassigned DNA; mol_type = unassigned DNA
ttttgaattcactttgagctgacggttttgtccaaggtgttggatgaagagcacttgaaaataaactgcggtcgcttgccccagcattgaagctcagctctcagaacatgtcatctggaggctggtttcaggatccttgaatgagtacggtgctcaagtattgctgagctgcagtcctggttactacttagaaggctggaggctcctgcggtgccaggccaatgggacgtggaacataggagatgagaggccaagctgtcgagttatctcgtgtggaagcctttcctttcccccaaatggcaacaagattggaacgttgacagtttatggggccacagctatatttacgtgcaacaccggctacacgcttgtggggtctcatgtcagagagtgcttggcaaatgggctctggagcggcagcgaaactcgatgtctggctggccactgcggttccccagacccgattgtgaacggtcacattagtggagatggcttcagttacagagacacggtggtttaccagtgcaatcctggtttccggcttgtgggaacttccgtgaggatatgcctgcaagaccacaagtggtctg

SEQ ID NO: 4965 - DNA, 764 bp, Homo sapiens
  source 1..764: mol_type = unassigned DNA; mol_type = unassigned DNA
ttattgcaacccaggatttttcagccccagttataaaactctgccctgtgtttcagaccactggtcaaactacgtgacccaatttctgctgtcctcaccctggcttagttaattggaacattgtgctaagtaccaaggtcagagatgagtctctgtggatgctgtaaagccatttgattttacagtcttgcttaaaccatagcttctactttactttttttttcttttcgtcagcaatcactggggaagggaaaccaacacggatgcctcagtcaaggaagaaaagctgccacatcatttcagtactaatatcggctaagcttaatagagcatttttataaattaagaacttaaaacggtattatttttaaaagactaaaaataaatacagacatagtttctaaaaagatttgcaagttgatttaattcatttaagtagtcctacatgtgtcacaccttcacacactcagaaggtcacacacaatttcctggtttgttgcattgactcttctaggagattttgtgaagtaccagtgccaccccgggtacaccttggtggggaccgacattctgacttgcaagctcagttcccagttgcagtttgagggttctctcccaacatgtgaagcacaatgcccagcaaatgaagtccggactggatcatcgggagtcattctcagtccagggtatccgggtaattattttaactcccagacttgctcttggagtattaaagtggaaccaaactacaacattaccatctt

SEQ ID NO: 4966 - DNA, 527 bp, Homo sapiens
  source 1..527: mol_type = unassigned DNA; mol_type = unassigned DNA
attcatgagcacggaaatgcctgcgcgtctctttactccatggctcctgagagtggagggagtgtagcctctctatccctttcagttgctgatgccatggtcagctgtctgtcttcctggtccggcttggaccagtgtctcccaggcagacaggtgaggagctgggaggtacctgctgtgctccacgcagagcttcctctttgatctcagtccagactccactttgaaccccgccttcagggaaaggaaggcaggggggatacgcttcctgccgagacacgcacacttcctgcagtggcagatcacaggcccccgtctctgcggagctcagtgagacgccaccacttggggaaatgcaaacgtgcctttgatgccactgcagcgaggataaagacggtctggaaccccttgtgggtacaacgtaacttctcagaacggcaccatctactcccctggctttcctgatgagtatccgatcctgaaggactgcatttggctcatcacggtgcctccagggcacggagttt

SEQ ID NO: 4967 - DNA, 3989 bp, Homo sapiens
  source 1..3989: mol_type = unassigned DNA; mol_type = unassigned DNA
aaattatacagagatctggaagtctcaaaagcaatccttttatcctaaaatggatagctcagcatctagctcacctatctctctgcgtccatgacagactgaggtcctgtgtgctttatcctaatttacactcctgaattatcttcggtgagcctcattttcctcatccttcattgtcagacacctccatttcattgttttcgacacggagatggctcacgacatcctcaaggtctgggacgggccggtggacagtgacatcctgctgaaggagtggagtggctccgcccttccggaggacatccacagcaccttcaactcactcaccctgcagttcgacagcgacttcttcatcagcaagtctggcttctccatccagttctccacctcaattgcagccacctgtaacgatccaggtatgccccaaaatggcacccgctatggagacagcagagaggctggagacaccgtcacattccagtgtgaccctggctatcagctccaaggacaagccaaaatcacctgtgtgcagctgaataaccggttcttttggcaaccagaccctcctacatgcatagctgcttgtggagggaatctgacgggcccagcaggtgttattttgtcacccaactacccacagccgtatcctcctgggaaggaatgtgactggagagtaaaagtgaacccggactttgtcatcgccttgatattcaaaagtttcaacatggagcccagctatgacttcctacacatctatgaaggggaagattccaacagccccctcattgggagttaccagggctctcaggccccagaaagaatagagagtagcggaaacagcctgtttctggcatttcggagtgatgcctccgtgggcctttcagggttcgccattgaatttaaagagaaaccacgggaagcttgttttgacccaggaaatataatgaatgggacaagagttggaacagacttcaagcttggctccaccatcacctaccagtgtgactctggctataagattcttgacccctcatccatcacctgtgtgattggggctgatgggaaaccctcctgggaccaagtgctgccctcctgcaatgctccctgtggaggccagtacacgggatcagaaggggtagttttatcaccaaactacccccataattacacagctggtcaaatatgcctctattccatcacggtaccaaaggaattcgtggtctttggacagtttgcctatttccagacagccctgaatgatttggcagaattatttgatggaacccatgcacaggccagacttctcagctcactctcggggtctcactcaggggaaacattgcccttggctacgtcaaatcaaattctgctccgattcagtgcaaagagcggtgcctctgcccgcggcttccacttcgtgtatcaagctgttcctcgtaccagtgacacccaatgcagctctgtccccgagcccagatacggaaggagaattggttctgagttttctgccggctccatcgtccgattcgagtgcaacccgggatacctgcttcagggttccacggcgctccactgccagtccgtgcccaacgccttggcacagtggaacgacacgatccccagctgtgtggtaccctgcagtggcaatttcactcaacgaagaggtacaatcctgtcccccggctaccctgagccatacggaaacaacttgaactgtatatggaagatcatagttacggagggctcgggaattcagatccaagtgatcagttttgccacggagcagaactgggactcccttgagatccacgatggtggggatgtgaccgcacccagactgggaagcttctcaggcaccacagtaccggcactgctgaacagtacttccaaccaactctacctgcatttccagtctgacattagtgtggcagctgctggtttccacctggaatacaaaactgtaggtcttgctgcatgccaagaaccagccctccccagcaacagcatcaaaatcggagatcggtacatggtgaacgacgtgctctccttccagtgcgagcccgggtacaccctgcagggccgttcccacatttcctgtatgccagggaccgttcgccgttggaactatccgtctcccctgtgcattgcaacctgtggagggacgctgagcaccttgggtggtgtgatcctgagccccggcttcccaggttcttaccccaacaacttagactgcacctggaggatctcattacccatcggctatggtgcacatattcagtttctgaatttttctaccgaagctaatcatgacttccttgaaattcaaaatggaccttaccacaccagccccatgattggacaatttagcggcacggatctccccgcggccctgctgagcacaacgcatgaaaccctcatccacttttatagtgaccattcgcaaaaccggcaaggatttaaacttgcttaccaaggaggatctggaaacattggtcctgctttcccatgtcttgacaccccattccaagccagatgtcaaggagaagaaaggactttcaattaaaaaaaaaacaaaaactcgaaacaacatgttttttattgtacgccattaatttcctatcactgagatataaaaataaataatacaaataaatgagaacatgaatttgagctattttattttcttgtagggtatcatatctgacagaggtgacacttaattagatagtttgtcagtgtttgccattttataaaattgataaattgataagatgacacttaactctgatatgtaagtcaaataaacattcctaggttctacttgagatttagaagctaagcttataattaataactcctaagaagatgcataaatcatacagagaattcttgtcattttcaatgatgtctgtgctgtacaccttattcttaaagtttgtcatttatttatgaccatgtaaaggtcagagatgttactatagacgtagctgtcttgaagttaaatgacttattaagaactttggtaaaatcaagccatgcactctatttctaagtcaagaattgaaaaattgataatagcatgaagatatttatcaactaactagatattagcgggaaaatagacattagggggattactgcatggtctcgttgcacttatgatttaaaaacttgatgtgaataatagttatttttttcagatctaaacaaaggattcctttataaaagataaaattctctgtgttattttacttttgttggtattgccttgggcttattgatacttagattttcataatactcataaaaattttgccatgttaaagattttagtgacttccttttcttttaggttttgcaatttggagaagttaagtccctccctccctcccttctttccttccctccctccctctttccttccttccttctttccttcccttccttccttccttccttccttccttccttccttcattcctccctccctccctctcattccttccctccctcctttccttcctttgttctttagtatcttcctctctttcttttctgtgttataaagcatattgctgcattctaatgcataaacttttttgggaaagaaaacttattcaatgccaaaatctcaaagataattttaatgctttaggcatagcaagtaaaaatgtcttttattttcaaagttccactgtttttcttcttccttttgctatgtgtgccaaacaccatttttaaagataatcgaatgtgttaaatctgtttattcttcatcacaatcataaaactgctgaattttatgtgaaatgattttcttagaaaataggctatagtttgttataccaatttttcccctttagaagaacaagcaattaagccacctccaggcacaatgaacatctgaacaattcattctgaattatgtgagcatgcaaactgttgcttgtatacaaaccataatttgtacataaagttgatatgcttct

SEQ ID NO: 4968 - DNA, 3714 bp, Homo sapiens
  source 1..3714: mol_type = unassigned DNA; mol_type = unassigned DNA
cactgatcggcgagtaccacggcacccaggcaccccagttcctcatcagcaccgggaacttcatgtacctgctgttcaccactgacaacagccgctccagcatcggcttcctcatccactatgagagtgtgacgcttgagtcggattcctgcctggacccgggcatccctgtgaacggccatcgccacggtggagactttggcatcaggtccacagtgactttcagctgtgacccggggtacacactaagtgacgacgagcccctcgtctgtgagaggaaccaccagtggaaccacgccttgcccagctgcgacgctctatgtggaggctacatccaagggaagagtggaacagtcctttctcctgggtttccagatttttatccaaactctctaaactgcacgtggaccattgaagtgtctcatgggaaaggagttcaaatgatctttcacacctttcatcttgagagttcccacgactatttactgatcacagaggatggaagtttttccgagcccgttgccaggctcaccgggtcggtgttgcctcatacgatcaaggcaggcctgtttggaaacttcactgcccagcttcggtttatatcagacttctcaatttcgtacgagggcttcaatatcacattttcagaatatgacctggagccatgtgatgatcctggagtccctgccttcagccgaagaattggttttcactttggtgtgggagactctctgacgttttcctgcttcctgggatatcgtttagaaggtgccaccaagcttacctgcctgggtgggggccgccgtgtgtggagtgcacctctgccaaggtgtgtggccgaatgtggagcaagtgtcaaaggaaatgaaggaacattactgtctccaaattttccatccaattatgataataaccatgagtgtatctataaaatagaaacagaagccggcaagggcatccaccttagaacacgaagcttccagctgtttgaaggagatactctaaaggtatatgatggaaaagacagttcctcacgtccactgggcacgttcactaaaaatgaacttctggggctgatcctaaacagcacatccaatcacctgtggctagagttcaacaccaatggatctgacaccgaccaaggttttcaactcacctataccagttttgatctggtaaaatgtgaggatccgggcatccctaactacggctataggatccgtgatgaaggccactttaccgacactgtagttctgtacagttgcaacccggggtacgccatgcatggcagcaacaccctgacctgtttgagtggagacaggagagtgtgggacaaaccactaccttcgtgcatagcggaatgtggtggtcagatccatgcagccacatcaggacgaatattgtcccctggctatccagctccgtatgacaacaacctccactgcacctggattatagaggcagacccaggaaagaccattagcctccatttcattgttttcgacacggagatggctcacgacatcctcaaggtctgggacgggccggtggacagtgacatcctgctgaaggagtggagtggctccgcccttccggaggacatccacagcaccttcaactcactcaccctgcagttcgacagcgacttcttcatcagcaagtctggcttctccatccagttctccacctcaattgcagccacctgtaacgatccaggtatgccccaaaatggcacccgctatggagacagcagagaggctggagacaccgtcacattccagtgtgaccctggctatcagctccaaggacaagccaaaatcacctgtgtgcagctgaataaccggttcttttggcaaccagaccctcctacatgcatagctgcttgtggagggaatctgacgggcccagcaggtgttattttgtcacccaactacccacagccgtatcctcctgggaaggaatgtgactggagagtaaaagtgaacccggactttgtcatcgccttgatattcaaaagtttcaacatggagcccagctatgacttcctacacatctatgaaggggaagattccaacagccccctcattgggagttaccagggctctcaggccccagaaagaatagagagtagcggaaacagcctgtttctggcatttcggagtgatgcctccgtgggcctttcagggttcgccattgaatttaaagagaaaccacgggaagcttgttttgacccaggaaatataatgaatgggacaagagttggaacagacttcaagcttggctccaccatcacctaccagtgtgactctggctataagattcttgacccctcatccatcacctgtgtgattggggctgatgggaaaccctcctgggaccaagtgctgccctcctgcaatgctccctgtggaggccagtacacgggatcagaaggggtagttttatcaccaaactacccccataattacacagctggtcaaatatgcctctattccatcacggtaccaaaggaattcgtggtctttggacagtttgcctatttccagacagccctgaatgatttggcagaattatttgatggaacccatgcacaggccagacttctcagctcactctcggggtctcactcaggggaaacattgcccttggctacgtcaaatcaaattctgctccgattcagtgcaaagagcggtgcctctgcccgcggcttccacttcgtgtatcaagctgttcctcgtaccagtgacacccaatgcagctctgtccccgagcccagatacggaaggagaattggttctgagttttctgccggctccatcgtccgattcgagtgcaacccgggatacctgcttcagggttccacggcgctccactgccagtccgtgcccaacgccttggcacagtggaacgacacgatccccagctgtgtggtaccctgcagtggcaatttcactcaacgaagaggtacaatcctgtcccccggctaccctgagccatacggaaacaacttgaactgtatatggaagatcatagttacggagggctcgggaattcagatccaagtgatcagttttgccacggagcagaactgggactcccttgagatccacgatggtggggatgtgaccgcacccagactgggaagcttctcaggcaccacagtaccggcactgctgaacagtacttccaaccaactctacctgcatttccagtctgacattagtgtggcagctgctggtttccacctggaatacaaaactgtaggtcttgctgcatgccaagaaccagccctccccagcaacagcatcaaaatcggagatcggtacatggtgaacgacgtgctctccttccagtgcgagcccgggtacaccctgcagggccgttcccacatttcctgtatgccagggaccgttcgccgttggaactatccgtctcccctgtgcattgcaacctgtggagggacgctgagcaccttgggtggtgtgatcctgagccccggcttcccaggttcttaccccaacaacttagactgcacctggaggatctcattacccatcggctatggtaagtgaaaatgttaccaattcctaaaagttcatttttttcatttccatcttggaaagaattaagcagaataaaatgccttattctgttggcataactgtatctgtaattgaaagtggcgtacagatttaaataaagctttggcagagt

SEQ ID NO: 4969 - DNA, 532 bp, Homo sapiens
  source 1..532: mol_type = unassigned DNA; mol_type = unassigned DNA
attaggcgttagagacctactcgatgtttcagggatagatagattaggcgtttagttcgacacacttcatgtttaaaaagcctcttctaggccgggtgcggtggctcatgcctgtaaagccagcactttgggaggctgaggcgggcggatcacgaggcaccacagtaccggcactgctgaacagtacttccaaccaactctacctgcatttccagtctgacattagtgtggcagctgctggtttccacctggaatacaaaactgtaggtcttgctgcatgccaagaaccagccctccccagcaacagcatcaaaatcggagatcggtacatggtgaacgacgtgctctccttccagtgcgagcccgggtacaccctgcagggccgttcccacatttcctgtatgccagggaccgttcgccgttggaactatccgtctcccctgtgcattgcaacctgtggagggacgctgagcaccttgggtggtgtgatcctgagccccggcttcccaggttcttaccccaacaacttaga

SEQ ID NO: 4970 - DNA, 1003 bp, Homo sapiens
  source 1..1003: mol_type = unassigned DNA; mol_type = unassigned DNA
cctccatttcattgttttcgacacggagatggctcacgacatcctcaaggtctgggacgggccggtggacagtgacatcctgctgaaggagtggagtggctccgcccttccggaggacatccacagcaccttcaactcactcaccctgcagttcgacagcgacttcttcatcagcaagtctggcttctccatccagttctccagatctcaggctggaacacgaagacgctggtctgaccaccccaaagccagtcattcagctactctccacaaaatgtagcttgccacttctgggaaccagtgagaatcgggcaccagtctccatctccctgagaacctgataaacatttgactcctacacctggaataaatcatgtcctggttttctagttttagaaaagaaggttcctataacccctcagtcgtaattaagaaactgacccagttaccctgcttcactgcaggaagaaactgggctgttatgtccctctcactccacccacattcgtcccctcactggcgaatccagccatgaaactaaatcaagctggtgtctttccaaaccaaaggtgggaaactcttcacaaagtgcaaaacagcctgtccatcacacccaagaagccatcactactcttttgtaggtgggaggatgggtgggaagatggaaatctctcatttttttgtctttatgaacctgggaccaaaaaaaaaacgaggaactttacctataaattagattgtgttgtgattcataaaccatgctaattttataatttaaaacattggaattagttatgattttaaaaatttttaaatagaactcaaaaagaaatgttttcctcatatgattgatgttttaagtgtggccattgtttccaagcaaaaatgacatttattcaattgtattaaatgagatttcttagtaggctatttttacttgattctatgtcagtaacatgtgaaataagcattagaggtgtgattaaattattggagagaaaat

SEQ ID NO: 4971 - DNA, 181 bp, Homo sapiens
  source 1..181: mol_type = unassigned DNA; mol_type = unassigned DNA
acatctctagtcacctcacatgaacaactgtgccatattttttccaggactgtcccagttgtaacattgctcacgggatccagtgttcctgacctcattgtgagcatgagcaaccagatgtggctacatctgcagtcggatgatagcattggctcacctgggtttaaagctgtttaccaag

SEQ ID NO: 4972 - DNA, 312 bp, Homo sapiens
  source 1..312: mol_type = unassigned DNA; mol_type = unassigned DNA
cacagtggtgatctgtagctgtgtgagtgcacggaacagcatgccagcatcagctcagatatcattatttacaccacatactccagaaaaagcaggtcatcaagcttgcctttgaagagtttgagctggagcgaggctatgacaccctgacggttggtgatgctgggaaggtgggagacaccagatcggtcttgtacgtgctcacgggatccagtgttcctgacctcattgtgagcatgagcaaccagatgtggctacatctgcagtcggatgatagcattggctcacctgggtttaaagctgtttaccaag

SEQ ID NO: 4973 - DNA, 126 bp, Homo sapiens
  source 1..126: mol_type = unassigned DNA; mol_type = unassigned DNA
aaatggtagaagagcaggttccgacttcagggttggtgcaaatgtacagttttcatgtgaggacaattacgtgctccagggatctaaaagcatcacctgtcagagagttacagagacgctcgctgc

SEQ ID NO: 4974 - DNA, 334 bp, Homo sapiens
  source 1..334: mol_type = unassigned DNA; mol_type = unassigned DNA
tccagtgaaaaaggcgattgagttgaagtcaagaggagtcaagatgctgcccagcaaggatggaagccataaaaactctgtctggcatcagcaagagttcagcaagtgcaggaagaaaaagagagagatcatgacaaggaatgggagaatttccctgacagcctcaggaaacttgcagtttgataattaaacagatcaagctcactcagatgagctgatgggacatgctgtgtacggaggagcatttgcagttacaacactttgtagccatgcaggatggggcaattaatccagaaccattatttaataaaaagatgattttttaaatgtggaa

SEQ ID NO: 4975 - DNA, 13512 bp, Homo sapiens
  source 1..13512: mol_type = unassigned DNA; mol_type = unassigned DNA
gttttacctagccacacttgtggaaatcctggagaaatcctgaaaggagttctgcatggaacgagattcaacataggagacaaaatccggtacagctgcctccctggctacatcttggaaggccacgccatcctgacctgcatcgtcagcccaggaaatggtgcatcgtgggacttcccagctcccttttgcagagctgagggagcctgcggaggaaccttacgcgggaccagcagctccatctccagcccgcacttcccttcagagtacgagaacaacgcggactgcacctggaccattctggctgagcccggggacaccattgcgctggtcttcactgactttcagctagaagaaggatatgatttcttagagatcagtggcacggaagctccatccatatggctgactggcatgaacctcccctctccagttatcagtagcaagaattggctacgactccatttcacctctgacagcaaccaccgacgcaaaggatttaacgctcagttccaagtgaaaaaggcgattgagttgaagtcaagaggagtcaagatgctgcccagcaaggatggaagccataaaaactctgtcttgagccaaggaggtgttgcattggtctctgacatgtgtccagatcctgggattccagaaaatggtagaagagcaggttccgacttcagggttggtgcaaatgtacagttttcatgtgaggacaattacgtgctccagggatctaaaagcatcacctgtcagagagttacagagacgctcgctgcttggagtgaccacaggcccatctgccgagcgagaacatgtggatccaatctgcgtgggcccagcggcgtcattacctcccctaattatccggttcagtatgaagataatgcacactgtgtgtgggtcatcaccaccaccgacccggacaaggtcatcaagcttgcctttgaagagtttgagctggagcgaggctatgacaccctgacggttggtgatgctgggaaggtgggagacaccagatcggtcttgtacgtgctcacgggatccagtgttcctgacctcattgtgagcatgagcaaccagatgtggctacatctgcagtcggatgatagcattggctcacctgggtttaaagctgtttaccaagaaattgaaaagggagggtgtggggatcctggaatccccgcctatgggaagcggacgggcagcagtttcctccatggagatacactcacctttgaatgcccggcggcctttgagctggtgggggagagagttatcacctgtcagcagaacaatcagtggtctggcaacaagcccagctgtgtattttcatgtttcttcaactttacggcatcatctgggattattctgtcaccaaattatccagaggaatatgggaacaacatgaactgtgtctggttgattatctcggagccaggaagtcgaattcacctaatctttaatgattttgatgttgagcctcagtttgactttctcgcggtcaaggatgatggcatttctgacataactgtcctgggtactttttctggcaatgaagtgccttcccagctggccagcagtgggcatatagttcgcttggaatttcagtctgaccattccactactggcagagggttcaacatcacttacaccacatttggtcagaatgagtgccatgatcctggcattcctataaacggacgacgttttggtgacaggtttctactcgggagctcggtttctttccactgtgatgatggctttgtcaagacccagggatccgagtccattacctgcatactgcaagacgggaacgtggtctggagctccaccgtgccccgctgtgaagctccatgtggtggacatctgacagcgtccagcggagtcattttgcctcctggatggccaggatattataaggattctttacattgtgaatggataattgaagcaaaaccaggccactctatcaaaataacttttgacagatttcagacagaggtcaattatgacaccttggaggtcagagatgggccagccagttcgtccccactgatcggcgagtaccacggcacccaggcaccccagttcctcatcagcaccgggaacttcatgtacctgctgttcaccactgacaacagccgctccagcatcggcttcctcatccactatgagagtgtgacgcttgagtcggattcctgcctggacccgggcatccctgtgaacggccatcgccacggtggagactttggcatcaggtccacagtgactttcagctgtgacccggggtacacactaagtgacgacgagcccctcgtctgtgagaggaaccaccagtggaaccacgccttgcccagctgcgacgctctatgtggaggctacatccaagggaagagtggaacagtcctttctcctgggtttccagatttttatccaaactctctaaactgcacgtggaccattgaagtgtctcatgggaaaggagttcaaatgatctttcacacctttcatcttgagagttcccacgactatttactgatcacagaggatggaagtttttccgagcccgttgccaggctcaccgggtcggtgttgcctcatacgatcaaggcaggcctgtttggaaacttcactgcccagcttcggtttatatcagacttctcaatttcgtacgagggcttcaatatcacattttcagaatatgacctggagccatgtgatgatcctggagtccctgccttcagccgaagaattggttttcactttggtgtgggagactctctgacgttttcctgcttcctgggatatcgtttagaaggtgccaccaagcttacctgcctgggtgggggccgccgtgtgtggagtgcacctctgccaaggtgtgtggccgaatgtggagcaagtgtcaaaggaaatgaaggaacattactgtctccaaattttccatccaattatgataataaccatgagtgtatctataaaatagaaacagaagccggcaagggcatccaccttagaacacgaagcttccagctgtttgaaggagatactctaaaggtatatgatggaaaagacagttcctcacgtccactgggcacgttcactaaaaatgaacttctggggctgatcctaaacagcacatccaatcacctgtggctagagttcaacaccaatggatctgacaccgaccaaggttttcaactcacctataccagttttgatctggtaaaatgtgaggatccgggcatccctaactacggctataggatccgtgatgaaggccactttaccgacactgtagttctgtacagttgcaacccggggtacgccatgcatggcagcaacaccctgacctgtttgagtggagacaggagagtgtgggacaaaccactaccttcgtgcatagcggaatgtggtggtcagatccatgcagccacatcaggacgaatattgtcccctggctatccagctccgtatgacaacaacctccactgcacctggattatagaggcagacccaggaaagaccattagcctccatttcattgttttcgacacggagatggctcacgacatcctcaaggtctgggacgggccggtggacagtgacatcctgctgaaggagtggagtggctccgcccttccggaggacatccacagcaccttcaactcactcaccctgcagttcgacagcgacttcttcatcagcaagtctggcttctccatccagttctccacctcaattgcagccacctgtaacgatccaggtatgccccaaaatggcacccgctatggagacagcagagaggctggagacaccgtcacattccagtgtgaccctggctatcagctccaaggacaagccaaaatcacctgtgtgcagctgaataaccggttcttttggcaaccagaccctcctacatgcatagctgcttgtggagggaatctgacgggcccagcaggtgttattttgtcacccaactacccacagccgtatcctcctgggaaggaatgtgactggagagtaaaagtgaacccggactttgtcatcgccttgatattcaaaagtttcaacatggagcccagctatgacttcctacacatctatgaaggggaagattccaacagccccctcattgggagttaccagggctctcaggccccagaaagaatagagagtagcggaaacagcctgtttctggcatttcggagtgatgcctccgtgggcctttcagggttcgccattgaatttaaagagaaaccacgggaagcttgttttgacccaggaaatataatgaatgggacaagagttggaacagacttcaagcttggctccaccatcacctaccagtgtgactctggctataagattcttgacccctcatccatcacctgtgtgattggggctgatgggaaaccctcctgggaccaagtgctgccctcctgcaatgctccctgtggaggccagtacacgggatcagaaggggtagttttatcaccaaactacccccataattacacagctggtcaaatatgcctctattccatcacggtaccaaaggaattcgtggtctttggacagtttgcctatttccagacagccctgaatgatttggcagaattatttgatggaacccatgcacaggccagacttctcagctcactctcggggtctcactcaggggaaacattgcccttggctacgtcaaatcaaattctgctccgattcagtgcaaagagcggtgcctctgcccgcggcttccacttcgtgtatcaagctgttcctcgtaccagtgacacccaatgcagctctgtccccgagcccagatacggaaggagaattggttctgagttttctgccggctccatcgtccgattcgagtgcaacccgggatacctgcttcagggttccacggcgctccactgccagtccgtgcccaacgccttggcacagtggaacgacacgatccccagctgtgtggtaccctgcagtggcaatttcactcaacgaagaggtacaatcctgtcccccggctaccctgagccatacggaaacaacttgaactgtatatggaagatcatagttacggagggctcgggaattcagatccaagtgatcagttttgccacggagcagaactgggactcccttgagatccacgatggtggggatgtgaccgcacccagactgggaagcttctcaggcaccacagtaccggcactgctgaacagtacttccaaccaactctacctgcatttccagtctgacattagtgtggcagctgctggtttccacctggaatacaaaactgtaggtcttgctgcatgccaagaaccagccctccccagcaacagcatcaaaatcggagatcggtacatggtgaacgacgtgctctccttccagtgcgagcccgggtacaccctgcagggccgttcccacatttcctgtatgccagggaccgttcgccgttggaactatccgtctcccctgtgcattgcaacctgtggagggacgctgagcaccttgggtggtgtgatcctgagccccggcttcccaggttcttaccccaacaacttagactgcacctggaggatctcattacccatcggctatggtgcacatattcagtttctgaatttttctaccgaagctaatcatgacttccttgaaattcaaaatggaccttaccacaccagccccatgattggacaatttagcggcacggatctccccgcggccctgctgagcacaacgcatgaaaccctcatccacttttatagtgaccattcgcaaaaccggcaaggatttaaacttgcttaccaagcctatgaattacagaactgtccagatccacccccatttcagaatgggtacatgatcaactcggattacagcgtggggcaatcagtatctttcgagtgttatcctgggtacattctaataggccatcctgtcctcacttgtcagcatgggatcaacagaaactggaactacccttttccaagatgtgatgccccttgtgggtacaacgtaacttctcagaacggcaccatctactcccctggctttcctgatgagtatccgatcctgaaggactgcatttggctcatcacggtgcctccagggcacggagtttacatcaacttcaccctgttacagacggaagctgtcaacgattacattgctgtttgggacggtcccgatcagaactcaccccagctgggagttttcagtggcaacacagccctcgaaacggcgtatagctccaccaaccaagtcctgctcaagttccacagcgacttttcaaatggaggcttctttgtcctcaatttccacgcatttcagctcaagaaatgtcaacctcccccagcggttccacaggcagaaatgcttactgaggatgatgatttcgaaataggagattttgtgaagtaccagtgccaccccgggtacaccttggtggggaccgacattctgacttgcaagctcagttcccagttgcagtttgagggttctctcccaacatgtgaagcacaatgcccagcaaatgaagtccggactggatcatcgggagtcattctcagtccagggtatccgggtaattattttaactcccagacttgctcttggagtattaaagtggaaccaaactacaacattaccatctttgtggacacatttcaaagtgaaaagcagtttgatgcactggaagtgtttgatggttcttctgggcaaagtcctctgctagtagtcttaagtgggaatcatactgaacaatcaaattttacaagcaggagtaatcagttatatctccgctggtccactgaccatgccaccagtaagaaaggattcaagattcgctatgcagcaccttactgcagtttgacccaccccctgaagaatgggggtattctaaacaggactgcaggagcggttggaagcaaagtgcattatttttgcaagcctggataccgaatggtcggccacagcaatgcaacctgtagacgaaacccacttggcatgtaccagtgggactccctcacgccactctgccaggctgtgtcctgtggaatcccagaatccccaggaaacggttcatttaccgggaacgagttcactttggacagtaaagtggtctatgaatgtcatgagggcttcaagcttgaatccagccagcaagcaacagccgtgtgtcaagaagatgggttgtggagtaacaaggggaagccgcccacgtgtaagccggtcgcttgccccagcattgaagctcagctctcagaacatgtcatctggaggctggtttcaggatccttgaatgagtacggtgctcaagtattgctgagctgcagtcctggttactacttagaaggctggaggctcctgcggtgccaggccaatgggacgtggaacataggagatgagaggccaagctgtcgagttatctcgtgtggaagcctttcctttcccccaaatggcaacaagattggaacgttgacagtttatggggccacagctatatttacgtgcaacaccggctacacgcttgtggggtctcatgtcagagagtgcttggcaaatgggctctggagcggcagcgaaactcgatgtctggctggccactgcggttccccagacccgattgtgaacggtcacattagtggagatggcttcagttacagagacacggtggtttaccagtgcaatcctggtttccggcttgtgggaacttccgtgaggatatgcctgcaagaccacaagtggtctggacaaacgcctgtctgtgtccccatcacatgtggtcaccctggaaaccctgcccacggattcactaatggcagtgagttcaacctgaatgatgtcgtgaatttcacctgcaacacgggctatttgctgcagggcgtgtctcgagcccagtgtcggagcaacggccagtggagtagccctctgcccacgtgtcgagtggtgaactgttctgatccaggctttgtggaaaatgccattcgtcacgggcaacagaacttccctgagagttttgagtatggaatgagtatcctgtaccattgcaagaagggattttacttgctgggatcttcagccttgacctgtatggcaaatggcttatgggaccgatccctgcccaagtgtttggctatatcgtgtggacacccaggggtccctgccaacgccgtcctcactggagagctgtttacctatggcgccgtcgtgcactactcctgcagagggagcgagagcctcataggcaacgacacgagagtgtgccaggaagacagtcactggagcggggcactgccccactgcacaggaaataatcctggattctgtggtgatccggggaccccagcacatgggtctcggcttggtgatgactttaagacaaagagtcttctccgcttctcctgtgaaatggggcaccagctgaggggctcccctgaacgcacgtgtttgctcaatgggtcatggtcaggactgcagccggtgtgtgaggccgtgtcctgtggcaaccctggcacacccaccaacggaatgattgtcagtagtgatggcattctgttctccagctcggtcatctatgcctgctgggaaggctacaagacctcagggctcatgacacggcattgcacagccaatgggacctggacaggcactgctcccgactgcacaattataagttgtggggatccaggcacactagcaaatggcatccagtttgggaccgacttcaccttcaacaagactgtgagctatcagtgtaacccaggctatgtcatggaagcagtcacatccgccactattcgctgtaccaaagacggcaggtggaatccgagcaaacctgtctgcaaagccgtgctgtgtcctcagccgccgccggtgcagaatggaacagtggagggaagtgatttccgctggggctccagcataagttacagctgcatggacggttaccagctctctcactccgccatcctctcctgtgaaggtcgcggggtgtggaaaggagagatcccccagtgtctccctgtgttctgcggagaccctggcatccccgcagaagggcgacttagtgggaaaagtttcacctataagtccgaagtcttcttccagtgcaaatctccatttatactcgtgggatcctccagaagagtctgccaagctgacggcacgtggagcggcatacaacccacctgcattgatcctgctcataacacctgcccagaccctggtacgccacactttggaatacagaatagctccagaggctatgaggttggaagcacggtttttttcaggtgcagaaaaggctaccatattcaaggttccacgactcgcacctgccttgccaatttaacatggagtgggatacagaccgaatgtatacctcatgcctgcagacagccagaaaccccggcacacgcggatgtgagagccatcgatcttcctactttcggctacaccttagtgtacacctgccatccaggctttttcctcgcagggggatctgagcacagaacatgtaaagcagacatgaaatggacaggaaagtcgcctgtgtgtaaaagtaaaggagtgagagaagttaatgaaacagttactaaaactccagttccttcagatgtctttttcgtcaattcactgtggaaggggtattatgaatatttagggaaaagacaacccgccactctaactgttgactggttcaatgcaacaagcagtaaggtgaatgccaccttcagcgaagcctcgccagtggagctgaagttgacaggcatttacaagaaggaggaggcccacttactcctgaaagcttttcaaattaaaggccaggcagatatttttgtaagcaagttcgaaaatgacaactggggactagatggttatgtgtcatctggacttgaaagaggaggatttacttttcaaggtgacattcatggaaaagactttggaaaatttaagctagaaaggcaagatcctttaaacccagatcaagactcttccagtcattaccacggcaccagcagtggctctgtggcggctgccattctggttcctttctttgctctaattttatcagggtttgcattttacctctacaaacacagaacgagaccaaaagttcaatacaatggctatgctgggcatgaaaacagcaatggacaagcatcgtttgaaaaccccatgtatgatacaaacttaaaacccacagaagccaaggctgtgaggtttgacacaactctgaacacagtctgtacagtggtatagccctcagtgccccaacaggactgattcatagccatacctctgatggacaagcagtgattcctttggtgccatataccactctcccttccactctggctttactgcagcgatcttcaaccttgtctactggcataagtgcagcggggatctctactcaaatgtgtcagggtcttctacggatcaaactacacatgcgttttcattccaaaagtgggttctaaatgcctggctgcatctgtatgaaatcaaggcacactccaggaagactgccacgtcgcgccaacacgtcatactcaatgcctcagactttcatatttctgtgttgctgagatgcctttcaatgcaatcgtctgggctcgtggatatgtccctcaggtgcggtgacagaatggtggcaccacgatatgtgttctcttgtgttgtttttcctttttaaacccccatgaacacgaatactctgaaaaaaataaaaagctttctggaagaagacacctttctgatagaggctcacacctacaaatgcttcactctgtccttccgagacctgacaagctttgaggacctcacagctcccctgtgtgttcatctctagggatgtttgcaatttcccagtcagctgttctgtcgcagaatgtttaatgcacaattttttgcactagtgtgttatgaatgactaagattctgataaaaaaaataaattatttacacagggtttatacacactatccattgtatataagcattatttcatattatcaagctaaacattcccccatcagcttagttggagtgttagggaaaagtattcctagatatggcacagattttaaaaggaaatacagtattgaagagatttattttattattgcttcaattagctccatttacgtgttgaattcattgaagaggtccaatgagaaaaaaacagaagcctccttatttcacacgttttcctcctttagtaccatcctcatccaattactgtctctctgatactacttaatagcagggggtttgcagaaatttctgtttgccatgtaaaactgtgaatagtaatttattttagatagtcgatgaacttgtgggttttagctcacaatgcagccttcccttttgcagtgttttttttttgtttttttttttttttgtcttttactgtgccatcgatctttgatattgcattgaaagacaatataccacagtagcaccttgaactcagtgaaaattgttcaggatcaaaataccaagtgttcttttagagggaaggaaaaagtacacacactctcctctcacaatgatatattttatacattcatttgttatttgtttcatgctttatgattccagatggaaaggtaatttcagtgacttttcaagtttaaattccattataggtaaatgataagttatgatgcaaataaaatctataagatccccagggcaaataaaaatcaaaacatgaagtagaagatgtggccgtgaggtagtttatgtaacaaattcaaagtgaaaatcatgtttacttttacttatacttatttgataaaaatatttttgaaacgatagtacttattttattatttgatatttcagttcctattcaattgtggcagattttctctgtttcacattttagattggcgttggtaatagaaatgtcagaatgttcaaattggccttcacgttgtcggagtgaacacattgacacctagctttaagactgatttatctgttggtgtactgaaggtttccatgtaggacttcaaatgtggaaaaggaaaagcagtcaggaaaatggggcattctttggagagtcacgcgttttgattcggacatttccgtagagctcggctcccagtgttgtgttcctcggtcgaaagggtctctgctgtttggggactcactggcctctcctagggactcctttgtcttgtgaaccccacgctgttggattctgtatcattatgctgaattctctgcacagttttccctggccaacctgcccacatccttggagatttgctttgccagtgggaatccttacattgctgtttcacagtagacgggacgaggtcagcgggagtcgtgctcctaacacacacattgaacgaaacagaagatgattgaaagtgtgaggaggctcgtgtgcaagggagaacagggttactatacatattagtgtatatatatacatacatatatatatatatatattgtacatatctaagtttgagtcattcaaactaggtgcaaaatgctgacttcagagtctgaattaacatctctgttcccatatccctgacctgctccctggtcaacgatgctatgaaatcctgaaatgacaggacatacatacatacaagaaaccacatatcaaattagatatgattttcctttgtgtgcaaagtcaaactgtcctagggttgccagtttgaagcatgttatttaaatgaaaaaaaaaatcagtgaaattctcgtgtgagaattctgcctagtttcttcctaaggttgtgtgcagtgttgaacggcgtctccgcaaggtgttggaggatctcattttagggcagtcaggagctgtgcttgctgagttaggtctagaagactcttccctgaaggcaacgggaacacgcgtgagggacgcgaccacacactaacagaggacacgtgcttcagagctgtttaaaactgctgcttgttttacacacacatcttgccttttttcaggctagctgcaataatttttttcttctgtaaaatattttgtaaacaacaacaaaaagctattataaaaagggggtaaaaaaaagaacgctggcattatgatcaggaaaacccattgtcatcgccgaccctccctcccgtcccaccacacgctgctgtcacgacgtaggtgcgaaagacctttttgtacagagatatattttttatgaagaatttgtaaaattattaaatatgctgtaattttttgattaatgtaggtacattgttaaaaaataaatgtttttacaatacagaactgtaattttcccaataatgtaaaatgtaccatctctagctgattttcagttccaatcctattacacatgtattaatattaaagtggcctgttaaaatgaacagtatcttttttttgtcaaaaaaattataaagagggtgtaatatagcctgtgcaatgccaccaatctttaaagcaaatcagagttctaattaaatatttaattttagatttct

SEQ ID NO: 4976 - DNA, 12134 bp, Homo sapiens; identical to SEQ ID NO: 4958
  source 1..12134: mol_type = unassigned DNA; mol_type = unassigned DNA

SEQ ID NO: 4977 - DNA, 10938 bp, Homo sapiens; identical to SEQ ID NO: 4959
  source 1..10938: mol_type = unassigned DNA; mol_type = unassigned DNA

SEQ ID NO: 4978 - DNA, 10938 bp, Homo sapiens; identical to SEQ ID NO: 4959
  source 1..10938: mol_type = unassigned DNA; mol_type = unassigned DNA

SEQ ID NO: 4979 - DNA, 11737 bp, Homo sapiens; identical to SEQ ID NO: 4961
  source 1..11737: mol_type = unassigned DNA; mol_type = unassigned DNA

SEQ ID NO: 4980 - DNA, 11740 bp, Homo sapiens; identical to SEQ ID NO: 4962
  source 1..11740: mol_type = unassigned DNA; mol_type = unassigned DNA

SEQ ID NO: 4981 - DNA, 11740 bp, Homo sapiens; identical to SEQ ID NO: 4962
  source 1..11740: mol_type = unassigned DNA; mol_type = unassigned DNA

SEQ ID NO: 4982 - DNA, 590 bp, Homo sapiens; identical to SEQ ID NO: 4964
  source 1..590: mol_type = unassigned DNA; mol_type = unassigned DNA

SEQ ID NO: 4983 - DNA, 764 bp, Homo sapiens; identical to SEQ ID NO: 4965
  source 1..764: mol_type = unassigned DNA

SEQ ID NO: 4984 - DNA, 527 bp, Homo sapiens; identical to SEQ ID NO: 4966
  source 1..527: mol_type = unassigned DNA

SEQ ID NO: 4985 - DNA, 3989 bp, Homo sapiens; identical to SEQ ID NO: 4967
  source 1..3989: mol_type = unassigned DNA

SEQ ID NO: 4986 - DNA, 3714 bp, Homo sapiens; identical to SEQ ID NO: 4968
  source 1..3714: mol_type = unassigned DNA

SEQ ID NO: 4987 - DNA, 532 bp, Homo sapiens; identical to SEQ ID NO: 4969
  source 1..532: mol_type = unassigned DNA

SEQ ID NO: 4988 - DNA, 1003 bp, Homo sapiens; identical to SEQ ID NO: 4970
  source 1..1003: mol_type = unassigned DNA

SEQ ID NO: 4989 - DNA, 181 bp, Homo sapiens; identical to SEQ ID NO: 4971
  source 1..181: mol_type = unassigned DNA

SEQ ID NO: 4990 - DNA, 312 bp, Homo sapiens; identical to SEQ ID NO: 4972
  source 1..312: mol_type = unassigned DNA

SEQ ID NO: 4991 - DNA, 126 bp, Homo sapiens; identical to SEQ ID NO: 4973
  source 1..126: mol_type = unassigned DNA

SEQ ID NO: 4992 - DNA, 334 bp, Homo sapiens; identical to SEQ ID NO: 4974
  source 1..334: mol_type = unassigned DNA

SEQ ID NO: 4993 - DNA, 13512 bp, Homo sapiens; identical to SEQ ID NO: 4975
  source 1..13512: mol_type = unassigned DNA

SEQ ID NO: 4994 - DNA, 13108 bp, Homo sapiens
  source 1..13108: mol_type = unassigned DNA
tcctgggatggggtaggaggctattgtgaatgaggctcataagcatcgcccccggccctagatggcaagttcaaagccaccacccaagatcagctggccagaactgcacgttccaactgcacggtcccaatgggacagttgagagcccagggttcccatatggctaccccaattacgccaactgcacgtggaccatcaccgcggaagagcagcacagaatccagcttgtgttccagtcctttgccctggaagaggactttgatgtcctgtcggtgtttgatggtccaccccagccagagaatctgcgtacgaggctcacaggctttcagctgccagccaccattgttagtgcagccaccaccctctctctgcgcctcatcagcgactatgcagtcagtgcccaaggcttccacgccacctatgaagttctccccagccacacatgtgggaacccagggaggctgcccaatggcatccagcagggttcaaccttcaacctcggtgacaaggtccgctacagctgcaaccttggcttcttcctggagggccacgccgtgctcacctgccacgctggctctgagaacagcgccacgtgggacttccccctgccttcctgcagagctgatgatgcctgtggtgggaccctgcggggccagagtggcatcatctccagcccccacttcccctcggagtaccataacaatgccgactgcacatggaccatcctggctgagctgggggacaccatcgccctggtgtttattgacttccagctggaggatggttacgactttctggaagtcactgggacagaaggctcctccctctggttcaccggagccagcctcccagcccccgttatcagcagcaagaactggctgcgactgcacttcacatcggatggcaaccaccggcagcgcggattcagtgcccaataccaagtcaagaagcaaattgagttgaagtctcgaggtgtgaagctgatgcccagcaaagacaacagccagaagacgtctgtgttaactcaggttggtgtgtcccaaggacataatatgtgtccagaccctggcatacccgaaaggggcaaaagactaggctcggatttcaggttaggatccagcgtccagttcacctgcaacgagggctatgacctgcaagggtccaagcggatcacctgtatgaaagtgagcgacatgtttgcggcctggagcgaccacaggccagtctgccgagcccgcatgtgtgatgcccaccttcgaggcccctcgggcatcatcacctcccccaatttccccattcagtatgacaacaatgcacactgtgtgtggatcatcacagcactcaacccctccaaggtgatcaagctcgcctttgaggagtttgatttggagaggggctatgacaccctgacggtcggtgatggtggtcaggatggggaccagaagacagttctctacatcctgacaggtacatcggtcccggatctcattgtcagcaccaatcatcaaatgtggctcctcttccagactgatggcagtggcagttccctgggattcaaggcttcttatgaagagatcgagcagggcagttgcggtgaccctggcatacctgcatatggccggagggaaggctcccggtttcaccacggtgacacactcaagtttgagtgccagcccgcctttgagctggtgggacagaaggcaatcacatgccaaaagaataaccaatggtcggctaagaagccaggctgcgtgttctcctgcttcttcaacttcaccagcccgtctggggttgtcctgtctcccaactacccagaggactatggcaaccacctccactgtgtctggctcatcctggccaggcctgagagccgcatccacctggccttcaacgacattgacgtggagcctcagtttgatttcctggtcatcaaggatggggccaccgccgaggcgcccgtcctgggcaccttctcaggaaaccagcttccctcctccatcacaagcagtggccacgtggcccgtctcgagttccagactgaccactccacagggaagaggggcttcaacatcacttttaccaccttccgacacaacgagtgcccggatcctggcgttccagtaaatggcaaacggtttggggacagcctccagctgggcagctccatctccttcctctgtgatgaaggcttccttgggactcagggctcagagaccatcacctgcgtcctgaaggagggcagcgtggtctggaacagcgctgtgctgcggtgtgaagctccctgtggtggtcacctgacttcgcccagcggcaccatcctctctccgggctggcctggcttctacaaggatgccttgagctgtgcctgggtgattgaggcccagccaggctaccccatcaaaatcaccttcgacagattcaaaaccgaggtcaactatgacaccctggaagtacgcgatgggcggacttactcagcgcccttgatcggggtttaccacgggacccaggttccccagttcctcatcagcaccagcaactacctctacctcctcttctctaccgacaagagtcactcggacatcggcttccagctccgctatgagactataacactgcagtcagaccactgtctggatccaggaatcccagtaaatggacagcgtcatgggaatgacttctacgtgggcgcgctggtgaccttcagctgtgactcgggctacacattaagtgacggggagcctctggagtgtgagcccaacttccagtggagccgggccctgcccagttgtgaagctctctgtggtggcttcattcaaggctccagtgggaccatcttgtcgccagggttccctgacttctaccccaacaacttgaactgcacctggattatcgaaacatctcatggcaagggtgtgttcttcactttccacaccttccacctggaaagtggccatgactacctcctcatcactgagaacggcagcttcacccagcccctgaggcagctaactggatctcggctgccagctcccatcagcgctgggctctatggcaacttcactgcccaggtccgcttcatctctgatttctccatgtcatatgaaggattcaacatcaccttctcagagtacgacttggagccctgtgaggagcccgaggtcccagcctacagcatccggaagggcttgcagtttggcgtgggcgacaccttgaccttctcctgcttccccgggtaccgtctggagggcaccgcccgcatcacgtgcctggggggcagacggcgcctgtggagctcgcctctgccaaggtgtgttgctgagtgtgggaattcagtcacaggcactcagggtactttgctgtcccccaactttcctgtgaactacaataacaatcatgaatgcatctactccatccagacccagccagggaagggaattcagctgaaagccagggcattcgaactctccgaaggagatgtcctcaaggtttatgatggcaacaacaactccgcccgtttgctgggagtttttagccattctgagatgatgggggtgactttgaacagcacatccagcagtctgtggcttgatttcatcactgatgctgaaaacaccagcaagggctttgaactgcacttttccagctttgaactcatcaaatgtgaggacccaggaacccccaagtttggctacaaggttcatgatgaaggtcattttgcagggagctccgtgtccttcagctgtgaccctggatacagcctgcggggtagtgaggagctgctgtgtctgagtggagagcgccggacctgggaccggcctctgcccacctgtgtcgccgagtgtggagggacagtgagaggagaggtgtcggggcaggtgctgtcacccgggtatccagctccctatgaacacaatctcaactgcatctggaccatcgaagcagaggccggctgcaccattgggctacacttcctggtgtttgacacagaggaggttcacgacgtgctgcgcatctgggatgggcctgtggagagcggggttctgctgaaggagctgagtggcccggccctgcccaaggacctgcatagcaccttcaactcggtcgtcctgcagttcagcactgacttcttcaccagcaagcagggctttgccattcaattttcagtgtccacagcaacgtcctgcaatgaccctgggatcccgcagaatgggagtcggagtggtgacagttgggaagccggcgactccacagtgttccagtgtgaccctggctacgcgctgcagggaagtgcagagatcagctgtgtgaagatcgagaacaggttcttctggcagcccagcccgccaacatgcatcgctccctgcgggggagacctgacaggaccatctggagtcatcctctcaccaaattacccagaaccctacccgccaggcaaggagtgtgactggaaagtgaccgtctcaccagactacgtcatcgccctggtatttaacatctttaacctggagcctggctatgacttcctccatatctacgacggacgggactctctcagccctctcataggaagcttctatggctcccagctcccaggccgcattgaaagcagcagcaacagcctcttcctcgccttccgcagcgatgcatctgtgagcaatgctggcttcgtcattgactatacagaaaacccgcgggagtcatgttttgatcctggttccatcaagaacggcacacgggtggggtccgacctgaagctgggctcctccgtcacctactactgccacgggggctacgaagttgagggcacctcgaccctgagctgcatcctggggcctgatgggaagcccgtgtggaacaatccccggccagtctgcacagccccctgtgggggacagtatgtgggttcggacggagtggtcttgtcccccaactacccccagaactacaccagtggacagatctgcttgtattttgttactgtgcccaaggactatgtggtgtttggccagttcgccttctttcacacggccctcaacgacgtggtggaggttcacgacggccacagccagcactcgcggctcctcagctccctctcgggctcccatacaggagaatcactgcccttggccacctccaatcaagttctcattaagttcagcgccaaaggcctcgcaccagccagaggcttccactttgtctaccaagcggttcctcgaaccagcgccacgcagtgcagctctgtgccggaaccccgctatggcaagaggctgggcagtgacttctcggtgggggccatcgtccgcttcgaatgcaactccggctatgccctgcaggggtcgccagagatcgagtgcctccctgtgcctggggccttggcccaatggaatgtctcagcgcccacgtgtgtggtgccgtgtggaggcaacctcacagagcgcaggggcaccatcctgtcccctggcttcccagagccgtacctcaacagcctcaactgtgtgtggaagatcgtggtccccgaaggcgctggcatccagatccaagttgtcagttttgtgacagagcagaactgggactcgctggaagtatttgatggtgcagataacactgtaaccatgctggggagtttctcaggaacaaccgtgcctgcccttctgaacagcacctccaaccagctctaccttcatttctactcagatatcagcgtatctgcagctggcttccacttggagtacaaaacggtgggcctgagcagttgtccggaacctgctgtgcccagtaacggggtgaagactggcgagcgctacttggtgaatgatgtggtgtctttccagtgtgagccgggatatgccctccagggccacgcccacatctcctgcatgcccggaacagtgcggcgatggaactaccctcctccactctgtattgcacagtgtgggggaacagtggaggagatggagggggtgatcctgagccccggcttcccaggcaactaccccagtaacatggactgctcctggaaaatagcactgcccgtgggctttggagctcacatccagttcctgaacttctccaccgagcccaaccacgactacatagaaatccggaatggcccctatgagaccagccgcatgatgggaagattcagtggaagcgagcttccaagctccctcctctccacgtcccacgagaccaccgtgtatttccacagcgaccactcccagaatcggccaggattcaagctggagtatcaggatttgacttactcccaccagatttcttccttcctgagaggttttgatctctcggagttggaaagaaccaactcaactcctcccgtcgccgcttcctatgtctgggatcttgatcctggttgtgaagcctatgaacttcaagagtgcccagacccagagccctttgccaatggcattgtgaggggagctggctacaacgtgggacaatcagtgaccttcgagtgcctcccggggtatcaattgactggccaccctgtcctcacgtgtcaacatggcaccaaccggaactgggaccaccccctgcccaagtgtgaagtcccttgtggcgggaacatcacttcttccaacggcactgtgtactccccggggttccctagcccgtactccagctcccaggactgtgtctggctgatcaccgtgcccattggccatggcgtccgcctcaacctcagcctgctgcagacagagccctctggagatttcatcaccatctgggatgggccacagcaaacagcaccacggctcggcgtcttcacccggagcatggccaagaaaacagtgcagagttcatccaaccaggtcctgctcaagttccaccgtgatgcagccacaggggggatcttcgccatagctttctccgcttatccactcaccaaatgccctcctcccaccatcctccccaacgccgaagtcgtcacagagaatgaagaattcaatataggtgacatcgtacgctacagatgcctccctggctttaccttagtggggaatgaaattctgacctgcaaacttggaacctacctgcagtttgaaggaccacccccgatatgtgaagtgcactgtccaacaaatgagcttctgacagactccacaggcgtgatcctgagccagagctaccctggaagctatccccagttccagacctgctcttggctggtgagagtggagcccgactataacatctccctcacagtggagtacttcctcagcgagaagcaatatgatgagtttgagatttttgatggtccatcaggacagagtcctctgctgaaagccctcagtgggaattactcagctcccctgattgtcaccagctcaagcaactctgtgtacctgcgttggtcatctgatcacgcctacaatcggaagggcttcaagatccgctattcagccccttactgcagcctgcccagggctccactccatggcttcatcctaggccagaccagcacccagcccgggggctccatccactttggctgcaacgccggctaccgcctggtgggacacagcatggccatctgtacccggcacccccagggctaccacctgtggagcgaagccatccctctctgtcaagctctttcctgtgggcttcctgaggcccccaagaatggaatggtgtttggcaaggagtacacagtgggaaccaaggccatgtacagctgcagtgaaggctaccacctccaggcaggcgctgaggccactgcagagtgtctggacacaggcctatggagcaaccgcaatgtcccaccacagtgtgtccctgtgacttgtcctgatgtcagtagcatcagcgtggagcatggccgatggaggcttatctttgagacacagtatcagttccaggcccagctgatgctcatctgtgaccctggctactactatactggccaaagggtcatccgctgtcaggccaatggcaaatggagcctcggggactctacgcccacctgccgaatcatctcctgtggagagctcccgattccccccaatggccaccgcatcggaacactgtctgtctacggggcaacagccatcttctcctgcaattccggatacacactggtgggctccagggtgcgtgagtgcatggccaatgggctctggagtggctctgaagtccgctgccttgctggacactgtgggactcctgagcccattgtcaacggacacatcaatggggagaactacagctaccggggcagtgtggtgtaccaatgcaatgctggcttccgcctgatcggcatgtctgtgcgcatctgccagcaggatcatcactggtcgggcaagacccctttctgtgtgctggtgtcctgtggccatccgggctccccgcctcactcccagatgtctggagacagttatactgtgggagcagtggtgcggtacagctgcatcggcaagcgtactctggtgggaaacagcacccgcatgtgtgggctggatggacactggactggctccctccctcactgctcaggaaccagcgtgggagtttgcggtgaccctgggatcccggctcatggcatccgtttgggggacagctttgatccaggcactgtgatgcgcttcagctgtgaagctggccacgtgctccggggatcgtcagagcgcacctgtcaagccaatggctcgtggagcggctcgcagcctgagtgtggagtgatctcttgtgggaaccctgggactccaagtaatgcccgagttgtgttcagtgatggcctggttttctccagctctatcgtctatgagtgccgggaaggatactacgccacaggcctgctcagccgtcactgctcggtcaatggtacctggacaggcagtgaccctgagtgcctcgtcataaactgtggtgaccctgggattccagccaatggccttcggctgggcaatgacttcaggtacaacaaaactgtgacatatcagtgtgtccctggctatatgatggagtcacatagagtatctgtgctgagctgcaccaaggaccggacatggaatggaaccaagcccgtctgcaaagctctcatgtgcaagccacctccgctcatccccaatgggaaggtggtggggtctgacttcatgtggggctcaagtgtgacttatgcctgcctggaggggtaccagctctccctgcccgcggtgttcacctgtgagggaaatgggtcctggaccggagagctgcctcagtgtttccctgtgttctgcggggatcctggtgtcccgtcccgtgggaggagagaggaccgaggcttctcctacaggtcatctgtctccttctcctgccatccccctctggtgctggtgggctctccacgcaggttttgccagtcagatgggacatggagtggcacccagcccagctgcatagatccgaccctgaccacgtgtgcggaccctggtgtgccacagtttgggatacagaacaattctcagggctaccaggttggaagcacagtcctcttccgttgtcaaaaaggctacctgcttcagggctccaccaccaggacctgcctcccaaacctgacctggagtggaaccccacctgactgtgtcccccaccactgcaggcagccagagacgccaacgcatgccaacgtcggggccctggatttgccctccatgggctacacgctcatctactcctgccaggagggcttctccctcaagggtggctccgagcaccgcacctgcaaggcggatggcagctggacaggcaagccgcccatctgcctggaggtccggcccagtgggagacccatcaacactgcccgggagccaccgctcacccaagccttgattcctggggatgtttttgccaagaattccctgtggaaaggggcctatgaataccaggggaagaagcagccagccatgctcagagtgactggcttccaagttgccaacagcaaggtcaatgccaccatgatcgaccacagtggcgtggagctgcacttggctggaacttacaagaaagaagattttcatctcctactccaggtgtaccagattacagggcctgtggagatctttatgaataagttcaaagatgatcactgggctttagatggccatgtctcgtcagagtcctccggagccaccttcatctaccaaggctctgtcaagggccaaggctttgggcagttcggctttcaaagactggacctcaggctgctggagtcagaccccgagtccattggccgccactttgcttccaacagcagctcagtggcagccgcgatcctggtgcctttcatcgccctcattattgcgggcttcgtgctctatctctacaagcacaggagaagacccaaagttcctttcaatggctatgctggccacgagaacaccaatgttcgggccacatttgagaacccaatgtacgaccgcaacatccagcccacagacatcatggccagcgaggcggagttcacagtcagcacagtgtgcacagcagtatagccacccggcctggccgccaccaccgccaccgagagccccgcctccagcagccgttccccagggggcaggaagtaggctcccctgagcacagtgcccagtgcccatcttcgttcgtctccttgcctgtgtctgctactgctgggactcaggccctcgccctgccgccatctatgccagttaccctggagaggactcctgccgtgtcctgaaaaggcagaaaaggaagaggggctgcagacagaggaagaaagtttatggatttaaaatagcaaagcaacttgtggatctgtgtgtgtgtgtgtgtgtatgggcctgatcacacacaaacacacacacctctccttcattcacgtcctatggaagagaccataaaggcttcaaaactagaagtgcgcatgaaggatgcttcatgccctgttccccacacagagaagagatgaagagggggaggtacggtcagctttcaaaacaatatgccccccgcccatcccatgtgtgaggacatggtgactcggtgactgtaacagtaggacacatcccatcatgcggtcagagtgcagaaacccggtcagcgtgcagaaaccagctgtctgctgatgaacggcccatctgcacagcggcagcaaggattaccccaagggcaggaaaaaagtctttggaaatagattgaaaatcagtttctttatttttttcaaacactgttttattgagttctaaacccagtggattaaaaagtcatttgggtcctgggaagcactgggaaagaagggagagccggggaggatagggcaggagtctggccaggagcccaaggtcaagtctggctgtcaactgacaaagagaagagaagacaagtctgtggcccagacaggatgccaagtctgggggcagcagcagggtccttgagagaacaggggagcaagcctgccccagtacccaaaaaacaatggctatcatgtactggggttattctctgtgcctgacactttacctgtagtatttctagtctgcacaataacaccaaaatgtaggatttgttattcccctttgacagatgagaaaacagaagcctgcaaaggtaaagacagagttaggaagtgtggagtcagaatgcaaacccagatcagtctgccccaaagtccactacaccagctgccagaaaccctgttctagaaggggcagctaagaagggaggagccgatgaatctctacagtagcactgtggccaggtctggaaagccaggcaagacacctgtgtgtcctatctgggttctgctgtctccgcgtaggcagcttcggggcaaggattcaactccccaggcctcccacggttggtgctggctccttggctcccagcagccgctgaccatagccagcaaaagacctggcaggtcctgaatcaaaacaacagagtggctgaaagtcacacctctccagctccttgcgagtgggtttgattgattttgacagctatatcatgcttgggtcgttcatgaattccatgagaattgttgggaagttcatgagtttaggaatcaaagtatagcatttagggccactttctctgtcctcgggaaggcccccacaagcttaagcccctgtatacgtgtgacatgctggcctcagagattcatgtcacatattgaaatagcaaatagaaatgtgcaggagcggagggacagcgacacctggttcttaagcaaattctagattggaacaattagaagatctgactgatgttaagagtggccagaggaaagtgagaggcgtccatttccagcagacacaatggaggctgacagaggcaggagcctacccctggccacaccacctctgggacacggcacccccctgggcctggagggagagggccaatccagacacactcacactctcatctctttccttggctggaaacaagtgcaggaagctcccctcccaatttcttatgctcccttcccccttacactcctctccttcgactgctcccttcccccttcttatgcccctctcagaccacccagcggatgcctattcccgccccccacccctcccctgcgtctccttgtaaagttccatgagatgctcgaggagcacctgctggtggggcacccagcactctgctgggcatcaccctccgcacccctgacatttctctccacctccagaggcttggaagggaacagggcagatgaggcccttcacccaccatctacgccatatacccatcaccatcccatgaggaaaaaaaaaaaagtaaaacaaagacaaaaaaaatcttttgtacagagatatatttttattatacaaagtttgtacagtaccaaaaaagaaaaaaaaaaaggtgtaaatttttttttcattattgtaggtaaacggtagtggaagccttttttgtaaatgtaataaaatgtataaatatggttttcagaaaacatcaagtgctgtaaatatgtaatctacacaccttcttggcttgtctgcagtatatacatttaatttatctgtctctgtatatgaggcttccccctggggtcctgcattatggtactttcctgaatttgaaagcaattttaaattttttgaattcaaataaaatataaatttttgcattg

SEQ ID NO: 4995 - DNA, 749 bp, Homo sapiens
  source 1..749: mol_type = unassigned DNA
cacctccaggcaggcgctgaggccactgcagagtgtctggacacaggcctatggagcaaccgcaatgtcccaccacagtgtgtccctgtgacttgtcctgatgtcagtagcatcagcgtggagcatggccgatggaggcttatctttgagacacagtatcagttccaggcccagctgatgctcatctgtgaccctggctactactatactggccaaagggtcatccgctgtcaggccaatggcaaatggagcctcggggactctacgcccacctgccgaatcatctcctgtggagagctcccgattccccccaatggccaccgcatcggaacactgtctgtctacggggcaacagccatcttctcctgcaattccggatacacactggtgggctccagggtgcgtgagtgcatggccaatgggctctggagtggctctgaagtccgctgccttgctggacactgtgggactcctgagcccattgtcaacggacacatcaatggggagaactacagctaccggggcagtgtggtgtaccaatgcaatgctggcttccgcctgatcggcatgtctgtgcgcatctgccagcaggatcatcactggtcgggcaagacccctttctgtgtgccaattacctgtggacacccaggcaaccctgtcaacggcctcactcagggtaaccagtttaacctcaacgatgtggtcaagtttgtttgcaaccctgggtatatggctgagggggctgctag

SEQ ID NO: 4996 - DNA, 4379 bp, Homo sapiens
  source 1..4379: mol_type = unassigned DNA
gagagacagacaaacagcacaagagacagaaacaaagcaggcagcaccataggtagggaagtattttttttttaagtttgagaggcatttctgtagacagtccaacaactggacagacacgcaggcaccttggcaggtagacaggcaaacgacttgtcatctttgtcaggttcttcagagctgtgagttgctttctggatgcagctgatgggggttaatctatggttattgtgattctctttccagctgagtgtgggaattcagtcacaggcactcagggtactttgctgtcccccaactttcctgtgaactacaataacaatcatgaatgcatctactccatccagacccagccagggaagggaattcagctgaaagccagggcattcgaactctccgaaggagatgtcctcaaggtttatgatggcaacaacaactccgcccgtttgctgggagtttttagccattctgagatgatgggggtgactttgaacagcacatccagcagtctgtggcttgatttcatcactgatgctgaaaacaccagcaagggctttgaactgcacttttccagctttgaactcatcaaatgtgaggacccaggaacccccaagtttggctacaaggttcatgatgaaggtcattttgcagggagctccgtgtccttcagctgtgaccctggatacagcctgcggggtagtgaggagctgctgtgtctgagtggagagcgccggacctgggaccggcctctgcccacctgtgtcgccgagtgtggagggacagtgagaggagaggtgtcggggcaggtgctgtcacccgggtatccagctccctatgaacacaatctcaactgcatctggaccatcgaagcagaggccggctgcaccattgggctacacttcctggtgtttgacacagaggaggttcacgacgtgctgcgcatctgggatgggcctgtggagagcggggttctgctgaaggagctgagtggcccggccctgcccaaggacctgcatagcaccttcaactcggtcgtcctgcagttcagcactgacttcttcaccagcaagcagggctttgccattcaattttcagtgtccacagcaacgtcctgcaatgaccctgggatcccgcagaatgggagtcggagtggtgacagttgggaagccggcgactccacagtgttccagtgtgaccctggctacgcgctgcagggaagtgcagagatcagctgtgtgaagatcgagaacaggttcttctggcagcccagcccgccaacatgcatcgctccctgcgggggagacctgacaggaccatctggagtcatcctctcaccaaattacccagaaccctacccgccaggcaaggagtgtgactggaaagtgaccgtctcaccagactacgtcatcgccctggtatttaacatctttaacctggagcctggctatgacttcctccatatctacgacggacgggactctctcagccctctcataggaagcttctatggctcccagctcccaggccgcattgaaagcagcagcaacagcctcttcctcgccttccgcagcgatgcatctgtgagcaatgctggcttcgtcattgactatacagaaaacccgcgggagtcatgttttgatcctggttccatcaagaacggcacacgggtggggtccgacctgaagctgggctcctccgtcacctactactgccacgggggctacgaagttgagggcacctcgaccctgagctgcatcctggggcctgatgggaagcccgtgtggaacaatccccggccagtctgcacagccccctgtgggggacagtatgtgggttcggacggagtggtcttgtcccccaactacccccagaactacaccagtggacagatctgcttgtattttgttactgtgcccaaggactatgtggtgtttggccagttcgccttctttcacacggccctcaacgacgtggtggaggttcacgacggccacagccagcactcgcggctcctcagctccctctcgggctcccatacaggagaatcactgcccttggccacctccaatcaagttctcattaagttcagcgccaaaggcctcgcaccagccagaggcttccactttgtctaccaagcggttcctcgaaccagcgccacgcagtgcagctctgtgccggaaccccgctatggcaagaggctgggcagtgacttctcggtgggggccatcgtccgcttcgaatgcaactccggctatgccctgcaggggtcgccagagatcgagtgcctccctgtgcctggggccttggcccaatggaatgtctcagcgcccacgtgtgtggtgccgtgtggaggcaacctcacagagcgcaggggcaccatcctgtcccctggcttcccagagccgtacctcaacagcctcaactgtgtgtggaagatcgtggtccccgaaggcgctggcatccagatccaagttgtcagttttgtgacagagcagaactgggactcgctggaagtatttgatggtgcagataacactgtaaccatgctggggagtttctcaggaacaaccgtgcctgcccttctgaacagcacctccaaccagctctaccttcatttctactcagatatcagcgtatctgcagctggcttccacttggagtacaaaacggtgggcctgagcagttgtccggaacctgctgtgcccagtaacggggtgaagactggcgagcgctacttggtgaatgatgtggtgtctttccagtgtgagccgggatatgccctccagggccacgcccacatctcctgcatgcccggaacagtgcggcgatggaactaccctcctccactctgtattgcacagtgtgggggaacagtggaggagatggagggggtgatcctgagccccggcttcccaggcaactaccccagtaacatggactgctcctggaaaatagcactgcccgtgggctttggagctcacatccagttcctgaacttctccaccgagcccaaccacgactacatagaaatccggaatggcccctatgagaccagccgcatgatgggaagattcagtggaagcgagcttccaagctccctcctctccacgtcccacgagaccaccgtgtatttccacagcgaccactcccagaatcggccaggattcaagctggagtatcaggcctatgaacttcaagagtgcccagacccagagccctttgccaatggcattgtgaggggagctggctacaacgtgggacaatcagtgaccttcgagtgcctcccggggtatcaattgactggccaccctgtcctcacgtgtcaacatggcaccaaccggaactgggaccaccccctgcccaagtgtgaagtcccttgtggcgggaacatcacttcttccaacggcactgtgtactccccggggttccctagcccgtactccagctcccaggactgtgtctggctgatcaccgtgcccattggccatggcgtccgcctcaacctcagcctgctgcagacagagccctctggagatttcatcaccatctgggatgggccacagcaaacagcaccacggctcggcgtcttcacccggagcatggccaagaaaacagtgcagagttcatccaaccaggtcctgctcaagttccaccgtgatgcagccacaggggggatcttcgccatagctttctccgggcacttggcagctgtttgtacattgtgacacccctccacgcacacatctgccccccagccacagaagcttggaccagaggtggacacctgagctgactgcagcaggggcaatcagatgttctctcttgggaagttgaaataggacccaagagattctacttttgcctggacccatctcctgaaaagataaaaatccaagtgcaatggattgctgctcttctactttccatgtggaccaaaaagtagaacaatcctatgtgcagaaagagaatgattgagaagtggaaaaatttccttggtttctgatggcccttcagttcctcgtcctctacctttgtgaagtctggctgcaaacccacccttgggttctctcttctctgagaggcttttttgcttattctagcctgaattgatttatttacatccaaaggttcccaaggaatacaacaacctaggacccagcaatcctacttctgggaattatgcaaagatatgtgcatgaagatattgcttgatatgttataacagggaaattagaaataatctaaatgtaaaaatagtaagagattaggtattataaatttaaagtgtatactcagagagagagagatagggaaagatacagtcattacaaatcattcatgtatgaacctgggcaacatagtgagactctgcctctacc

SEQ ID NO: 4997 - DNA, 2431 bp, Homo sapiens
  source 1..2431: mol_type = unassigned DNA
ccagctcccaggactgtgtctggctgatcaccgtgcccattggccatggcgtccgcctcaacctcagcctgctgcagacagagccctctggagatttcatcaccatctgggatgggccacagcaaacagcaccacggctcggcgtcttcacccggagcatggccaagaaaacagtgcagagttcatccaaccaggtcctgctcaagttccaccgtgatgcagccacaggggggatcttcgccatagctttctccggtcagtatggaagcctggcctggtgggaagggccaggctttcaagtcaaggctgagcttgactcccgtctccaccatttgcggatcatgtgaccttgagtgagttgtataacctcttggagcctcagtgtcttcagagttatgagaattaaatgtattagcctatgtgagagctctcagtgcagggttctgtaaatgcaagttttcctcctattccacactgccagggcagagaggcacagaagcccaaaccttggtgccaagtccactcattcacatcaactcactggctggatcatccctatacctgtgccccagcttatcccttagcactttctagcgggttctccttctccaaagggatctagggcttctgctgacctctcaaggagcactgtgtttttgtgcacaaatgaagatattgtgattttgagtaggaagagtatgaacaattcagagtaggtatgcctttattggcagcctgttttcttctacaagtcccaagttagggatctggatatttcctcatttttattatagtggaattgcctagagaaacttatagaatgttctctgtggacttgtgcctatctatggaatgatgcacatatttgcaatttacagatcactgcagatattttaaccagaaatcaggaaagctggattttactcccagctccaccttgggccagctgtgtaaaaccttgcacaggtcccttccccacttgagacttcagtttcttcacctgtagaattaccggcttggagtttgtgacctgtaagaattctgtgaggtagtaaggcaaatattctaacccccactttacaaatgaagaaatagggcaaaggaaggctcaagtacttgcccaaaaccatgtggatagaactggaaacagaacccagcctccgcagtatctgctgcagtatctgctacagtatctgctctggtgtgactatacagtgttattacatcatgcgtgcacttgcagaaacacactaagactgtgaaagaggtagtgaaagaaacaggaagcaacagagagaaacaaggatgtaaagaacctaagcagctgtgactgccattcccaggagctatcgtccagggtgagtgcaatgtgggaatgagactccgccctctccatctgctcagttcccatgcccctctcattgggcacacctgtcgctccactaatgaaatccaggctttaaggctctgtcattttgacttgtgactttcccatagagtgataagagtatggacttcagagtcacagacgggttcaaaccttggctctgacacatgcaagctatgtaactttgtctgtcatttcacccttctgagcctcaatgttattatgcacaaaataggaatcatataagtacctaacctcctaaagttaaatgaaacaatgcttggaaatccttagctccaggcacagagtataaaaggtgatcaataaattatagttctaatagtcatcattgtcatgattatttttattatatctagatattgacaggcttggtgtaaagttaccttggtggtaggccaggtctcttgttcctgttcctgagccttcacctgtaccagaaccaggcaaaggaggctcagcacagccccaggccatccttatttccaagttcttctcagcaaggtctttcattgagagtgcttgcctaagggcacaatgctccttctgcctctcagatgagacacaaggcccttgctatggtgtaaatgcttaggcccccctagaattcatatgctgacatcctaacccccaaggtgatggtattaggaggtggggccttgggaggcaattaggtcagacaacagagccctcatgaatgggattagtgcctttataaaagagacccacagaatcaccacactgaagccttctcagtggaaagagctaagaagcacaggaaacacagaggccgaggtgggcggatcgcctgaggtgaggagttcaagaccagcctgaccaacatggagaaaccctgtctctactaaaaatacaaaattagatgggcgtggtggcgcatgcctgtaatcccagctactcaggaggctgaggcagaagaatcggttgaacctgggaggcggaggttgcagtgagccaagatcacgccattgcactccagcctgggcaacaagtgtgaaactccatctc

SEQ ID NO: 4998 - DNA, 3212 bp, Homo sapiens
  source 1..3212: mol_type = unassigned DNA
caggagaatcactgcccttggccacctccaatcaagttctcattaagttcagcgccaaaggcctcgcaccagccagaggcttccactttgtctaccaagcggttcctcgaaccagcgccacgcagtgcagctctgtgccggaaccccgctatggcaagaggctgggcagtgacttctcggtgggggccatcgtccgcttcgaatgcaactccggctatgccctgcaggggtcgccagagatcgagtgcctccctgtgcctggggccttggcccaatggaatgtctcagcgcccacgtgtgtggtgccgtgtggaggcaacctcacagagcgcaggggcaccatcctgtcccctggcttcccagagccgtacctcaacagcctcaactgtgtgtggaagatcgtggtccccgaaggcgctggcatccagatccaagttgtcagttttgtgacagagcagaactgggactcgctggaagtatttgatggtgcagataacactgtaaccatgctggggagtttctcaggaacaaccgtgcctgcccttctgaacagcacctccaaccagctctaccttcatttctactcagatatcagcgtatctgcagctggcttccacttggagtacaaaacggtgggcctgagcagttgtccggaacctgctgtgcccagtaacggggtgaagactggcgagcgctacttggtgaatgatgtggtgtctttccagtgtgagccgggatatgccctccagggccacgcccacatctcctgcatgcccggaacagtgcggcgatggaactaccctcctccactctgtattgcacagtgtgggggaacagtggaggagatggagggggtgatcctgagccccggcttcccaggcaactaccccagtaacatggactgctcctggaaaatagcactgcccgtgggctttggagctcacatccagttcctgaacttctccaccgagcccaaccacgactacatagaaatccggaatggcccctatgagaccagccgcatgatgggaagattcagtggaagcgagcttccaagctccctcctctccacgtcccacgagaccaccgtgtatttccacagcgaccactcccagaatcggccaggattcaagctggagtatcaggcctatgaacttcaagagtgcccagacccagagccctttgccaatggcattgtgaggggagctggctacaacgtgggacaatcagtgaccttcgagtgcctcccggggtatcaattgactggccaccctgtcctcacgtgtcaacatggcaccaaccggaactgggaccaccccctgcccaagtgtgaagtcccttgtggcgggaacatcacttcttccaacggcactgtgtactccccggggttccctagcccgtactccagctcccaggactgtgtctggctgatcaccgtgcccattggccatggcgtccgcctcaacctcagcctgctgcagacagagccctctggagatttcatcaccatctgggatgggccacagcaaacagcaccacggctcggcgtcttcacccggagcatggccaagaaaacagtgcagagttcatccaaccaggtcctgctcaagttccaccgtgatgcagccacaggggggatcttcgccatagctttctccgatcactgcagatattttaaccagaaatcaggaaagctggattttactcccagctccaccttgggccagctgtgtaaaaccttgcacaggtcccttccccacttgagacttcagtttcttcacctgtagaattaccggcttggagtttgtgacctgtaagaattctgtgaggtagtaaggcaaatattctaacccccactttacaaatgaagaaatagggcaaaggaaggctcaagtacttgcccaaaaccatgtggatagaactggaaacagaacccagcctccgcagtatctgctgcagtatctgctacagtatctgctctggtgtgactatacagtgttattacatcatgcgtgcacttgcagaaacacactaagactgtgaaagaggtagtgaaagaaacaggaagcaacagagagaaacaaggatgtaaagaacctaagcagctgtgactgccattcccaggagctatcgtccagggtgagtgcaatgtgggaatgagactccgccctctccatctgctcagttcccatgcccctctcattgggcacacctgtcgctccactaatgaaatccaggctttaaggctctgtcattttgacttgtgactttcccatagagtgataagagtatggacttcagagtcacagacgggttcaaaccttggctctgacacatgcaagctatgtaactttgtctgtcatttcacccttctgagcctcaatgttattatgcacaaaataggaatcatataagtacctaacctcctaaagttaaatgaaacaatgcttggaaatccttagctccaggcacagagtataaaaggtgatcaataaattatagttctaatagtcatcattgtcatgattatttttattatatctagatattgacaggcttggtgtaaagttaccttggtggtaggccaggtctcttgttcctgttcctgagccttcacctgtaccagaaccaggcaaaggaggctcagcacagccccaggccatccttatttccaagttcttctcagcaaggtctttcattgagagtgcttgcctaagggcacaatgctccttctgcctctcagatgagacacaaggcccttgctatggtgtaaatgcttaggcccccctagaattcatatgctgacatcctaacccccaaggtgatggtattaggaggtggggccttgggaggcaattaggtcagacaacagagccctcatgaatgggattagtgcctttataaaagagacccacagaatcaccacactgaagccttctcagtggaaagagctaagaagcacaggaaacacagaggccgaggtgggcggatcgcctgaggtgaggagttcaagaccagcctgaccaacatggagaaaccctgtctctactaaaaatacaaaattagatgggcgtggtggcgcatgcctgtaatcccagctactcaggaggctgaggcagaagaatcggttgaacctgggaggcggaggttgcagtgagccaagatcacgccattgcactccagcctgggcaacaagtgtgaaactccatctc

SEQ ID NO: 4999 - DNA, 1544 bp, Homo sapiens
  source 1..1544: mol_type = unassigned DNA
caactgatgaaaggaggaagaagaaagggacttggaacaagcaagaaaatgagcctaatggtggcccatgtgatcaaatttgcataaggacagaagacaagaccgaaggagctgatgggtagagaggagatattgctgtcaacagagtggaggtctcagtggggaaagatgaactctactggaggttcagaaaacaactgtgaaagaaatacttgaggcatgtttcaacagactgcaaatataccatctaattcttggaaacaagtacaagataaattgattctgaagctgagggctttgggcagcaaaatctgactttccggaagaggtgtaagatggtgctggtggagctttgtaaggattctctgcagggctagagttctgagtccacaggtcctctttgcaaagcccgcatgtgtgatgcccaccttcgaggcccctcgggcatcatcacctcccccaatttccccattcagtatgacaacaatgcacactgtgtgtggatcatcacagcactcaacccctccaaggcgggaggagacccagggaacatacaatgcaacaaggagggtctaagtgtggaaactcaaagtctaagactgaggaatagaagttgtcttctgggaaacagcaaggacaatggatgctgtgtgcctaaccctgttcatggaactggcctacaggtgatcaagctcgcctttgaggagtttgatttggagaggggctatgacaccctgacggtcggtgatggtggtcaggatggggaccagaagacagttctctacatcctgacaggtacatcggtcccggatctcattgtcagcaccaatcatcaaatgtggctcctcttccagactgatggcagtggcagttccctgggattcaaggcttcttatgaagagatcgagcagggcagttgcggtgaccctggcatacctgcatatggccggagggaaggctcccggtttcaccacggtgacacactcaagtttgagtgccagcccgcctttgagctggtgggacagaaggcaatcacatgccaaaagaataaccaatggtcggctaagaagccaggctgcgtgtgtaagtgagcagggaggaggccacgccagggtcttcactgagaggcaggggcccgtttcctagctaatccaggggccccgtccctgggaaccttgcaggttgtaacaacagctgcactctggttggtttattctactcctcggaacgttgctggtggggtccttatttctggcaggaatgtcgactgtagcactgagaacaagtgctcctgacatttggggatgctcttcaacaccgtcttacccttcttggtgatccttaagagcaaggagacaccactgggacaaagcccaccaggctcagacccagacatttcctgctcaccgtcattgccacccctgacaccatctaatccagcagggtggaagggactgtcaagtttgtaaggctgtagacaccaccagcctccagtaactgtgggaaactggccttgccaggatataaacagtttcctaaaattg

SEQ ID NO: 5000 - DNA, 355 bp, Homo sapiens
  source 1..355: mol_type = unassigned DNA
acgagggctatgacctgcaagggtccaagcggatcacctgtatgaaagtgagcgacatgtttgcggcctggagcgaccacaggccagtctgccgagatttaaacaactgcttttaaaaagttagtggagaagaagaaagctaagaagaaattcggtcagaaacgtaggagaaaagccaaaaagcgtcactgaagccaaagaatcccgcatgtgtgatgcccaccttcgaggcccctcgggcatcatcacctcccccaatttccccattcagtatgacaacaatgcacactgtgtgtggatcatcacagcactcaacccctccaaggtgatcaagctcgcctttgaggagtttgat

SEQ ID NO: 5001 - DNA, 13118 bp, Homo sapiens
  source 1..13118: mol_type = unassigned DNA
tcctgggatggggtaggaggctattgtgaatgaggctcataagcatcgcccccggccctagatggcaagttcaaagccaccacccaagatcagctggccagaactgcacgttccaactgcacggtcccaatgggacagttgagagcccagggttcccatatggctaccccaattacgccaactgcacgtggaccatcaccgcggaagagcagcacagaatccagcttgtgttccagtcctttgccctggaagaggactttgatgtcctgtcggtgtttgatggtccaccccagccagagaatctgcgtacgaggctcacaggctttcagctgccagccaccattgttagtgcagccaccaccctctctctgcgcctcatcagcgactatgcagtcagtgcccaaggcttccacgccacctatgaagttctccccagccacacatgtgggaacccagggaggctgcccaatggcatccagcagggttcaaccttcaacctcggtgacaaggtccgctacagctgcaaccttggcttcttcctggagggccacgccgtgctcacctgccacgctggctctgagaacagcgccacgtgggacttccccctgccttcctgcagagctgatgatgcctgtggtgggaccctgcggggccagagtggcatcatctccagcccccacttcccctcggagtaccataacaatgccgactgcacatggaccatcctggctgagctgggggacaccatcgccctggtgtttattgacttccagctggaggatggttacgactttctggaagtcactgggacagaaggctcctccctctggttcaccggagccagcctcccagcccccgttatcagcagcaagaactggctgcgactgcacttcacatcggatggcaaccaccggcagcgcggattcagtgcccaataccaagtcaagaagcaaattgagttgaagtctcgaggtgtgaagctgatgcccagcaaagacaacagccagaagacgtctgtgttaactcaggttggtgtgtcccaaggacataatatgtgtccagaccctggcatacccgaaaggggcaaaagactaggctcggatttcaggttaggatccagcgtccagttcacctgcaacgagggctatgacctgcaagggtccaagcggatcacctgtatgaaagtgagcgacatgtttgcggcctggagcgaccacaggccagtctgccgagcccgcatgtgtgatgcccaccttcgaggcccctcgggcatcatcacctcccccaatttccccattcagtatgacaacaatgcacactgtgtgtggatcatcacagcactcaacccctccaaggtgatcaagctcgcctttgaggagtttgatttggagaggggctatgacaccctgacggtcggtgatggtggtcaggatggggaccagaagacagttctctacatcctgacaggtacatcggtcccggatctcattgtcagcaccaatcatcaaatgtggctcctcttccagactgatggcagtggcagttccctgggattcaaggcttcttatgaagagatcgagcagggcagttgcggtgaccctggcatacctgcatatggccggagggaaggctcccggtttcaccacggtgacacactcaagtttgagtgccagcccgcctttgagctggtgggacagaaggcaatcacatgccaaaagaataaccaatggtcggctaagaagccaggctgcgtgttctcctgcttcttcaacttcaccagcccgtctggggttgtcctgtctcccaactacccagaggactatggcaaccacctccactgtgtctggctcatcctggccaggcctgagagccgcatccacctggccttcaacgacattgacgtggagcctcagtttgatttcctggtcatcaaggatggggccaccgccgaggcgcccgtcctgggcaccttctcaggaaaccagcttccctcctccatcacaagcagtggccacgtggcccgtctcgagttccagactgaccactccacagggaagaggggcttcaacatcacttttaccaccttccgacacaacgagtgcccggatcctggcgttccagtaaatggcaaacggtttggggacagcctccagctgggcagctccatctccttcctctgtgatgaaggcttccttgggactcagggctcagagaccatcacctgcgtcctgaaggagggcagcgtggtctggaacagcgctgtgctgcggtgtgaagctccctgtggtggtcacctgacttcgcccagcggcaccatcctctctccgggctggcctggcttctacaaggatgccttgagctgtgcctgggtgattgaggcccagccaggctaccccatcaaaatcaccttcgacagattcaaaaccgaggtcaactatgacaccctggaagtacgcgatgggcggacttactcagcgcccttgatcggggtttaccacgggacccaggttccccagttcctcatcagcaccagcaactacctctacctcctcttctctaccgacaagagtcactcggacatcggcttccagctccgctatgagactataacactgcagtcagaccactgtctggatccaggaatcccagtaaatggacagcgtcatgggaatgacttctacgtgggcgcgctggtgaccttcagctgtgactcgggctacacattaagtgacggggagcctctggagtgtgagcccaacttccagtggagccgggccctgcccagttgtgaagctctctgtggtggcttcattcaaggctccagtgggaccatcttgtcgccagggttccctgacttctaccccaacaacttgaactgcacctggattatcgaaacatctcatggcaagggtgtgttcttcactttccacaccttccacctggaaagtggccatgactacctcctcatcactgagaacggcagcttcacccagcccctgaggcagctaactggatctcggctgccagctcccatcagcgctgggctctatggcaacttcactgcccaggtccgcttcatctctgatttctccatgtcatatgaaggattcaacatcaccttctcagagtacgacttggagccctgtgaggagcccgaggtcccagcctacagcatccggaagggcttgcagtttggcgtgggcgacaccttgaccttctcctgcttccccgggtaccgtctggagggcaccgcccgcatcacgtgcctggggggcagacggcgcctgtggagctcgcctctgccaaggtgtgttgctgagtgtgggaattcagtcacaggcactcagggtactttgctgtcccccaactttcctgtgaactacaataacaatcatgaatgcatctactccatccagacccagccagggaagggaattcagctgaaagccagggcattcgaactctccgaaggagatgtcctcaaggtttatgatggcaacaacaactccgcccgtttgctgggagtttttagccattctgagatgatgggggtgactttgaacagcacatccagcagtctgtggcttgatttcatcactgatgctgaaaacaccagcaagggctttgaactgcacttttccagctttgaactcatcaaatgtgaggacccaggaacccccaagtttggctacaaggttcatgatgaaggtcattttgcagggagctccgtgtccttcagctgtgaccctggatacagcctgcggggtagtgaggagctgctgtgtctgagtggagagcgccggacctgggaccggcctctgcccacctgtgtcgccgagtgtggagggacagtgagaggagaggtgtcggggcaggtgctgtcacccgggtatccagctccctatgaacacaatctcaactgcatctggaccatcgaagcagaggccggctgcaccattgggctacacttcctggtgtttgacacagaggaggttcacgacgtgctgcgcatctgggatgggcctgtggagagcggggttctgctgaaggagctgagtggcccggccctgcccaaggacctgcatagcaccttcaactcggtcgtcctgcagttcagcactgacttcttcaccagcaagcagggctttgccattcaattttcagtgtccacagcaacgtcctgcaatgaccctgggatcccgcagaatgggagtcggagtggtgacagttgggaagccggcgactccacagtgttccagtgtgaccctggctacgcgctgcagggaagtgcagagatcagctgtgtgaagatcgagaacaggttcttctggcagcccagcccgccaacatgcatcgctccctgcgggggagacctgacaggaccatctggagtcatcctctcaccaaattacccagaaccctacccgccaggcaaggagtgtgactggaaagtgaccgtctcaccagactacgtcatcgccctggtatttaacatctttaacctggagcctggctatgacttcctccatatctacgacggacgggactctctcagccctctcataggaagcttctatggctcccagctcccaggccgcattgaaagcagcagcaacagcctcttcctcgccttccgcagcgatgcatctgtgagcaatgctggcttcgtcattgactatacagaaaacccgcgggagtcatgttttgatcctggttccatcaagaacggcacacgggtggggtccgacctgaagctgggctcctccgtcacctactactgccacgggggctacgaagttgagggcacctcgaccctgagctgcatcctggggcctgatgggaagcccgtgtggaacaatccccggccagtctgcacagccccctgtgggggacagtatgtgggttcggacggagtggtcttgtcccccaactacccccagaactacaccagtggacagatctgcttgtattttgttactgtgcccaaggactatgtggtgtttggccagttcgccttctttcacacggccctcaacgacgtggtggaggttcacgacggccacagccagcactcgcggctcctcagctccctctcgggctcccatacaggagaatcactgcccttggccacctccaatcaagttctcattaagttcagcgccaaaggcctcgcaccagccagaggcttccactttgtctaccaagcggttcctcgaaccagcgccacgcagtgcagctctgtgccggaaccccgctatggcaagaggctgggcagtgacttctcggtgggggccatcgtccgcttcgaatgcaactccggctatgccctgcaggggtcgccagagatcgagtgcctccctgtgcctggggccttggcccaatggaatgtctcagcgcccacgtgtgtggtgccgtgtggaggcaacctcacagagcgcaggggcaccatcctgtcccctggcttcccagagccgtacctcaacagcctcaactgtgtgtggaagatcgtggtccccgaaggcgctggcatccagatccaagttgtcagttttgtgacagagcagaactgggactcgctggaagtatttgatggtgcagataacactgtaaccatgctggggagtttctcaggaacaaccgtgcctgcccttctgaacagcacctccaaccagctctaccttcatttctactcagatatcagcgtatctgcagctggcttccacttggagtacaaaacggtgggcctgagcagttgtccggaacctgctgtgcccagtaacggggtgaagactggcgagcgctacttggtgaatgatgtggtgtctttccagtgtgagccgggatatgccctccagggccacgcccacatctcctgcatgcccggaacagtgcggcgatggaactaccctcctccactctgtattgcacagtgtgggggaacagtggaggagatggagggggtgatcctgagccccggcttcccaggcaactaccccagtaacatggactgctcctggaaaatagcactgcccgtgggctttggagctcacatccagttcctgaacttctccaccgagcccaaccacgactacatagaaatccggaatggcccctatgagaccagccgcatgatgggaagattcagtggaagcgagcttccaagctccctcctctccacgtcccacgagaccaccgtgtatttccacagcgaccactcccagaatcggccaggattcaagctggagtatcaggatttgacttactcccaccagatttcttccttcctgagaggttttgatctctcggagttggaaagaaccaactcaactcctcccgtcgccgcttcctatgtctgggatcttgatcctggttgtgaagcctatgaacttcaagagtgcccagacccagagccctttgccaatggcattgtgaggggagctggctacaacgtgggacaatcagtgaccttcgagtgcctcccggggtatcaattgactggccaccctgtcctcacgtgtcaacatggcaccaaccggaactgggaccaccccctgcccaagtgtgaagtcccttgtggcgggaacatcacttcttccaacggcactgtgtactccccggggttccctagcccgtactccagctcccaggactgtgtctggctgatcaccgtgcccattggccatggcgtccgcctcaacctcagcctgctgcagacagagccctctggagatttcatcaccatctgggatgggccacagcaaacagcaccacggctcggcgtcttcacccggagcatggccaagaaaacagtgcagagttcatccaaccaggtcctgctcaagttccaccgtgatgcagccacaggggggatcttcgccatagctttctccgcttatccactcaccaaatgccctcctcccaccatcctccccaacgccgaagtcgtcacagagaatgaagaattcaatataggtgacatcgtacgctacagatgcctccctggctttaccttagtggggaatgaaattctgacctgcaaacttggaacctacctgcagtttgaaggaccacccccgatatgtgaagtgcactgtccaacaaatgagcttctgacagactccacaggcgtgatcctgagccagagctaccctggaagctatccccagttccagacctgctcttggctggtgagagtggagcccgactataacatctccctcacagtggagtacttcctcagcgagaagcaatatgatgagtttgagatttttgatggtccatcaggacagagtcctctgctgaaagccctcagtgggaattactcagctcccctgattgtcaccagctcaagcaactctgtgtacctgcgttggtcatctgatcacgcctacaatcggaagggcttcaagatccgctattcagccccttactgcagcctgcccagggctccactccatggcttcatcctaggccagaccagcacccagcccgggggctccatccactttggctgcaacgccggctaccgcctggtgggacacagcatggccatctgtacccggcacccccagggctaccacctgtggagcgaagccatccctctctgtcaagctctttcctgtgggcttcctgaggcccccaagaatggaatggtgtttggcaaggagtacacagtgggaaccaaggccatgtacagctgcagtgaaggctaccacctccaggcaggcgctgaggccactgcagagtgtctggacacaggcctatggagcaaccgcaatgtcccaccacagtgtgtccctgtgacttgtcctgatgtcagtagcatcagcgtggagcatggccgatggaggcttatctttgagacacagtatcagttccaggcccagctgatgctcatctgtgaccctggctactactatactggccaaagggtcatccgctgtcaggccaatggcaaatggagcctcggggactctacgcccacctgccgaatcatctcctgtggagagctcccgattccccccaatggccaccgcatcggaacactgtctgtctacggggcaacagccatcttctcctgcaattccggatacacactggtgggctccagggtgcgtgagtgcatggccaatgggctctggagtggctctgaagtccgctgccttgctggacactgtgggactcctgagcccattgtcaacggacacatcaatggggagaactacagctaccggggcagtgtggtgtaccaatgcaatgctggcttccgcctgatcggcatgtctgtgcgcatctgccagcaggatcatcactggtcgggcaagacccctttctgtgtgctggtgtcctgtggccatccgggctccccgcctcactcccagatgtctggagacagttatactgtgggagcagtggtgcggtacagctgcatcggcaagcgtactctggtgggaaacagcacccgcatgtgtgggctggatggacactggactggctccctccctcactgctcaggaaccagcgtgggagtttgcggtgaccctgggatcccggctcatggcatccgtttgggggacagctttgatccaggcactgtgatgcgcttcagctgtgaagctggccacgtgctccggggatcgtcagagcgcacctgtcaagccaatggctcgtggagcggctcgcagcctgagtgtggagtgatctcttgtgggaaccctgggactccaagtaatgcccgagttgtgttcagtgatggcctggttttctccagctctatcgtctatgagtgccgggaaggatactacgccacaggcctgctcagccgtcactgctcggtcaatggtacctggacaggcagtgaccctgagtgcctcgtcataaactgtggtgaccctgggattccagccaatggccttcggctgggcaatgacttcaggtacaacaaaactgtgacatatcagtgtgtccctggctatatgatggagtcacatagagtatctgtgctgagctgcaccaaggaccggacatggaatggaaccaagcccgtctgcaaagctctcatgtgcaagccacctccgctcatccccaatgggaaggtggtggggtctgacttcatgtggggctcaagtgtgacttatgcctgcctggaggggtaccagctctccctgcccgcggtgttcacctgtgagggaaatgggtcctggaccggagagctgcctcagtgtttccctgtgttctgcggggatcctggtgtcccgtcccgtgggaggagagaggaccgaggcttctcctacaggtcatctgtctccttctcctgccatccccctctggtgctggtgggctctccacgcaggttttgccagtcagatgggacatggagtggcacccagcccagctgcatagatccgaccctgaccacgtgtgcggaccctggtgtgccacagtttgggatacagaacaattctcagggctaccaggttggaagcacagtcctcttccgttgtcaaaaaggctacctgcttcagggctccaccaccaggacctgcctcccaaacctgacctggagtggaaccccacctgactgtgtcccccaccactgcaggcagccagagacgccaacgcatgccaacgtcggggccctggatttgccctccatgggctacacgctcatctactcctgccaggagggcttctccctcaagggtggctccgagcaccgcacctgcaaggcggatggcagctggacaggcaagccgcccatctgcctggaggtccggcccagtgggagacccatcaacactgcccgggagccaccgctcacccaagccttgattcctggggatgtttttgccaagaattccctgtggaaaggggcctatgaataccaggggaagaagcagccagccatgctcagagtgactggcttccaagttgccaacagcaaggtcaatgccaccatgatcgaccacagtggcgtggagctgcacttggctggaacttacaagaaagaagattttcatctcctactccaggtgtaccagattacagggcctgtggagatctttatgaataagttcaaagatgatcactgggctttagatggccatgtctcgtcagagtcctccggagccaccttcatctaccaaggctctgtcaagggccaaggctttgggcagttcggctttcaaagactggacctcaggctgctggagtcagaccccgagtccattggccgccactttgcttccaacagcagctcagtggcagccgcgatcctggtgcctttcatcgccctcattattgcgggcttcgtgctctatctctacaagcacaggagaagacccaaagttcctttcaatggctatgctggccacgagaacaccaatgttcgggccacatttgagaacccaatgtacgaccgcaacatccagcccacagacatcatggccagcgaggcggagttcacagtcagcacagtgtgcacagcagtatagccacccggcctggccgccaccaccgccaccgagagccccgcctccagcagccgttccccagggggcaggaagtaggctcccctgagcacagtgcccagtgcccatcttcgttcgtctccttgcctgtgtctgctactgctgggactcaggccctcgccctgccgccatctatgccagttaccctggagaggactcctgccgtgtcctgaaaaggcagaaaaggaagaggggctgcagacagaggaagaaagtttatggatttaaaatagcaaagcaacttgtggatctgtgtgtgtgtgtgtgtgtatgggcctgatcacacacaaacacacacacctctccttcattcacgtcctatggaagagaccataaaggcttcaaaactagaagtgcgcatgaaggatgcttcatgccctgttccccacacagagaagagatgaagagggggaggtacggtcagctttcaaaacaatatgccccccgcccatcccatgtgtgaggacatggtgactcggtgactgtaacagtaggacacatcccatcatgcggtcagagtgcagaaacccggtcagcgtgcagaaaccagctgtctgctgatgaacggcccatctgcacagcggcagcaaggattaccccaagggcaggaaaaaagtctttggaaatagattgaaaatcagtttctttatttttttcaaacactgttttattgagttctaaacccagtggattaaaaagtcatttgggtcctgggaagcactgggaaagaagggagagccggggaggatagggcaggagtctggccaggagcccaaggtcaagtctggctgtcaactgacaaagagaagagaagacaagtctgtggcccagacaggatgccaagtctgggggcagcagcagggtccttgagagaacaggggagcaagcctgccccagtacccaaaaaacaatggctatcatgtactggggttattctctgtgcctgacactttacctgtagtatttctagtctgcacaataacaccaaaatgtaggatttgttattcccctttgacagatgagaaaacagaagcctgcaaaggtaaagacagagttaggaagtgtggagtcagaatgcaaacccagatcagtctgccccaaagtccactacaccagctgccagaaaccctgttctagaaggggcagctaagaagggaggagccgatgaatctctacagtagcactgtggccaggtctggaaagccaggcaagacacctgtgtgtcctatctgggttctgctgtctccgcgtaggcagcttcggggcaaggattcaactccccaggcctcccacggttggtgctggctccttggctcccagcagccgctgaccatagccagcaaaagacctggcaggtcctgaatcaaaacaacagagtggctgaaagtcacacctctccagctccttgcgagtgggtttgattgattttgacagctatatcatgcttgggtcgttcatgaattccatgagaattgttgggaagttcatgagtttaggaatcaaagtatagcatttagggccactttctctgtcctcgggaaggcccccacaagcttaagcccctgtatacgtgtgacatgctggcctcagagattcatgtcacatattgaaatagcaaatagaaatgtgcaggagcggagggacagcgacacctggttcttaagcaaattctagattggaacaattagaagatctgactgatgttaagagtggccagaggaaagtgagaggcgtccatttccagcagacacaatggaggctgacagaggcaggagcctacccctggccacaccacctctgggacacggcacccccctgggcctggagggagagggccaatccagacacactcacactctcatctctttccttggctggaaacaagtgcaggaagctcccctcccaatttcttatgctcccttcccccttacactcctctccttcgactgctcccttcccccttcttatgcccctctcagaccacccagcggatgcctattcccgccccccacccctcccctgcgtctccttgtaaagttccatgagatgctcgaggagcacctgctggtggggcacccagcactctgctgggcatcaccctccgcacccctgacatttctctccacctccagaggcttggaagggaacagggcagatgaggcccttcacccaccatctacgccatatacccatcaccatcccatgaggaaaaaaaaaaaagtaaaacaaagacaaaaaaaatcttttgtacagagatatatttttattatacaaagtttgtacagtaccaaaaaagaaaaaaaaaaaggtgtaaatttttttttcattattgtaggtaaacggtagtggaagccttttttgtaaatgtaataaaatgtataaatatggttttcagaaaacatcaagtgctgtaaatatgtaatctacacaccttcttggcttgtctgcagtatatacatttaatttatctgtctctgtatatgaggcttccccctggggtcctgcattatggtactttcctgaatttgaaagcaattttaaattttttgaattcaaataaaatataaatttttgcattggttttcttac

SEQ ID NO: 5002 - DNA, 13698 bp, Homo sapiens
  source 1..13698: mol_type = unassigned DNA
gagagcgcagcgcgcctctccccggccgggcggacacttggttcattccagccgcagaagctcagggctcccgcgtaccgggattttttccgagcagaaaaaagctccagagctctcctgacctcctttctcctcggcggcgagcggagcctctccctcggcgctgccggccgcgccatgccgcgctcgcggggacgggagctggggcgctgcggctgccccgcggggagggctcgcggcgaaaccgggatttcggcgcttgtgccgggcgccgggagccgctggggccgcccgccgccgccaacgccgccgcctctgctgctgttgctgggctgtgggttgctcagcgtctcggccgccgcgggccagaactgcacgttccaactgcacggtcccaatgggacagttgagagcccagggttcccatatggctaccccaattacgccaactgcacgtggaccatcaccgcggaagagcagcacagaatccagcttgtgttccagtcctttgccctggaagaggactttgatgtcctgtcggtgtttgatggtccaccccagccagagaatctgcgtacgaggctcacaggctttcagctgccagccaccattgttagtgcagccaccaccctctctctgcgcctcatcagcgactatgcagtcagtgcccaaggcttccacgccacctatgaagttctccccagccacacatgtgggaacccagggaggctgcccaatggcatccagcagggttcaaccttcaacctcggtgacaaggtccgctacagctgcaaccttggcttcttcctggagggccacgccgtgctcacctgccacgctggctctgagaacagcgccacgtgggacttccccctgccttcctgcagagctgatgatgcctgtggtgggaccctgcggggccagagtggcatcatctccagcccccacttcccctcggagtaccataacaatgccgactgcacatggaccatcctggctgagctgggggacaccatcgccctggtgtttattgacttccagctggaggatggttacgactttctggaagtcactgggacagaaggctcctccctctggttcaccggagccagcctcccagcccccgttatcagcagcaagaactggctgcgactgcacttcacatcggatggcaaccaccggcagcgcggattcagtgcccaataccaagtcaagaagcaaattgagttgaagtctcgaggtgtgaagctgatgcccagcaaagacaacagccagaagacgtctgtgttaactcaggttggtgtgtcccaaggacataatatgtgtccagaccctggcatacccgaaaggggcaaaagactaggctcggatttcaggttaggatccagcgtccagttcacctgcaacgagggctatgacctgcaagggtccaagcggatcacctgtatgaaagtgagcgacatgtttgcggcctggagcgaccacaggccagtctgccgagcccgcatgtgtgatgcccaccttcgaggcccctcgggcatcatcacctcccccaatttccccattcagtatgacaacaatgcacactgtgtgtggatcatcacagcactcaacccctccaaggtgatcaagctcgcctttgaggagtttgatttggagaggggctatgacaccctgacggtcggtgatggtggtcaggatggggaccagaagacagttctctacatcctgacaggtacatcggtcccggatctcattgtcagcaccaatcatcaaatgtggctcctcttccagactgatggcagtggcagttccctgggattcaaggcttcttatgaagagatcgagcagggcagttgcggtgaccctggcatacctgcatatggccggagggaaggctcccggtttcaccacggtgacacactcaagtttgagtgccagcccgcctttgagctggtgggacagaaggcaatcacatgccaaaagaataaccaatggtcggctaagaagccaggctgcgtgttctcctgcttcttcaacttcaccagcccgtctggggttgtcctgtctcccaactacccagaggactatggcaaccacctccactgtgtctggctcatcctggccaggcctgagagccgcatccacctggccttcaacgacattgacgtggagcctcagtttgatttcctggtcatcaaggatggggccaccgccgaggcgcccgtcctgggcaccttctcaggaaaccagcttccctcctccatcacaagcagtggccacgtggcccgtctcgagttccagactgaccactccacagggaagaggggcttcaacatcacttttaccaccttccgacacaacgagtgcccggatcctggcgttccagtaaatggcaaacggtttggggacagcctccagctgggcagctccatctccttcctctgtgatgaaggcttccttgggactcagggctcagagaccatcacctgcgtcctgaaggagggcagcgtggtctggaacagcgctgtgctgcggtgtgaagctccctgtggtggtcacctgacttcgcccagcggcaccatcctctctccgggctggcctggcttctacaaggatgccttgagctgtgcctgggtgattgaggcccagccaggctaccccatcaaaatcaccttcgacagattcaaaaccgaggtcaactatgacaccctggaagtacgcgatgggcggacttactcagcgcccttgatcggggtttaccacgggacccaggttccccagttcctcatcagcaccagcaactacctctacctcctcttctctaccgacaagagtcactcggacatcggcttccagctccgctatgagactataacactgcagtcagaccactgtctggatccaggaatcccagtaaatggacagcgtcatgggaatgacttctacgtgggcgcgctggtgaccttcagctgtgactcgggctacacattaagtgacggggagcctctggagtgtgagcccaacttccagtggagccgggccctgcccagttgtgaagctctctgtggtggcttcattcaaggctccagtgggaccatcttgtcgccagggttccctgacttctaccccaacaacttgaactgcacctggattatcgaaacatctcatggcaagggtgtgttcttcactttccacaccttccacctggaaagtggccatgactacctcctcatcactgagaacggcagcttcacccagcccctgaggcagctaactggatctcggctgccagctcccatcagcgctgggctctatggcaacttcactgcccaggtccgcttcatctctgatttctccatgtcatatgaaggattcaacatcaccttctcagagtacgacttggagccctgtgaggagcccgaggtcccagcctacagcatccggaagggcttgcagtttggcgtgggcgacaccttgaccttctcctgcttccccgggtaccgtctggagggcaccgcccgcatcacgtgcctggggggcagacggcgcctgtggagctcgcctctgccaaggtgtgttgctgagtgtgggaattcagtcacaggcactcagggtactttgctgtcccccaactttcctgtgaactacaataacaatcatgaatgcatctactccatccagacccagccagggaagggaattcagctgaaagccagggcattcgaactctccgaaggagatgtcctcaaggtttatgatggcaacaacaactccgcccgtttgctgggagtttttagccattctgagatgatgggggtgactttgaacagcacatccagcagtctgtggcttgatttcatcactgatgctgaaaacaccagcaagggctttgaactgcacttttccagctttgaactcatcaaatgtgaggacccaggaacccccaagtttggctacaaggttcatgatgaaggtcattttgcagggagctccgtgtccttcagctgtgaccctggatacagcctgcggggtagtgaggagctgctgtgtctgagtggagagcgccggacctgggaccggcctctgcccacctgtgtcgccgagtgtggagggacagtgagaggagaggtgtcggggcaggtgctgtcacccgggtatccagctccctatgaacacaatctcaactgcatctggaccatcgaagcagaggccggctgcaccattgggctacacttcctggtgtttgacacagaggaggttcacgacgtgctgcgcatctgggatgggcctgtggagagcggggttctgctgaaggagctgagtggcccggccctgcccaaggacctgcatagcaccttcaactcggtcgtcctgcagttcagcactgacttcttcaccagcaagcagggctttgccattcaattttcagtgtccacagcaacgtcctgcaatgaccctgggatcccgcagaatgggagtcggagtggtgacagttgggaagccggcgactccacagtgttccagtgtgaccctggctacgcgctgcagggaagtgcagagatcagctgtgtgaagatcgagaacaggttcttctggcagcccagcccgccaacatgcatcgctccctgcgggggagacctgacaggaccatctggagtcatcctctcaccaaattacccagaaccctacccgccaggcaaggagtgtgactggaaagtgaccgtctcaccagactacgtcatcgccctggtatttaacatctttaacctggagcctggctatgacttcctccatatctacgacggacgggactctctcagccctctcataggaagcttctatggctcccagctcccaggccgcattgaaagcagcagcaacagcctcttcctcgccttccgcagcgatgcatctgtgagcaatgctggcttcgtcattgactatacagaaaacccgcgggagtcatgttttgatcctggttccatcaagaacggcacacgggtggggtccgacctgaagctgggctcctccgtcacctactactgccacgggggctacgaagttgagggcacctcgaccctgagctgcatcctggggcctgatgggaagcccgtgtggaacaatccccggccagtctgcacagccccctgtgggggacagtatgtgggttcggacggagtggtcttgtcccccaactacccccagaactacaccagtggacagatctgcttgtattttgttactgtgcccaaggactatgtggtgtttggccagttcgccttctttcacacggccctcaacgacgtggtggaggttcacgacggccacagccagcactcgcggctcctcagctccctctcgggctcccatacaggagaatcactgcccttggccacctccaatcaagttctcattaagttcagcgccaaaggcctcgcaccagccagaggcttccactttgtctaccaagcggttcctcgaaccagcgccacgcagtgcagctctgtgccggaaccccgctatggcaagaggctgggcagtgacttctcggtgggggccatcgtccgcttcgaatgcaactccggctatgccctgcaggggtcgccagagatcgagtgcctccctgtgcctggggccttggcccaatggaatgtctcagcgcccacgtgtgtggtgccgtgtggaggcaacctcacagagcgcaggggcaccatcctgtcccctggcttcccagagccgtacctcaacagcctcaactgtgtgtggaagatcgtggtccccgaaggcgctggcatccagatccaagttgtcagttttgtgacagagcagaactgggactcgctggaagtatttgatggtgcagataacactgtaaccatgctggggagtttctcaggaacaaccgtgcctgcccttctgaacagcacctccaaccagctctaccttcatttctactcagatatcagcgtatctgcagctggcttccacttggagtacaaaacggtgggcctgagcagttgtccggaacctgctgtgcccagtaacggggtgaagactggcgagcgctacttggtgaatgatgtggtgtctttccagtgtgagccgggatatgccctccagggccacgcccacatctcctgcatgcccggaacagtgcggcgatggaactaccctcctccactctgtattgcacagtgtgggggaacagtggaggagatggagggggtgatcctgagccccggcttcccaggcaactaccccagtaacatggactgctcctggaaaatagcactgcccgtgggctttggagctcacatccagttcctgaacttctccaccgagcccaaccacgactacatagaaatccggaatggcccctatgagaccagccgcatgatgggaagattcagtggaagcgagcttccaagctccctcctctccacgtcccacgagaccaccgtgtatttccacagcgaccactcccagaatcggccaggattcaagctggagtatcaggcctatgaacttcaagagtgcccagacccagagccctttgccaatggcattgtgaggggagctggctacaacgtgggacaatcagtgaccttcgagtgcctcccggggtatcaattgactggccaccctgtcctcacgtgtcaacatggcaccaaccggaactgggaccaccccctgcccaagtgtgaagtcccttgtggcgggaacatcacttcttccaacggcactgtgtactccccggggttccctagcccgtactccagctcccaggactgtgtctggctgatcaccgtgcccattggccatggcgtccgcctcaacctcagcctgctgcagacagagccctctggagatttcatcaccatctgggatgggccacagcaaacagcaccacggctcggcgtcttcacccggagcatggccaagaaaacagtgcagagttcatccaaccaggtcctgctcaagttccaccgtgatgcagccacaggggggatcttcgccatagctttctccgcttatccactcaccaaatgccctcctcccaccatcctccccaacgccgaagtcgtcacagagaatgaagaattcaatataggtgacatcgtacgctacagatgcctccctggctttaccttagtggggaatgaaattctgacctgcaaacttggaacctacctgcagtttgaaggaccacccccgatatgtgaagtgcactgtccaacaaatgagcttctgacagactccacaggcgtgatcctgagccagagctaccctggaagctatccccagttccagacctgctcttggctggtgagagtggagcccgactataacatctccctcacagtggagtacttcctcagcgagaagcaatatgatgagtttgagatttttgatggtccatcaggacagagtcctctgctgaaagccctcagtgggaattactcagctcccctgattgtcaccagctcaagcaactctgtgtacctgcgttggtcatctgatcacgcctacaatcggaagggcttcaagatccgctattcagccccttactgcagcctgcccagggctccactccatggcttcatcctaggccagaccagcacccagcccgggggctccatccactttggctgcaacgccggctaccgcctggtgggacacagcatggccatctgtacccggcacccccagggctaccacctgtggagcgaagccatccctctctgtcaagctctttcctgtgggcttcctgaggcccccaagaatggaatggtgtttggcaaggagtacacagtgggaaccaaggccatgtacagctgcagtgaaggctaccacctccaggcaggcgctgaggccactgcagagtgtctggacacaggcctatggagcaaccgcaatgtcccaccacagtgtgtccctgtgacttgtcctgatgtcagtagcatcagcgtggagcatggccgatggaggcttatctttgagacacagtatcagttccaggcccagctgatgctcatctgtgaccctggctactactatactggccaaagggtcatccgctgtcaggccaatggcaaatggagcctcggggactctacgcccacctgccgaatcatctcctgtggagagctcccgattccccccaatggccaccgcatcggaacactgtctgtctacggggcaacagccatcttctcctgcaattccggatacacactggtgggctccagggtgcgtgagtgcatggccaatgggctctggagtggctctgaagtccgctgccttgccactcagaccaagctccactccattttctataagctcctcttcgatgtactctcttccccatccctcaccaaagctggacactgtgggactcctgagcccattgtcaacggacacatcaatggggagaactacagctaccggggcagtgtggtgtaccaatgcaatgctggcttccgcctgatcggcatgtctgtgcgcatctgccagcaggatcatcactggtcgggcaagacccctttctgtgtgccaattacctgtggacacccaggcaaccctgtcaacggcctcactcagggtaaccagtttaacctcaacgatgtggtcaagtttgtttgcaaccctgggtatatggctgagggggctgctaggtcccaatgcctggccagcgggcaatggagtgacatgctgcccacctgcagaatcatcaactgtacagatcctggacaccaagaaaatagtgttcgtcaggtccacgccagcggcccgcacaggttcagcttcggcaccactgtgtcttaccggtgcaaccacggcttctacctcctgggcaccccagtgctcagctgccagggagatggcacatgggaccgtccccgcccccagtgtctcttggtgtcctgtggccatccgggctccccgcctcactcccagatgtctggagacagttatactgtgggagcagtggtgcggtacagctgcatcggcaagcgtactctggtgggaaacagcacccgcatgtgtgggctggatggacactggactggctccctccctcactgctcaggaaccagcgtgggagtttgcggtgaccctgggatcccggctcatggcatccgtttgggggacagctttgatccaggcactgtgatgcgcttcagctgtgaagctggccacgtgctccggggatcgtcagagcgcacctgtcaagccaatggctcgtggagcggctcgcagcctgagtgtggagtgatctcttgtgggaaccctgggactccaagtaatgcccgagttgtgttcagtgatggcctggttttctccagctctatcgtctatgagtgccgggaaggatactacgccacaggcctgctcagccgtcactgctcggtcaatggtacctggacaggcagtgaccctgagtgcctcgtcataaactgtggtgaccctgggattccagccaatggccttcggctgggcaatgacttcaggtacaacaaaactgtgacatatcagtgtgtccctggctatatgatggagtcacatagagtatctgtgctgagctgcaccaaggaccggacatggaatggaaccaagcccgtctgcaaagctctcatgtgcaagccacctccgctcatccccaatgggaaggtggtggggtctgacttcatgtggggctcaagtgtgacttatgcctgcctggaggggtaccagctctccctgcccgcggtgttcacctgtgagggaaatgggtcctggaccggagagctgcctcagtgtttccctgtgttctgcggggatcctggtgtcccgtcccgtgggaggagagaggaccgaggcttctcctacaggtcatctgtctccttctcctgccatccccctctggtgctggtgggctctccacgcaggttttgccagtcagatgggacatggagtggcacccagcccagctgcatagatccgaccctgaccacgtgtgcggaccctggtgtgccacagtttgggatacagaacaattctcagggctaccaggttggaagcacagtcctcttccgttgtcaaaaaggctacctgcttcagggctccaccaccaggacctgcctcccaaacctgacctggagtggaaccccacctgactgtgtcccccaccactgcaggcagccagagacgccaacgcatgccaacgtcggggccctggatttgccctccatgggctacacgctcatctactcctgccaggagggcttctccctcaagggtggctccgagcaccgcacctgcaaggcggatggcagctggacaggcaagccgcccatctgcctggaggtccggcccagtgggagacccatcaacactgcccgggagccaccgctcacccaagccttgattcctggggatgtttttgccaagaattccctgtggaaaggggcctatgaataccaggggaagaagcagccagccatgctcagagtgactggcttccaagttgccaacagcaaggtcaatgccaccatgatcgaccacagtggcgtggagctgcacttggctggaacttacaagaaagaagattttcatctcctactccaggtgtaccagattacagggcctgtggagatctttatgaataagttcaaagatgatcactgggctttagatggccatgtctcgtcagagtcctccggagccaccttcatctaccaaggctctgtcaagggccaaggctttgggcagttcggctttcaaagactggacctcaggctgctggagtcagaccccgagtccattggccgccactttgcttccaacagcagctcagtggcagccgcgatcctggtgcctttcatcgccctcattattgcgggcttcgtgctctatctctacaagcacaggagaagacccaaagttcctttcaatggctatgctggccacgagaacaccaatgttcgggccacatttgagaacccaatgtacgaccgcaacatccagcccacagacatcatggccagcgaggcggagttcacagtcagcacagtgtgcacagcagtatagccacccggcctggccgccaccaccgccaccgagagccccgcctccagcagccgttccccagggggcaggaagtaggctcccctgagcacagtgcccagtgcccatcttcgttcgtctccttgcctgtgtctgctactgctgggactcaggccctcgccctgccgccatctatgccagttaccctggagaggactcctgccgtgtcctgaaaaggcagaaaaggaagaggggctgcagacagaggaagaaagtttatggatttaaaatagcaaagcaacttgtggatctgtgtgtgtgtgtgtgtgtatgggcctgatcacacacaaacacacacacctctccttcattcacgtcctatggaagagaccataaaggcttcaaaactagaagtgcgcatgaaggatgcttcatgccctgttccccacacagagaagagatgaagagggggaggtacggtcagctttcaaaacaatatgccccccgcccatcccatgtgtgaggacatggtgactcggtgactgtaacagtaggacacatcccatcatgcggtcagagtgcagaaacccggtcagcgtgcagaaaccagctgtctgctgatgaacggcccatctgcacagcggcagcaaggattaccccaagggcaggaaaaaagtctttggaaatagattgaaaatcagtttctttatttttttcaaacactgttttattgagttctaaacccagtggattaaaaagtcatttgggtcctgggaagcactgggaaagaagggagagccggggaggatagggcaggagtctggccaggagcccaaggtcaagtctggctgtcaactgacaaagagaagagaagacaagtctgtggcccagacaggatgccaagtctgggggcagcagcagggtccttgagagaacaggggagcaagcctgccccagtacccaaaaaacaatggctatcatgtactggggttattctctgtgcctgacactttacctgtagtatttctagtctgcacaataacaccaaaatgtaggatttgttattcccctttgacagatgagaaaacagaagcctgcaaaggtaaagacagagttaggaagtgtggagtcagaatgcaaacccagatcagtctgccccaaagtccactacaccagctgccagaaaccctgttctagaaggggcagctaagaagggaggagccgatgaatctctacagtagcactgtggccaggtctggaaagccaggcaagacacctgtgtgtcctatctgggttctgctgtctccgcgtaggcagcttcggggcaaggattcaactccccaggcctcccacggttggtgctggctccttggctcccagcagccgctgaccatagccagcaaaagacctggcaggtcctgaatcaaaacaacagagtggctgaaagtcacacctctccagctccttgcgagtgggtttgattgattttgacagctatatcatgcttgggtcgttcatgaattccatgagaattgttgggaagttcatgagtttaggaatcaaagtatagcatttagggccactttctctgtcctcgggaaggcccccacaagcttaagcccctgtatacgtgtgacatgctggcctcagagattcatgtcacatattgaaatagcaaatagaaatgtgcaggagcggagggacagcgacacctggttcttaagcaaattctagattggaacaattagaagatctgactgatgttaagagtggccagaggaaagtgagaggcgtccatttccagcagacacaatggaggctgacagaggcaggagcctacccctggccacaccacctctgggacacggcacccccctgggcctggagggagagggccaatccagacacactcacactctcatctctttccttggctggaaacaagtgcaggaagctcccctcccaatttcttatgctcccttcccccttacactcctctccttcgactgctcccttcccccttcttatgcccctctcagaccacccagcggatgcctattcccgccccccacccctcccctgcgtctccttgtaaagttccatgagatgctcgaggagcacctgctggtggggcacccagcactctgctgggcatcaccctccgcacccctgacatttctctccacctccagaggcttggaagggaacagggcagatgaggcccttcacccaccatctacgccatatacccatcaccatcccatgaggaaaaaaaaaaaagtaaaacaaagacaaaaaaaatcttttgtacagagatatatttttattatacaaagtttgtacagtaccaaaaaagaaaaaaaaaaaggtgtaaatttttttttcattattgtaggtaaacggtagtggaagccttttttgtaaatgtaataaaatgtataaatatggttttcagaaaacatcaagtgctgtaaatatgtaatctacacaccttcttggcttgtctgcagtatatacatttaatttatctgtctctgtatatgaggcttccccctggggtcctgcattatggtactttcctgaatttgaaagcaattttaaattttttgaattcaaataaaatataaatttttgcattggttttcttac

SEQ ID NO: 5003 - DNA, 13430 bp, Homo sapiens
  source 1..13430: mol_type = unassigned DNA
tcctgggatggggtaggaggctattgtgaatgaggctcataagcatcgcccccggccctagatggcaagttcaaagccaccacccaagatcagctggccagaactgcacgttccaactgcacggtcccaatgggacagttgagagcccagggttcccatatggctaccccaattacgccaactgcacgtggaccatcaccgcggaagagcagcacagaatccagcttgtgttccagtcctttgccctggaagaggactttgatgtcctgtcggtgtttgatggtccaccccagccagagaatctgcgtacgaggctcacaggctttcagctgccagccaccattgttagtgcagccaccaccctctctctgcgcctcatcagcgactatgcagtcagtgcccaaggcttccacgccacctatgaagttctccccagccacacatgtgggaacccagggaggctgcccaatggcatccagcagggttcaaccttcaacctcggtgacaaggtccgctacagctgcaaccttggcttcttcctggagggccacgccgtgctcacctgccacgctggctctgagaacagcgccacgtgggacttccccctgccttcctgcagagctgatgatgcctgtggtgggaccctgcggggccagagtggcatcatctccagcccccacttcccctcggagtaccataacaatgccgactgcacatggaccatcctggctgagctgggggacaccatcgccctggtgtttattgacttccagctggaggatggttacgactttctggaagtcactgggacagaaggctcctccctctggttcaccggagccagcctcccagcccccgttatcagcagcaagaactggctgcgactgcacttcacatcggatggcaaccaccggcagcgcggattcagtgcccaataccaagtcaagaagcaaattgagttgaagtctcgaggtgtgaagctgatgcccagcaaagacaacagccagaagacgtctgtgttaactcaggttggtgtgtcccaaggacataatatgtgtccagaccctggcatacccgaaaggggcaaaagactaggctcggatttcaggttaggatccagcgtccagttcacctgcaacgagggctatgacctgcaagggtccaagcggatcacctgtatgaaagtgagcgacatgtttgcggcctggagcgaccacaggccagtctgccgagcccgcatgtgtgatgcccaccttcgaggcccctcgggcatcatcacctcccccaatttccccattcagtatgacaacaatgcacactgtgtgtggatcatcacagcactcaacccctccaaggtgatcaagctcgcctttgaggagtttgatttggagaggggctatgacaccctgacggtcggtgatggtggtcaggatggggaccagaagacagttctctacatcctgacaggtacatcggtcccggatctcattgtcagcaccaatcatcaaatgtggctcctcttccagactgatggcagtggcagttccctgggattcaaggcttcttatgaagagatcgagcagggcagttgcggtgaccctggcatacctgcatatggccggagggaaggctcccggtttcaccacggtgacacactcaagtttgagtgccagcccgcctttgagctggtgggacagaaggcaatcacatgccaaaagaataaccaatggtcggctaagaagccaggctgcgtgttctcctgcttcttcaacttcaccagcccgtctggggttgtcctgtctcccaactacccagaggactatggcaaccacctccactgtgtctggctcatcctggccaggcctgagagccgcatccacctggccttcaacgacattgacgtggagcctcagtttgatttcctggtcatcaaggatggggccaccgccgaggcgcccgtcctgggcaccttctcaggaaaccagcttccctcctccatcacaagcagtggccacgtggcccgtctcgagttccagactgaccactccacagggaagaggggcttcaacatcacttttaccaccttccgacacaacgagtgcccggatcctggcgttccagtaaatggcaaacggtttggggacagcctccagctgggcagctccatctccttcctctgtgatgaaggcttccttgggactcagggctcagagaccatcacctgcgtcctgaaggagggcagcgtggtctggaacagcgctgtgctgcggtgtgaagctccctgtggtggtcacctgacttcgcccagcggcaccatcctctctccgggctggcctggcttctacaaggatgccttgagctgtgcctgggtgattgaggcccagccaggctaccccatcaaaatcaccttcgacagattcaaaaccgaggtcaactatgacaccctggaagtacgcgatgggcggacttactcagcgcccttgatcggggtttaccacgggacccaggttccccagttcctcatcagcaccagcaactacctctacctcctcttctctaccgacaagagtcactcggacatcggcttccagctccgctatgagactataacactgcagtcagaccactgtctggatccaggaatcccagtaaatggacagcgtcatgggaatgacttctacgtgggcgcgctggtgaccttcagctgtgactcgggctacacattaagtgacggggagcctctggagtgtgagcccaacttccagtggagccgggccctgcccagttgtgaagctctctgtggtggcttcattcaaggctccagtgggaccatcttgtcgccagggttccctgacttctaccccaacaacttgaactgcacctggattatcgaaacatctcatggcaagggtgtgttcttcactttccacaccttccacctggaaagtggccatgactacctcctcatcactgagaacggcagcttcacccagcccctgaggcagctaactggatctcggctgccagctcccatcagcgctgggctctatggcaacttcactgcccaggtccgcttcatctctgatttctccatgtcatatgaaggattcaacatcaccttctcagagtacgacttggagccctgtgaggagcccgaggtcccagcctacagcatccggaagggcttgcagtttggcgtgggcgacaccttgaccttctcctgcttccccgggtaccgtctggagggcaccgcccgcatcacgtgcctggggggcagacggcgcctgtggagctcgcctctgccaaggtgtgttgctgagtgtgggaattcagtcacaggcactcagggtactttgctgtcccccaactttcctgtgaactacaataacaatcatgaatgcatctactccatccagacccagccagggaagggaattcagctgaaagccagggcattcgaactctccgaaggagatgtcctcaaggtttatgatggcaacaacaactccgcccgtttgctgggagtttttagccattctgagatgatgggggtgactttgaacagcacatccagcagtctgtggcttgatttcatcactgatgctgaaaacaccagcaagggctttgaactgcacttttccagctttgaactcatcaaatgtgaggacccaggaacccccaagtttggctacaaggttcatgatgaaggtcattttgcagggagctccgtgtccttcagctgtgaccctggatacagcctgcggggtagtgaggagctgctgtgtctgagtggagagcgccggacctgggaccggcctctgcccacctgtgtcgccgagtgtggagggacagtgagaggagaggtgtcggggcaggtgctgtcacccgggtatccagctccctatgaacacaatctcaactgcatctggaccatcgaagcagaggccggctgcaccattgggctacacttcctggtgtttgacacagaggaggttcacgacgtgctgcgcatctgggatgggcctgtggagagcggggttctgctgaaggagctgagtggcccggccctgcccaaggacctgcatagcaccttcaactcggtcgtcctgcagttcagcactgacttcttcaccagcaagcagggctttgccattcaattttcagtgtccacagcaacgtcctgcaatgaccctgggatcccgcagaatgggagtcggagtggtgacagttgggaagccggcgactccacagtgttccagtgtgaccctggctacgcgctgcagggaagtgcagagatcagctgtgtgaagatcgagaacaggttcttctggcagcccagcccgccaacatgcatcgctccctgcgggggagacctgacaggaccatctggagtcatcctctcaccaaattacccagaaccctacccgccaggcaaggagtgtgactggaaagtgaccgtctcaccagactacgtcatcgccctggtatttaacatctttaacctggagcctggctatgacttcctccatatctacgacggacgggactctctcagccctctcataggaagcttctatggctcccagctcccaggccgcattgaaagcagcagcaacagcctcttcctcgccttccgcagcgatgcatctgtgagcaatgctggcttcgtcattgactatacagaaaacccgcgggagtcatgttttgatcctggttccatcaagaacggcacacgggtggggtccgacctgaagctgggctcctccgtcacctactactgccacgggggctacgaagttgagggcacctcgaccctgagctgcatcctggggcctgatgggaagcccgtgtggaacaatccccggccagtctgcacagccccctgtgggggacagtatgtgggttcggacggagtggtcttgtcccccaactacccccagaactacaccagtggacagatctgcttgtattttgttactgtgcccaaggactatgtggtgtttggccagttcgccttctttcacacggccctcaacgacgtggtggaggttcacgacggccacagccagcactcgcggctcctcagctccctctcgggctcccatacaggagaatcactgcccttggccacctccaatcaagttctcattaagttcagcgccaaaggcctcgcaccagccagaggcttccactttgtctaccaagcggttcctcgaaccagcgccacgcagtgcagctctgtgccggaaccccgctatggcaagaggctgggcagtgacttctcggtgggggccatcgtccgcttcgaatgcaactccggctatgccctgcaggggtcgccagagatcgagtgcctccctgtgcctggggccttggcccaatggaatgtctcagcgcccacgtgtgtggtgccgtgtggaggcaacctcacagagcgcaggggcaccatcctgtcccctggcttcccagagccgtacctcaacagcctcaactgtgtgtggaagatcgtggtccccgaaggcgctggcatccagatccaagttgtcagttttgtgacagagcagaactgggactcgctggaagtatttgatggtgcagataacactgtaaccatgctggggagtttctcaggaacaaccgtgcctgcccttctgaacagcacctccaaccagctctaccttcatttctactcagatatcagcgtatctgcagctggcttccacttggagtacaaaacggtgggcctgagcagttgtccggaacctgctgtgcccagtaacggggtgaagactggcgagcgctacttggtgaatgatgtggtgtctttccagtgtgagccgggatatgccctccagggccacgcccacatctcctgcatgcccggaacagtgcggcgatggaactaccctcctccactctgtattgcacagtgtgggggaacagtggaggagatggagggggtgatcctgagccccggcttcccaggcaactaccccagtaacatggactgctcctggaaaatagcactgcccgtgggctttggagctcacatccagttcctgaacttctccaccgagcccaaccacgactacatagaaatccggaatggcccctatgagaccagccgcatgatgggaagattcagtggaagcgagcttccaagctccctcctctccacgtcccacgagaccaccgtgtatttccacagcgaccactcccagaatcggccaggattcaagctggagtatcaggcctatgaacttcaagagtgcccagacccagagccctttgccaatggcattgtgaggggagctggctacaacgtgggacaatcagtgaccttcgagtgcctcccggggtatcaattgactggccaccctgtcctcacgtgtcaacatggcaccaaccggaactgggaccaccccctgcccaagtgtgaagtcccttgtggcgggaacatcacttcttccaacggcactgtgtactccccggggttccctagcccgtactccagctcccaggactgtgtctggctgatcaccgtgcccattggccatggcgtccgcctcaacctcagcctgctgcagacagagccctctggagatttcatcaccatctgggatgggccacagcaaacagcaccacggctcggcgtcttcacccggagcatggccaagaaaacagtgcagagttcatccaaccaggtcctgctcaagttccaccgtgatgcagccacaggggggatcttcgccatagctttctccgcttatccactcaccaaatgccctcctcccaccatcctccccaacgccgaagtcgtcacagagaatgaagaattcaatataggtgacatcgtacgctacagatgcctccctggctttaccttagtggggaatgaaattctgacctgcaaacttggaacctacctgcagtttgaaggaccacccccgatatgtgaagtgcactgtccaacaaatgagcttctgacagactccacaggcgtgatcctgagccagagctaccctggaagctatccccagttccagacctgctcttggctggtgagagtggagcccgactataacatctccctcacagtggagtacttcctcagcgagaagcaatatgatgagtttgagatttttgatggtccatcaggacagagtcctctgctgaaagccctcagtgggaattactcagctcccctgattgtcaccagctcaagcaactctgtgtacctgcgttggtcatctgatcacgcctacaatcggaagggcttcaagatccgctattcagccccttactgcagcctgcccagggctccactccatggcttcatcctaggccagaccagcacccagcccgggggctccatccactttggctgcaacgccggctaccgcctggtgggacacagcatggccatctgtacccggcacccccagggctaccacctgtggagcgaagccatccctctctgtcaagctctttcctgtgggcttcctgaggcccccaagaatggaatggtgtttggcaaggagtacacagtgggaaccaaggccatgtacagctgcagtgaaggctaccacctccaggcaggcgctgaggccactgcagagtgtctggacacaggcctatggagcaaccgcaatgtcccaccacagtgtgtccctgtgacttgtcctgatgtcagtagcatcagcgtggagcatggccgatggaggcttatctttgagacacagtatcagttccaggcccagctgatgctcatctgtgaccctggctactactatactggccaaagggtcatccgctgtcaggccaatggcaaatggagcctcggggactctacgcccacctgccgaatcatctcctgtggagagctcccgattccccccaatggccaccgcatcggaacactgtctgtctacggggcaacagccatcttctcctgcaattccggatacacactggtgggctccagggtgcgtgagtgcatggccaatgggctctggagtggctctgaagtccgctgccttgccactcagaccaagctccactccattttctataagctcctcttcgatgtactctcttccccatccctcaccaaagctggacactgtgggactcctgagcccattgtcaacggacacatcaatggggagaactacagctaccggggcagtgtggtgtaccaatgcaatgctggcttccgcctgatcggcatgtctgtgcgcatctgccagcaggatcatcactggtcgggcaagacccctttctgtgtgccaattacctgtggacacccaggcaaccctgtcaacggcctcactcagggtaaccagtttaacctcaacgatgtggtcaagtttgtttgcaaccctgggtatatggctgagggggctgctaggtcccaatgcctggccagcgggcaatggagtgacatgctgcccacctgcagaatcatcaactgtacagatcctggacaccaagaaaatagtgttcgtcaggtccacgccagcggcccgcacaggttcagcttcggcaccactgtgtcttaccggtgcaaccacggcttctacctcctgggcaccccagtgctcagctgccagggagatggcacatgggaccgtccccgcccccagtgtctcttggtgtcctgtggccatccgggctccccgcctcactcccagatgtctggagacagttatactgtgggagcagtggtgcggtacagctgcatcggcaagcgtactctggtgggaaacagcacccgcatgtgtgggctggatggacactggactggctccctccctcactgctcaggaaccagcgtgggagtttgcggtgaccctgggatcccggctcatggcatccgtttgggggacagctttgatccaggcactgtgatgcgcttcagctgtgaagctggccacgtgctccggggatcgtcagagcgcacctgtcaagccaatggctcgtggagcggctcgcagcctgagtgtggagtgatctcttgtgggaaccctgggactccaagtaatgcccgagttgtgttcagtgatggcctggttttctccagctctatcgtctatgagtgccgggaaggatactacgccacaggcctgctcagccgtcactgctcggtcaatggtacctggacaggcagtgaccctgagtgcctcgtcataaactgtggtgaccctgggattccagccaatggccttcggctgggcaatgacttcaggtacaacaaaactgtgacatatcagtgtgtccctggctatatgatggagtcacatagagtatctgtgctgagctgcaccaaggaccggacatggaatggaaccaagcccgtctgcaaagctctcatgtgcaagccacctccgctcatccccaatgggaaggtggtggggtctgacttcatgtggggctcaagtgtgacttatgcctgcctggaggggtaccagctctccctgcccgcggtgttcacctgtgagggaaatgggtcctggaccggagagctgcctcagtgtttccctgtgttctgcggggatcctggtgtcccgtcccgtgggaggagagaggaccgaggcttctcctacaggtcatctgtctccttctcctgccatccccctctggtgctggtgggctctccacgcaggttttgccagtcagatgggacatggagtggcacccagcccagctgcatagatccgaccctgaccacgtgtgcggaccctggtgtgccacagtttgggatacagaacaattctcagggctaccaggttggaagcacagtcctcttccgttgtcaaaaaggctacctgcttcagggctccaccaccaggacctgcctcccaaacctgacctggagtggaaccccacctgactgtgtcccccaccactgcaggcagccagagacgccaacgcatgccaacgtcggggccctggatttgccctccatgggctacacgctcatctactcctgccaggagggcttctccctcaagggtggctccgagcaccgcacctgcaaggcggatggcagctggacaggcaagccgcccatctgcctggaggtccggcccagtgggagacccatcaacactgcccgggagccaccgctcacccaagccttgattcctggggatgtttttgccaagaattccctgtggaaaggggcctatgaataccaggggaagaagcagccagccatgctcagagtgactggcttccaagttgccaacagcaaggtcaatgccaccatgatcgaccacagtggcgtggagctgcacttggctggaacttacaagaaagaagattttcatctcctactccaggtgtaccagattacagggcctgtggagatctttatgaataagttcaaagatgatcactgggctttagatggccatgtctcgtcagagtcctccggagccaccttcatctaccaaggctctgtcaagggccaaggctttgggcagttcggctttcaaagactggacctcaggctgctggagtcagaccccgagtccattggccgccactttgcttccaacagcagctcagtggcagccgcgatcctggtgcctttcatcgccctcattattgcgggcttcgtgctctatctctacaagcacaggagaagacccaaagttcctttcaatggctatgctggccacgagaacaccaatgttcgggccacatttgagaacccaatgtacgaccgcaacatccagcccacagacatcatggccagcgaggcggagttcacagtcagcacagtgtgcacagcagtatagccacccggcctggccgccaccaccgccaccgagagccccgcctccagcagccgttccccagggggcaggaagtaggctcccctgagcacagtgcccagtgcccatcttcgttcgtctccttgcctgtgtctgctactgctgggactcaggccctcgccctgccgccatctatgccagttaccctggagaggactcctgccgtgtcctgaaaaggcagaaaaggaagaggggctgcagacagaggaagaaagtttatggatttaaaatagcaaagcaacttgtggatctgtgtgtgtgtgtgtgtgtatgggcctgatcacacacaaacacacacacctctccttcattcacgtcctatggaagagaccataaaggcttcaaaactagaagtgcgcatgaaggatgcttcatgccctgttccccacacagagaagagatgaagagggggaggtacggtcagctttcaaaacaatatgccccccgcccatcccatgtgtgaggacatggtgactcggtgactgtaacagtaggacacatcccatcatgcggtcagagtgcagaaacccggtcagcgtgcagaaaccagctgtctgctgatgaacggcccatctgcacagcggcagcaaggattaccccaagggcaggaaaaaagtctttggaaatagattgaaaatcagtttctttatttttttcaaacactgttttattgagttctaaacccagtggattaaaaagtcatttgggtcctgggaagcactgggaaagaagggagagccggggaggatagggcaggagtctggccaggagcccaaggtcaagtctggctgtcaactgacaaagagaagagaagacaagtctgtggcccagacaggatgccaagtctgggggcagcagcagggtccttgagagaacaggggagcaagcctgccccagtacccaaaaaacaatggctatcatgtactggggttattctctgtgcctgacactttacctgtagtatttctagtctgcacaataacaccaaaatgtaggatttgttattcccctttgacagatgagaaaacagaagcctgcaaaggtaaagacagagttaggaagtgtggagtcagaatgcaaacccagatcagtctgccccaaagtccactacaccagctgccagaaaccctgttctagaaggggcagctaagaagggaggagccgatgaatctctacagtagcactgtggccaggtctggaaagccaggcaagacacctgtgtgtcctatctgggttctgctgtctccgcgtaggcagcttcggggcaaggattcaactccccaggcctcccacggttggtgctggctccttggctcccagcagccgctgaccatagccagcaaaagacctggcaggtcctgaatcaaaacaacagagtggctgaaagtcacacctctccagctccttgcgagtgggtttgattgattttgacagctatatcatgcttgggtcgttcatgaattccatgagaattgttgggaagttcatgagtttaggaatcaaagtatagcatttagggccactttctctgtcctcgggaaggcccccacaagcttaagcccctgtatacgtgtgacatgctggcctcagagattcatgtcacatattgaaatagcaaatagaaatgtgcaggagcggagggacagcgacacctggttcttaagcaaattctagattggaacaattagaagatctgactgatgttaagagtggccagaggaaagtgagaggcgtccatttccagcagacacaatggaggctgacagaggcaggagcctacccctggccacaccacctctgggacacggcacccccctgggcctggagggagagggccaatccagacacactcacactctcatctctttccttggctggaaacaagtgcaggaagctcccctcccaatttcttatgctcccttcccccttacactcctctccttcgactgctcccttcccccttcttatgcccctctcagaccacccagcggatgcctattcccgccccccacccctcccctgcgtctccttgtaaagttccatgagatgctcgaggagcacctgctggtggggcacccagcactctgctgggcatcaccctccgcacccctgacatttctctccacctccagaggcttggaagggaacagggcagatgaggcccttcacccaccatctacgccatatacccatcaccatcccatgaggaaaaaaaaaaaagtaaaacaaagacaaaaaaaatcttttgtacagagatatatttttattatacaaagtttgtacagtaccaaaaaagaaaaaaaaaaaggtgtaaatttttttttcattattgtaggtaaacggtagtggaagccttttttgtaaatgtaataaaatgtataaatatggttttcagaaaacatcaagtgctgtaaatatgtaatctacacaccttcttggcttgtctgcagtatatacatttaatttatctgtctctgtatatgaggcttccccctggggtcctgcattatggtactttcctgaatttgaaagcaattttaaattttttgaattcaaataaaatataaatttttgcattggttttcttac

SEQ ID NO: 5004 - DNA, 8290 bp, Homo sapiens
  source 1..8290: mol_type = unassigned DNA
gcgcccaggagcagagccgcgctcgctccactcagctcccagctcccaggactccgctggctcctcgcaagtcctgccgcccagcccgccgggatgcagtccgggccgcggcccccacttccagcccccggcctggccttggctttgaccctgactatgttggccagacttgcatccgcggcttccttcttcggtgagaaccacctggaggtgcctgtggccacggctctgaccgacatagacctgcagctgcagttctccacgtcccagcccgaagccctccttctcctggcagcaggcccagctgaccacctcctgctgcagctctactctggacgcctgcaggtcagacttgttctgggccaggaggagctgaggctgcagactccagcagagacgctgctgagtgactccatcccccacactgtggtgctgactgtcgtagagggctgggccacgttgtcagtcgatgggtttctgaacgcctcctcagcagtcccaggagcccccctagaggtcccctatgggctctttgttgggggcactgggacccttggcctgccctacctgaggggaaccagccgacccctgaggggttgcctccatgcagccaccctcaatggccgcagcctcctccggcctctgacccccgatgtgcatgagggctgtgctgaagagttttctgccagtgatgatgtggccctgggcttctctgggccccactctctggctgccttccctgcctggggcactcaggacgaaggaaccctagagtttacactcaccacacagagccggcaggcacccttggccttccaggcagggggccggcgtggggacttcatctatgtggacatatttgagggccacctgcgggccgtggtggagaagggccagggtaccgtattgctccacaacagtgtgcctgtggccgatgggcagccccatgaggtcagtgtccacatcaatgctcaccggctggaaatctccgtggaccagtaccctacgcatacttcgaaccgaggagtcctcagctacctggagccacggggcagtctccttctcggggggctggatgcagaggcctctcgtcacctccaggaacaccgcctgggcctgacaccagaggccaccaatgcctccctgctgggctgcatggaagacctcagtgtcaatggccagaggcgggggctgcgggaagctttgctgacgcgcaacatggcagccggctgcaggctggaggaggaggagtatgaggacgatgcctatggacattatgaagctttctccaccctggcccctgaggcttggccagccatggagctgcctgagccatgcgtgcctgagccagggctgcctcctgtctttgccaatttcacccagctgctgactatcagcccactggtggtggccgaggggggcacagcctggcttgagtggaggcatgtgcagcccacgctggacctgatggaggctgagctgcgcaaatcccaggtgctgttcagcgtgacccgaggggcacgccatggcgagctcgagctggacatcccgggagcccaggcacgaaaaatgttcaccctcctggacgtggtgaaccgcaaggcccgcttcatccacgatggctctgaggacacctccgaccagctggtgctggaggtgtcggtgacggctcgggtgcccatgccctcatgccttcggaggggccaaacatacctcctgcccatccaggtcaaccctgtcaatgacccaccccacatcatcttcccacatggcagcctcatggtgatcctggaacacacgcagaagccgctggggcctgaggttttccaggcctatgacccggactctgcctgtgagggcctcaccttccaggtccttggcacctcctctggcctccccgtggagcgccgagaccagcctggggagccggcgaccgagttctcctgccgggagttggaggccggcagcctagtctatgtccaccgcggtggtcctgcacaggacttgacgttccgggtcagcgatggactgcaggccagccccccggccacgctgaaggtggtggccatccggccggccatacagatccaccgcagcacagggttgcgactggcccaaggctctgccatgcccatcttgcccgccaacctgtcggtggagaccaatgccgtggggcaggatgtgagcgtgctgttccgcgtcactggggccctgcagtttggggagctgcagaagcagggggcaggtggggtggagggtgctgagtggtgggccacacaggcgttccaccagcgggatgtggagcagggccgcgtgaggtacctgagcactgacccacagcaccacgcttacgacaccgtggagaacctggccctggaggtgcaggtgggccaggagatcctgagcaatctgtccttcccagtgaccatccagagagccactgtgtggatgctgcggctggagccactgcacactcagaacacccagcaggagaccctcaccacagcccacctggaggccaccctggaggaggcaggcccaagccccccaaccttccattatgaggtggttcaggctcccaggaaaggcaaccttcaactacagggcacaaggctgtcagatggccagggcttcacccaggatgacatacaggctggccgggtgacctatggggccacagcacgtgcctcagaggcagtcgaggacaccttccgtttccgtgtcacagctccaccatatttctccccactctataccttccccatccacattggtggtgacccagatgcgcctgtcctcaccaatgtcctcctcgtggtgcctgagggtggtgagggtgtcctctctgctgaccacctctttgtcaagagtctcaacagtgccagctacctctatgaggtcatggagcggccccgccatgggaggttggcttggcgtgggacacaggacaagaccactatggtgacatccttcaccaatgaagacctgttgcgtggccggctggtctaccagcatgatgactccgagaccacagaagatgatatcccatttgttgctacccgccagggcgagagcagtggtgacatggcctgggaggaggtacggggtgtcttccgagtggccatccagcccgtgaatgaccacgcccctgtgcagaccatcagccggatcttccatgtggcccggggtgggcggcggctgctgactacagacgacgtggccttcagcgatgctgactcgggctttgctgacgcccagctggtgcttacccgcaaggacctcctctttggcagtatcgtggccgtagatgagcccacgcggcccatctaccgcttcacccaggaggacctcaggaagaggcgagtactgttcgtgcactcaggggctgaccgtggctggatccagctgcaggtgtccgacgggcaacaccaggccactgcgctgctggaggtgcaggcctcggaaccctacctccgtgtggccaacggctccagccttgtggtccctcaaggaggccagggcaccatcgacacggccgtgctccacctggacaccaacctcgacatccgcagtggggatgaggtccactaccacgtcacagctggccctcgctggggacagctagtccgggctggtcagccagccacagccttctcccagcaggacctgctggatggggccgttctctatagccacaatggcagcctcagcccccgcgacaccatggccttctccgtggaagcagggccagtgcacacggatgccaccctacaagtgaccattgccctagagggcccactggccccactgaagctggtccggcacaagaagatctacgtcttccagggagaggcagctgagatcagaagggaccagctggaggcagcccaggaggcagtgccacctgcagacatcgtattctcagtgaagagcccaccgagtgccggctacctggtgatggtgtcgcgtggcgccttggcagatgagccacccagcctggaccctgtgcagagcttctcccaggaggcagtggacacaggcagggtcctgtacctgcactcccgccctgaggcctggagcgatgccttctcgctggatgtggcctcaggcctgggtgctcccctcgagggcgtccttgtggagctggaggtgctgcccgctgccatcccactagaggcgcaaaacttcagcgtccctgagggtggcagcctcaccctggcccctccactgctccgtgtctccgggccctacttccccactctcctgggcctcagcctgcaggtgctggagccaccccagcatggagccctgcagaaggaggacggacctcaagccaggaccctcagcgccttctcctggagaatggtggaagagcagctgatccgctacgtgcatgacgggagcgagacactgacagacagttttgtcctgatggctaatgcctccgagatggatcgccagagccatcctgtggccttcactgtcactgtcctgcctgtcaatgaccaaccccccatcctcactacaaacacaggcctgcagatgtgggagggggccactgcgcccatccctgcggaggctctgaggagcacggacggcgactctgggtctgaggatctggtctacaccatcgagcagcccagcaacgggcgggtagtgctgcggggggcgccgggcactgaggtgcgcagcttcacgcaggcccagctggacggcgggctcgtgctgttctcacacagaggaaccctggatggaggcttccgcttccgcctctctgacggcgagcacacttcccccggacacttcttccgagtgacggcccagaagcaagtgctcctctcgctgaagggcagccagacactgactgtctgcccagggtccgtccagccactcagcagtcagaccctcagggccagctccagcgcaggcactgacccccagctcctgctctaccgtgtggtgcggggcccccagctaggccggctgttccacgcccagcaggacagcacaggggaggccctggtgaacttcactcaggcagaggtctacgctgggaatattctgtatgagcatgagatgccccccgagcccttttgggaggcccatgataccctagagctccagctgtcctcgccgcctgcccgggacgtggccgccacccttgctgtggctgtgtcttttgaggctgcctgtccccagcgccccagccacctctggaagaacaaaggtctctgggtccccgagggccagcgggccaggatcaccgtggctgctctggatgcctccaatctcttggccagcgttccatcaccccagcgctcagagcatgatgtgctcttccaggtcacacagttccccagccggggccagctgttggtgtccgaggagcccctccatgctgggcagccccacttcctgcagtcccagctggctgcagggcagctagtgtatgcccacggcggtgggggcacccagcaggatggcttccactttcgtgcccacctccaggggccagcaggggcctccgtggctggaccccaaacctcagaggcctttgccatcacggtgagggatgtaaatgagcggccccctcagccacaggcctctgtcccactccggctcacccgaggctctcgtgcccccatctcccgggcccagctgagtgtggtggacccagactcagctcctggggagattgagtacgaggtccagcgggcaccccacaacggcttcctcagcctggtgggtggtggcctggggcccgtgacccgcttcacgcaagccgatgtggattcagggcggctggccttcgtggccaacgggagcagcgtggcaggcatcttccagctgagcatgtctgatggggccagcccacccctgcccatgtccctggctgtggacatcctaccatccgccatcgaggtgcagctgcgggcacccctggaggtgccccaagctttggggcgctcctcactgagccagcagcagctccgggtggtttcagatcgggaggagccagaggcagcataccgcctcatccagggaccccagtatgggcatctcctggtgggcgggcggcccacctcggccttcagccaattccagatagaccagggcgaggtggtctttgccttcaccaacttctcctcctctcatgaccacttcagagtcctggcactggctaggggtgtcaatgcatcagccgtagtgaacgtcactgtgagggctctgctgcatgtgtgggcaggtgggccatggccccagggtgccaccctgcgcctggaccccaccgtcctagatgctggcgagctggccaaccgcacaggcagtgtgccgcgcttccgcctcctggagggaccccggcatggccgcgtggtccgcgtgccccgagccaggacggagcccgggggcagccagctggtggagcagttcactcagcaggaccttgaggacgggaggctggggctggaggtgggcaggccagaggggagggcccccggccccgcaggtgacagtctcactctggagctgtgggcacagggcgtcccgcctgctgtggcctccctggactttgccactgagccttacaatgctgcccggccctacagcgtggccctgctcagtgtccccgaggccgcccggacggaagcagggaagccagagagcagcacccccacaggcgagccaggccccatggcatccagccctgagcccgctgtggccaagggaggcttcctgagcttccttgaggccaacatgttcagcgtcatcatccccatgtgcctggtacttctgctcctggcgctcatcctgcccctgctcttctacctccgaaaacgcaacaagacgggcaagcatgacgtccaggtcctgactgccaagccccgcaacggcctggctggtgacaccgagacctttcgcaaggtggagccaggccaggccatcccgctcacagctgtgcctggccaggggccccctccaggaggccagcctgacccagagctgctgcagttctgccggacacccaaccctgcccttaagaatggccagtactgggtgtgaggcctggcctgggcccagatgctgatcgggccagggacaggcttgcccatgtcccgggccccattgcttccatgcctggtgctgtctgagtatccccagagcaagagagacctggagacaccaggggtggagggtcctgggagatagtcccaggggtccgggacagagtggagtcaagagctggaacctccctcagctcactccgagcctggagaactgcaggggccaaggtggaggcaggcttaagttcagtcctcctgccctggagctggtttgggctgtcaaaaccagggtaacctcctacatgggtcatgactctgggtcctgggtctgtgaccttgggtaagtcgcgcctgacccaggctgctaagagggcaaggagaaggaagtaccctggggagggaagggacagaggaagctattcctggcttttccactccaacccaggccaccctttgtctctgccccagagttgagaaaaaaacttcctcccctggttttttagggagatggtatcccctggagtagagggcaagaggagagagcgcctccagtctagaaggcataagccaataggataatatattcagggtgcagggtgggtaggttgctctggggatgggtttatttaagggagattgcaaggaagctatttaacatggtgctgagctagccaggactgatggagcccctgggggtgtgggatggaggagggtctgcagccagttcattcccagggccccatcttgatgggccaagggctaaacatgcatgtgtcagtggctttggagcaggttaggctggggctcatcgagggtctcaggccgaggccactgcggtgccagtgcccccctgaggactagggcaggcagctgggggcacttggttccatggagcctggataaacagtgctttggaggctctggacagctgtgtggtgtttgtgtcttaactatgcactgggcccttgtctgcgtcggcttgcatacagagggcccctggggtcggccctccggcctggcctcagccagtgggatggacagggccaggcaggcctctgaacttccacctcctggggcctcccagacctcctgtgcccccacctgtgtgggcaggtgggccagtcttcgggtgatgggaccaaaccccttcagttcagtagagaaaggctaggtcctctacaaagagctgcaagacaaaaattaaaataaatgctccccaccctaga

SEQ ID NO: 5005 - DNA, 8290 bp, Homo sapiens; identical to SEQ ID NO: 5004
  source 1..8290: mol_type = unassigned DNA

SEQ ID NO: 5006 - DNA, 2089 bp, Homo sapiens
  source 1..2089: mol_type = unassigned DNA
gtgtgatcctcgtcttgggggcagactccgggacggggcttagaggtaccgggtggctggggtcacactggggcggtggggtctgagggtggcgaggtctgggttgaccaggtctaggcgagcgggcctgaccggggcgggccggggctccagggctcctcagcgcgccgccctgacgtcccgccccttgccctcccgcccgcagcgcgtgaggcgggcagcgcggttgaggccgaagagctggtgaagggcagcccggcgtgggagccgcctgccaacgacacgcgggaagaagccggcccaccagcggctggggaagatgaggcgtcgtggacggcgcccggtggcgagctggccgggccagaagaggtgctgcaggagtcggctgcggtgaccggcaccgcctggctggaagctgacagcccaggcctgggaggagtgaccgcagaggcgggcagcggcgatgcccaggcccttccagctacgctccaggctccccacgaggtcctcgggcagtcaatcatgccccctgccattcctgaggctacagaggccagcgggccaccctcccccacccccggcgacaagctgagcccagcttctgaactccccaaggagagccccttggaggtttggctgaacctggggggcagcacacccgaccctcaagggccagagctgacttacccatttcagggcaccctggagccccaaccggcatcagatatcattgacatcgactacttcgaaggactggatggtgagggtcgtggcgcagatctggggagcttcccagggtcaccaggaacctcagagaaccaccctgatactgagggagagaccccttcctggagcctgcttgacttatacgatgatttcacccccttcgatgaatctgatttctaccccaccacatccttttatgatgacttggatgaagaggaggaggaagaggaggatgacaaagatgcagtaggaggtggagacctagaagatgaaaatgagcttctagtgcccactgggaagcctggtctggggcccgggacaggccagcccaccagtcggtggcatgctgtccctccacagcacactctggggtcggtccccggcagcagcatcgccctcaggccccgcccaggagagccaggcagggacttggcctccagtgaaaatggcactgagtgccgcagtggctttgtgcggcataacggctcctgccggtcagtgtgcgacctcttcccaagttactgtcacaatggcggccagtgctacctggtggagaacataggggccttctgcaggtgcaacacgcaggactacatctggcacaaggggatgcgctgcgagtccatcatcaccgacttccaggtgatgtgcgtggccgtgggctcggctgccctcgtcctgctcctgctcttcatgatgacggtgttctttgccaagaagctctacctgctcaagacggagaataccaagctgcgtaggaccaacaaattccggaccccatctgagctccacaatgataacttctccctctccaccattgccgagggctctcacccaaatgatgatcctagtgctccccacaaaatccaggaggttctcaagtcctgcctgaaagaggaggagtcatttaacatccagaactccatgtcgcccaaacttgagggtggcaaaggtgaccaggctgacttggatgtgaactgtcttcagaataatttaacctaaagcagagcaagaagagaggaagcgggggtagtgggtggggggtaggggaagaaacattatctcctcttgtacagagtctatttcttgtaaccatttgttaaactcttttctttttctgatctcatggcatgcttttatgtattttgtacaggaggcaaaaaaatacttaaaataagcaaagaaactgaacagaattgcatacattgggttgttttttctgtgctgtctgtacattgcttctgctgctgtgatttctaaacctgtgctgttattcaactgacttttttttgtactttgacccacgtttttttgaaataccagtaaaaaacaaagttcttgaaataaaactttttaaaaagtt

SEQ ID NO: 5007 - DNA, 4161 bp, Homo sapiens
  source 1..4161: mol_type = unassigned DNA
agatacttaaataattaacaaaatatatttaaaatgagtgggagaacttcctccattaaaccctgttgaaaatgtgtgagtggttgtcatgccccagacatcaaggaacccatccatgaggtcttcccacacagactggcctcaggaagggaaggaggaggtaggccgctctgacagccacaacccgagttgaggaaacaagcaaaggaacacagagagtctacatacagtaaaaggtgacaggagttaagctgcacacaagggaagcagagatgggttggaggcagttaagggtgcgttgctgcctctgtggctgaggtgagtgcaaagccctacatggtcccctgtttagagaaggctattgtttcaaacatattttacttggtccccggaggcagcatgaaactatgaaagaaagagccttaccccttttttcaaggctctccagaccacagttctgggatgggtgtgggtggttgccattcgttcatttatgcctgtctgatatggagcctccctctgttaccagccctgtgcactcaagtgccttgcagtccagtgaggaataactgtagataagatgagatgatgggcattaagtgtaactgctgagaagccttcatagagggaaaggtgataagaactgagtttttctggcatgaggagtttaccaggcaggagaggtggagacgctaggctaggcaaataggctgcagccatagttctgctgagaaacaggttttgaaccaaggcaactccatctggagatatgtatcagaaagattaggagatagaatctccatcttggtcacttatttggtcttctaagacagcaatgggaccgtctcttaaatactggagttgtcctatctccttgggctgataccctgaactgtcatttgggtgagtaacacattaaggggtagacggtcggtttgggggaataaactaagtaactaggttgcggttcctcctgccgactaagcagacctcctggtgcgtggtcttgggttgccctgtgagccctgaagctgtgaatgggccccacagatcactctaaagccaagcatccatgtgtgcccggctggggatctagacccccctggtctacccaggaacctgagttttggtggtctgagacacctgggggacgacgtatcccggagaagggaccaggattaaaggccgctccccaggctgcccggagactagaaggaaggcgaggtagccgcagtcccagggagggtcttaccccttgctcccgggatgcgttatggcgggcctggctgtgcgagatctaggctagtggctttggctgcgaacggattagatctgatccgattagagcctgggcggtcggcttcgcccccttgccaggctctgccaacgcccgcccctccctcgtggagacccggagacctccctgagagccttcccgcccggaacacgggattggtgcagaatccgagaggctccatgcgccccgggcctggcttgtttccacagtgggggctcgtgcttccgccccctgcggctcttctggaccccgccccgaccctgcgggtaactgggcccgcgacgtccccgcctccgtgcttgccgcgtggcgggtgggttcctccgggtcggggccccgtgccgcctgttcacctggggcgggaccgtggccccatcccacaggtctcccgcccgtgcacctgccgcctaacgccgcgcgccgcgccgtgcgcctgcctcgcgctccccgtccgcctgccccgcactccccgtccgtgtgtctcctagtccccagcgaggggtctgtctgttcccctggcaggctgaccaaggggccggcgtcaccgctacgtgcggcggggccggcgcggcgggcggggtgagggcggcgctgagcgcagcggcggcagcggcggcgcgggaggcggggaggcgcggcgcgccggggacagcggcggacggcggcggcggcggcatgcggctcctcgcgctgcccatcgtgggctgaggcggccgcagaaccggcgggaggcgcggcggccgggcgagccgagggcgcagccagccgggcggaccgcggacagcggtcggggcgccgcgccatggggcgagccgggggcgggggcccgggccgggggccgccgccactgctgctgtttctgggggccgcgctggtcctggcctctggggccgtgccggcgcgtgaggcgggcagcgcggttgaggccgaagagctggtgaagggcagcccggcgtgggagccgcctgccaacgacacgcgggaagaagccggcccaccagcggctggggaagatgaggcgtcgtggacggcgcccggtggcgagctggccgggccagaagaggtgctgcaggagtcggctgcggtgaccggcaccgcctggctggaagctgacagcccaggcctgggaggagtgaccgcagaggcgggcagcggcgatgcccaggcccttccagctacgctccaggctccccacgaggtcctcgggcagtcaatcatgccccctgccattcctgaggctacagaggccagcgggccaccctcccccacccccggcgacaagctgagcccagcttctgaactccccaaggagagccccttggaggtttggctgaacctggggggcagcacacccgaccctcaagggccagagctgacttacccatttcagggcaccctggagccccaaccggcatcagatatcattgacatcgactacttcgaaggactggatggtgagggtcgtggcgcagatctggggagcttcccagggtcaccaggaacctcagagaaccaccctgatactgagggagagaccccttcctggagcctgcttgacttatacgatgatttcacccccttcgatgaatctgatttctaccccaccacatccttttatgatgacttggatgaagaggaggaggaagaggaggatgacaaagatgcagtaggaggtggagacctagaagatgaaaatgagcttctagtgcccactgggaagcctggtctggggcccgggacaggccagcccaccagtcggtggcatgctgtccctccacagcacactctggggtcggtccccggcagcagcatcgccctcaggccccgcccaggagagccaggcagggacttggcctccagtgaaaatggcactgagtgccgcagtggctttgtgcggcataacggctcctgccggtcagtgtgcgacctcttcccaagttactgtcacaatggcggccagtgctacctggtggagaacataggggccttctgcaggtgcaacacgcaggactacatctggcacaaggggatgcgctgcgagtccatcatcaccgacttccaggtgatgtgcgtggccgtgggctcggctgccctcgtcctgctcctgctcttcatgatgacggtgttctttgccaagaagctctacctgctcaagacggagaataccaagctgcgtaggaccaacaaattccggaccccatctgagctccacaatgataacttctccctctccaccattgccgagggctctcacccaaatgtaaggaaactttgcaacactccccgtacctcctccccccatgcccgtgccttggctcactatgataacgttatctgtcaggatgatcctagtgctccccacaaaatccaggaggttctcaagtcctgcctgaaagaggaggagtcatttaacatccagaactccatgtcgcccaaacttgagggtggcaaaggtgaccaggctgacttggatgtgaactgtcttcagaataatttaacctaaagcagagcaagaagagaggaagcgggggtagtgggtggggggtaggggaagaaacattatctcctcttgtacagagtctatttcttgtaaccatttgttaaactcttttctttttctgatctcatggcatgcttttatgtattttgtacaggaggcaaaaaaatacttaaaataagcaaagaaactgaacagaattgcatacattgggttgttttttctgtgctgtctgtacattgcttctgctgctgtgatttctaaacctgtgctgttattcaactgacttttttttgtactttgacccacgtttttttgaaataccagtaaaaaacaaagttcttgaaataaaactttttaaaaagtt

SEQ ID NO: 5008 - DNA, 4080 bp, Homo sapiens
  source 1..4080: mol_type = unassigned DNA
agatacttaaataattaacaaaatatatttaaaatgagtgggagaacttcctccattaaaccctgttgaaaatgtgtgagtggttgtcatgccccagacatcaaggaacccatccatgaggtcttcccacacagactggcctcaggaagggaaggaggaggtaggccgctctgacagccacaacccgagttgaggaaacaagcaaaggaacacagagagtctacatacagtaaaaggtgacaggagttaagctgcacacaagggaagcagagatgggttggaggcagttaagggtgcgttgctgcctctgtggctgaggtgagtgcaaagccctacatggtcccctgtttagagaaggctattgtttcaaacatattttacttggtccccggaggcagcatgaaactatgaaagaaagagccttaccccttttttcaaggctctccagaccacagttctgggatgggtgtgggtggttgccattcgttcatttatgcctgtctgatatggagcctccctctgttaccagccctgtgcactcaagtgccttgcagtccagtgaggaataactgtagataagatgagatgatgggcattaagtgtaactgctgagaagccttcatagagggaaaggtgataagaactgagtttttctggcatgaggagtttaccaggcaggagaggtggagacgctaggctaggcaaataggctgcagccatagttctgctgagaaacaggttttgaaccaaggcaactccatctggagatatgtatcagaaagattaggagatagaatctccatcttggtcacttatttggtcttctaagacagcaatgggaccgtctcttaaatactggagttgtcctatctccttgggctgataccctgaactgtcatttgggtgagtaacacattaaggggtagacggtcggtttgggggaataaactaagtaactaggttgcggttcctcctgccgactaagcagacctcctggtgcgtggtcttgggttgccctgtgagccctgaagctgtgaatgggccccacagatcactctaaagccaagcatccatgtgtgcccggctggggatctagacccccctggtctacccaggaacctgagttttggtggtctgagacacctgggggacgacgtatcccggagaagggaccaggattaaaggccgctccccaggctgcccggagactagaaggaaggcgaggtagccgcagtcccagggagggtcttaccccttgctcccgggatgcgttatggcgggcctggctgtgcgagatctaggctagtggctttggctgcgaacggattagatctgatccgattagagcctgggcggtcggcttcgcccccttgccaggctctgccaacgcccgcccctccctcgtggagacccggagacctccctgagagccttcccgcccggaacacgggattggtgcagaatccgagaggctccatgcgccccgggcctggcttgtttccacagtgggggctcgtgcttccgccccctgcggctcttctggaccccgccccgaccctgcgggtaactgggcccgcgacgtccccgcctccgtgcttgccgcgtggcgggtgggttcctccgggtcggggccccgtgccgcctgttcacctggggcgggaccgtggccccatcccacaggtctcccgcccgtgcacctgccgcctaacgccgcgcgccgcgccgtgcgcctgcctcgcgctccccgtccgcctgccccgcactccccgtccgtgtgtctcctagtccccagcgaggggtctgtctgttcccctggcaggctgaccaaggggccggcgtcaccgctacgtgcggcggggccggcgcggcgggcggggtgagggcggcgctgagcgcagcggcggcagcggcggcgcgggaggcggggaggcgcggcgcgccggggacagcggcggacggcggcggcggcggcatgcggctcctcgcgctgcccatcgtgggctgaggcggccgcagaaccggcgggaggcgcggcggccgggcgagccgagggcgcagccagccgggcggaccgcggacagcggtcggggcgccgcgccatggggcgagccgggggcgggggcccgggccgggggccgccgccactgctgctgtttctgggggccgcgctggtcctggcctctggggccgtgccggcgcgtgaggcgggcagcgcggttgaggccgaagagctggtgaagggcagcccggcgtgggagccgcctgccaacgacacgcgggaagaagccggcccaccagcggctggggaagatgaggcgtcgtggacggcgcccggtggcgagctggccgggccagaagaggtgctgcaggagtcggctgcggtgaccggcaccgcctggctggaagctgacagcccaggcctgggaggagtgaccgcagaggcgggcagcggcgatgcccaggcccttccagctacgctccaggctccccacgaggtcctcgggcagtcaatcatgccccctgccattcctgaggctacagaggccagcgggccaccctcccccacccccggcgacaagctgagcccagcttctgaactccccaaggagagccccttggaggtttggctgaacctggggggcagcacacccgaccctcaagggccagagctgacttacccatttcagggcaccctggagccccaaccggcatcagatatcattgacatcgactacttcgaaggactggatggtgagggtcgtggcgcagatctggggagcttcccagggtcaccaggaacctcagagaaccaccctgatactgagggagagaccccttcctggagcctgcttgacttatacgatgatttcacccccttcgatgaatctgatttctaccccaccacatccttttatgatgacttggatgaagaggaggaggaagaggaggatgacaaagatgcagtaggaggtggagacctagaagatgaaaatgagcttctagtgcccactgggaagcctggtctggggcccgggacaggccagcccaccagtcggtggcatgctgtccctccacagcacactctggggtcggtccccggcagcagcatcgccctcaggccccgcccaggagagccaggcagggacttggcctccagtgaaaatggcactgagtgccgcagtggctttgtgcggcataacggctcctgccggtcagtgtgcgacctcttcccaagttactgtcacaatggcggccagtgctacctggtggagaacataggggccttctgcaggtgcaacacgcaggactacatctggcacaaggggatgcgctgcgagtccatcatcaccgacttccaggtgatgtgcgtggccgtgggctcggctgccctcgtcctgctcctgctcttcatgatgacggtgttctttgccaagaagctctacctgctcaagacggagaataccaagctgcgtaggaccaacaaattccggaccccatctgagctccacaatgataacttctccctctccaccattgccgagggctctcacccaaatgatgatcctagtgctccccacaaaatccaggaggttctcaagtcctgcctgaaagaggaggagtcatttaacatccagaactccatgtcgcccaaacttgagggtggcaaaggtgaccaggctgacttggatgtgaactgtcttcagaataatttaacctaaagcagagcaagaagagaggaagcgggggtagtgggtggggggtaggggaagaaacattatctcctcttgtacagagtctatttcttgtaaccatttgttaaactcttttctttttctgatctcatggcatgcttttatgtattttgtacaggaggcaaaaaaatacttaaaataagcaaagaaactgaacagaattgcatacattgggttgttttttctgtgctgtctgtacattgcttctgctgctgtgatttctaaacctgtgctgttattcaactgacttttttttgtactttgacccacgtttttttgaaataccagtaaaaaacaaagttcttgaaataaaactttttaaaaagtt

SEQ ID NO: 5009 - DNA, 593 bp, Homo sapiens
  source 1..593: mol_type = unassigned DNA
agtccagtgaggaataactgtagataagatgagatgatgggcattaagtgtaactgctgagaagccttcatagagggaaaggtgataagaactgagtttttctggcatgaggagtttaccaggcaggagaggtggagacgctaggctaggcaaataggctgcagccatagttctgctgagaaacaggttttgaaccaaggcaactccatctggagatatgtatcagaaagattaggagatagaatctccatcttggtcacttatttggtcttctaagacagcaatgggaccgtctcttaaatactggagttgtcctatctccttgggctgataccctgaactgtcatttggcgcgtgaggcgggcagcgcggttgaggccgaagagctggtgaagggcagcccggcgtgggagccgcctgccaacgacacgcgggaagaagccggcccaccagcggctggggaagatgaggcgtcgtggacggcgcccggtggcgagctggccgggccagaagaggtgctgcaggagtcggctgcggtgaccggcaccgcctggctggaagctgacagcccaggcctgggaggagtgaccgca

SEQ ID NO: 5010 - DNA, 2073 bp, Homo sapiens
  source 1..2073: mol_type = unassigned DNA
ggggaggcgcggcgcgccggggacagcggcggacggcggcggcggcggcatgcggctcctcgcgctgcccatcgtgggctgaggcggccgcagaaccggcgggaggcgcggcggccgggcgagccgagggcgcagccagccgggcggaccgcggacagcggtcggggcgccgcgccatggggcgagccgggggcgggggcccgggccgggggccgccgccactgctgctgtttctgggggccgcgctggtcctggcctctggggccgtgccggcgcgtgaggcgggcagcgcggttgaggccgaagagctggtgaagggcagcccggcgtgggagccgcctgccaacgacacgcgggaagaagccggcccaccagcggctggggaagatgaggcgtcgtggacggcgcccggtggcgagctggccgggccagaagaggtgctgcaggagtcggctgcggtgaccggcaccgcctggctggaagctgacagcccaggcctgggaggagtgaccgcagaggcgggcagcggcgatgcccaggcccttccagctacgctccaggctccccacgaggtcctcgggcagtcaatcatgccccctgccattcctgaggctacagaggccagcgggccaccctcccccacccccggcgacaagctgagcccagcttctgaactccccaaggagagccccttggaggtttggctgaacctggggggcagcacacccgaccctcaagggccagagctgacttacccatttcagggcaccctggagccccaaccggcatcagatatcattgacatcgactacttcgaaggactggatggtgagggtcgtggcgcagatctggggagcttcccagggtcaccaggaacctcagagaaccaccctgatactgagggagagaccccttcctggagcctgcttgacttatacgatgatttcacccccttcgatgaatctgatttctaccccaccacatccttttatgatgacttggatgaagaggaggaggaagaggaggatgacaaagatgcagtaggaggtggagacctagaagatgaaaatgagcttctagtgcccactgggaagcctggtctggggcccgggacaggccagcccaccagtcggtggcatgctgtccctccacagcacactctggggtcggtccccggcagcagcatcgccctcaggccccgcccaggagagccaggcagggacttggcctccagtgaaaatggcactgagtgccgcagtggctttgtgcggcataacggctcctgccggtcagtgtgcgacctcttcccaagttactgtcacaatggcggccagtgctacctggtggagaacataggggccttctgcaggtgcaacacgcaggactacatctggcacaaggggatgcgctgcgagtccatcatcaccgacttccaggtgatgtgcgtggccgtgggctcggctgccctcgtcctgctcctgctcttcatgatgacggtgttctttgccaagaagctctacctgctcaagacggagaataccaagctgcgtaggaccaagatgatcctagtgctccccacaaaatccaggaggttctcaagtcctgcctgaaagaggaggagtcatttaacatccagaactccatgtcgcccaaacttgagggtggcaaaggtgaccaggctgacttggatgtgaactgtcttcagaataatttaacctaaagcagagcaagaagagaggaagcgggggtagtgggtggggggtaggggaagaaacattatctcctcttgtacagagtctatttcttgtaaccatttgttaaactcttttctttttctgatctcatggcatgcttttatgtattttgtacaggaggcaaaaaaatacttaaaataagcaaagaaactgaacagaattgcatacattgggttgttttttctgtgctgtctgtacattgcttctgctgctgtgatttctaaacctgtgctgttattcaactgacttttttttgtactttgacccacgtttttttgaaataccagtaaaaaacaaagttcttgaaataaaacttttt

SEQ ID NO: 5011 - DNA, 3148 bp, Homo sapiens
  source 1..3148: mol_type = unassigned DNA
cgccgctgccggacgcgcagagcgaggggcggctggaccgacggctgccgggccgagcgcacagagtcgcggcgcagggggcgtccccggccgggacgcgggtcgcgtcgttgtcctccgcgagcgtccggattgcaggctgtctgtccccagaccccagagcacgtccggcaccaccatgactgggctgttgaagaggaaatttgaccagctggatgaggacaactcctcggtctcctcctcctcctcttcctctgggtgccagtctcgctcctgctccccaagctcttctgtctcccgtgcctgggactcagaggaggaaggcccctgggatcagatgcccctgcctgaccgtgacttctgcggccccagaagtttcacccccctgtctatcctgaagcgggctcgccgggagcgcccaggccgtgtagcctttgatgggatcaccgtcttctacttcccccgctgccagggcttcaccagtgtgcccagccgtggtggctgtactctgggtatggcccttcgccacagtgcttgccgtcgcttctctttggctgagtttgcgcaggagcaagcccgtgcacggcacgagaagctccgccagcgcttgaaagaggagaagttggagatgctgcagtggaagctttcggcagctggggtaccccaggcagaggcagggctgccacctgtggtggatgccattgatgacgcctctgtggaggaggacttggcagtcgctgtggcaggtggccggttggaagaagtgagcttcctacagccctacccagcccggcgacgtcgagctctgctgagggcttcaggtgtgcgaaggatcgatcgggaggagaagcgggagctgcaggcactgcgccaatcccgggaggattgtggctgtcactgcgataggatctgcgaccctgagacctgcagctgcagcctggcaggcatcaagtgccagatggaccacacagcattcccctgtggctgctgcagggagggctgtgagaaccccatgggccgtgtggaatttaatcaggcaagagttcagacccatttcatccacacactcacccgcctgcagttggaacaggaggctgagagctttagggagctggaggcccctgcccagggcagcccacccagccctggtgaggaggccctggtccctactttcccactggccaagccccccatgaacaatgagctgggagacaacagctgcagcagcgacatgactgattcttctacagcatcttcatcagcatcgggcactagtgaggctcctgactgccccacccacccaggcctgcctggccctggcttccagcctggcgttgatgatgacagcctggcacgcatcttgagtttcagtgactctgacttcggtggggaggaggaggaagaggaggaagggagcgtggggaacctggacaacctcagctgcttccatccagctgacatctttggtactagtgaccctggtggcctggccagctggacccacagctattctggctgtagcttcacatcaggcgtcctggatgagaatgccaacctggatgccagctgcttcctaaatggtggccttgaagggtcaagggaaggcagccttcctggcacctcagtgccacccagcatggacgctggccggagtagctcagtggatctcagcttgtcttcttgtgactcctttgagttactccaggctctgccagattatagtctggggcctcactacacatcacagaaggtgtctgacagcctggacaacatcgaggcacctcacttccccctgcctggcctgtctccacctggggatgccagcagttgcttcctggagtccctcatgggcttctccgagccagccgccgaagccctagatccctttattgacagccagtttgaggacactgtcccagcatctctaatggagcctgtgccggtgtgaggaccaggatgtcttttcccagccccaagagacctgttgctgctttcttgtaattatggggctccccagagtctgcgtaacagtctcccactggctggctcacccacaggtgccatgtgcacactcctggttttcaaacaattctctggatttatttatttgttttaacttttctgtgctgaagagaggactggggggagggggcttcccctttcagctgcccggccccccacacccacagcttgctcttctatctccacaacgtgagcctggaagaggagaaaatgtggctcctctggagcttggcagaccacttttcggtctttgcgtgatgttccttagcccaaagacggtgagacagggctgaaatcaggtggcttctgccaccctgagccctagacccatgggtggctaaatccactggactgtgaagactataatttatttccataatttatttggagattgaggaggctttggttgcacttctttggctggtgggtaatgccaggggtggggtgggcacaggccctcaagagccccttttgccttgtagtcctacaccttgccctgcctgggctttggtgcagactaggtgtggatttgagctctgtgatctatgtctgctgcctggctcctagatggctctgtgggcaggtgctggccaaggacatcatctaggcagggggagagcctgggctgaacagctgtgaccaaaactcccttctgccccaccctgccccctccacttcctgccctctgttccatcttcccccttcccaaaggccacagcctttattccaggcccagggatgtaggagggggaaggaggaaacaggaagcccagagagggcaaagggcctacctcggggcgcgaaccatgccccagactattatctcagggctttctgggcactgcacttcagcgtggcccacctgcccatgccctgaggccagttggcgaggggtggctcctgagggtttttataccctttgtttgctaatgtttaattttgcatcataatttctacattgtccctgagtgtcagaactataatttattccatttctctctgtgtctgtgccaagaaacgcaggctctgggcctgccccttgcccaggaggccttgccagcctgtgtgcttgtgggaacaccttgtacctgagcttacaggtaccaataaagaggctttattttta

SEQ ID NO: 5012 - DNA, 2593 bp, Homo sapiens
  source 1..2593: mol_type = unassigned DNA
gggcaggagagcattccagtcgagaagaccggctgcagtaaaagcgtgagggtggaaacgctcgaggctgtctgtccccagaccccagagcacgtccggcaccaccatgactgggctgttgaagaggaaatttgaccagctggatgaggacaactcctcggtctcctcctcctcctcttcctctgggtgccagtctcgctcctgctccccaagctcttctgtctcccgtgcctgggactcagaggaggaaggcccctgggatcagatgcccctgcctgaccgtgacttctgcggccccagaagtttcacccccctgtctatcctgaagcgggctcgccgggagcgcccaggccgtgtagcctttgatgggatcaccgtcttctacttcccccgctgccagggcttcaccagtgtgcccagccgtggtggctgtactctgggtatggcccttcgccacagtgcttgccgtcgcttctctttggctgagtttgcgcaggagcaagcccgtgcacggcacgagaagctccgccagcgcttgaaagaggagaagttggagatgctgcagtggaagctttcggcagctggggtaccccaggcagaggcagggctgccacctgtggtggatgccattgatgacgcctctgtggaggaggacttggcagtcgctgtggcaggtggccggttggaagaagtgagcttcctacagccctacccagcccggcgacgtcgagctctgctgagggcttcaggtgtgcgaaggatcgatcgggaggagaagcgggagctgcaggcactgcgccaatcccgggaggattgtggctgtcactgcgataggatctgcgaccctgagacctgcagctgcagcctggcaggcatcaagtgccagatggaccacacagcattcccctgtggctgctgcagggagggctgtgagaaccccatgggccgtgtggaatttaatcaggcaagagttcagacccatttcatccacacactcacccgcctgcagttggaacaggaggctgagagctttagggagctggaggcccctgcccagggcagcccacccagccctggtgaggaggccctggtccctactttcccactggccaagccccccatgaacaatgagctgggagacaacagctgcagcagcgacatgactgattcttctacagcatcttcatcagcatcgggcactagtgaggctcctgactgccccacccacccaggcctgcctggccctggcttccagcctggcgttgatgatgacagcctggcacgcatcttgagtttcagtgactctgacttcggtggggaggaggaggaagaggaggaagggagcgtggggaacctggacaacctcagctgcttccatccagctgacatctttggtactagtgaccctggtggcctggccagctggacccacagctattctggctgtagcttcacatcaggcgtcctggatgagaatgccaacctggatgccagctgcttcctaaatggtggccttgaagggtcaagggaaggcagccttcctggcacctcagtgccacccagcatggacgctggccggagtagctcagtggatctcagcttgtcttcttgtgactcctttgagttactccaggctctgccagattatagtctggggcctcactacacatcacagaaggtgtctgacagcctggacaacatcgaggcacctcacttccccctgcctggcctgtctccacctggggatgccagcagttgcttcctggagtccctcatgggcttctccgagccagccgccgaagccctagatccctttattgacagccagtttgaggacactgtcccagcatctctaatggagcctgtgccggtgtgaggaccaggatgtcttttcccagccccaagagacctgttgctgctttcttgtaattatggggctccccagagtctgcgtaacagtctcccactggctggctcacccacaggtgccatgtgcacactcctggttttcaaacaattctctggatttatttatttgttttaacttttctgtgctgaagagaggactggggggagggggcttcccctttcagctgcccggccccccacacccacagcttgctcttctatctccacaacgtgagcctggaagaggagaaaatgtggctcctctggagcttggcagaccacttttcggtctttgcgtgatgttccttagcccaaagacggtgagacagggctgaaatcaggtggcttctgccaccctgagccctagacccatgggtggctaaatccactggactgtgaagactataatttatttccataatttatttggagattgaggaggctttggttgcacttctttggctggtgggtaatgccaggggtggggtgggcacaggccctcaagagccccttttgccttgtagtcctacaccttgccctgcctgggctttggtgcagactaggtgtggatttgagctctgtgatctatgtctgctgcctggctcctagatggctctgtgggcaggtgctggccaaggacatcatctaggcagggggagagcctgggctgaacagctgtgaccaa

SEQ ID NO: 5013 - DNA, 1688 bp, Homo sapiens
  source 1..1688: mol_type = unassigned DNA
attggttggctgccgcctgatggatagacgagggaggagtgtactctcttcagtgtgttctgacggagccgaagtacagaaaccatatttacaggtacatgtgacagcgttgcagctatgagtggaattttaaaggggaagtttgaagaagtcaacggctcctcaccctgctcttcagtgcaggaatcagatgatgaagttttcagctgtgacagtactgagagtgttgatagtgtcaatcgttcagttttaatgattttaccagaaaaaatgaggaaatatcaacagactgaaaatatgttttcagaggcatagaatcttcaggaaaatactggagttcctgagatctcaaggtacatgtgacagcactgcagcgatgagtggaattttaaagaggaagtttgaagaagttgacggctcctcaccctgctcctctgtgagggaatcagatgatgaagtttccagcagtgaaagtgctgacagtggggacagtgtcaatccatccacttctagtcattttaccccttcctccattctcaaaagggagaaacgactgaggacaaagaatgtacattttagttgtgtcaccgtgtactacttcaccaggaggcaaggcttcacaagtgtgcccagtcaagggggaagcaccctggggatgtccagccgccataacagcgtgcgccagtacactcttggcgagtttgcaagggagcaggagaggctccaccgggagatgttgagagaacaccttagggaggaaaagctgaactccttaaaactaaagatgactaagaatggcacagtagaatcagaagaagccagcactcttacactggatgacatttctgatgatgacattgacctggacaacacagaggtagatgagtacttcttcctacaacctttgccaacaaaaaaacgaagagctctgctgcgtgcctctggagtgaaaaagattgacgtggaagaaaagcacgaactccgagccatccgcctctcacgagaggactgtggctgtgactgccgagtgttctgtgatccagacacgtgcacctgcagcctggctggcattaagtgccaggtggatcgtatgtctttcccatgcggctgcactaaagaaggatgtagtaacacagcaggtagaattgaatttaatcctatccgtgttcggactcactttttgcacacaataatgaaacttgaactggagaaaaaccgagagcagcaaatccccacgctgaatggctgccacagtgagataagtgctcacagtagttctatgggccctgtcgctcactccgtagaatattcaatcgcagacagttttgagattgaaactgagccccaggctgcagtgctgcacctgcagtcggctgaagaattagattgccaaggagaggaggaggaagaagaggaggatgggagcagcttttgcagcggagtcacagattctagcacgcaaagcttggcacctagtgagtcagacgaggaggaggaggaagaagaagaggaagaggaggaggaggatgacgatgatgacaaaggagatggcttcgtggaaggtttgggcacccatgccgaagttgtccctcttccttcagttctttgttattctgatggcaccgccgttcacgaaagccatgcaaagaatgcttctttttatgccaactcttcaactctgtattacc

SEQ ID NO: 5014 - DNA, 482 bp, Homo sapiens
  source 1..482: mol_type = unassigned DNA
agtgtgttctgacggagccgaagtacagaaaccatatttacaggtacatgtgacagcactgcagcgatgagtggaattttaaagaggaagtttgaagaagttgacggctcctcaccctgctcctctgtgagggaatcagatgatgaagtttccagcagtgaaagtgctgacagtggggacagtgtcaatccatccacttctagtcattttaccccttcctccattctcaaaagggagaaacgactgaggacaaagaatgtacattttagttgtgtcaccgtgtactacttcaccaggaggcaaggcttcacaagtgtgcccagtcaagggggaagcaccctggggatgtccagccgccataacagcgtgcgccagtacactcttggcgagtttgcaagggagcaggagaggctccaccgggagatgttgagagaacaccttagggaggaaaagctgaactccttaaaactaaagatgactaa

SEQ ID NO: 5015 - DNA, 499 bp, Homo sapiens
  source 1..499: mol_type = unassigned DNA
ctgacggagccgaagtacagaaaccatatttacaggtacatgtgacagcgttgcagctatgagtggaattttaaaggggaagtttgaagaagtcaacggctcctcaccctgctcttcagtgcaggaatcagatgatgaagttttcagctgtgacagtactgagagtgttgatagtgtcaatcgttcagttttaatgattttaccagaaaaaatgaggaaatatcaacagactgaaaatatgttttcagaggcatagaatcttcaggaaaatactggagttcctgagatctcaagatggagagccacttagcttgcagactgccatctccctaacgtatcagaacaatgaacttggttccaagagtatagaactcagtgaatgtaaaatggatgaatgtatgaattaatgcataaatcaataaatgaacccagatgaataatatgccaaagttgtttctgtatatctctgtgatacaaataaacatatgctcattctatt

SEQ ID NO: 5016 - DNA, 11684 bp, Homo sapiens
  source 1..11684: mol_type = unassigned DNA
ctcagtgaggctgatgccgtgcagcaagcagtaggtaatgagtctttgtgcagagtgaagctcttgttgctgaacaataaagcatatggtacaagcaataaaacacagggctgggaaatttaagaagattcctctgaaccaggaagaactgtgtcttcggtgatgctgacacatatgataaaatgatcatttattttggatcctaatgaataaagagtgcaaggactaagactacagttatttgaacaggtacatgtgacagcactgcagcgatgagtggaattttaaagaggaagtttgaagaagttgacggctcctcaccctgctcctctgtgagggaatcagatgatgaagtttccagcagtgaaagtgctgacagtggggacagtgtcaatccatccacttctagtcattttaccccttcctccattctcaaaagggagaaacgactgaggacaaagaatgtacattttagttgtgtcaccgtgtactacttcaccaggaggcaaggcttcacaagtgtgcccagtcaagggggaagcaccctggggatgtccagccgccataacagcgtgcgccagtacactcttggcgagtttgcaagggagcaggagaggctccaccgggagatgttgagagaacaccttagggaggaaaagctgaactccttaaaactaaagatgactaagaatggcacagtagaatcagaagaagccagcactcttacactggatgacatttctgatgatgacattgacctggacaacacagaggtagatgagtacttcttcctacaacctttgccaacaaaaaaacgaagagctctgctgcgtgcctctggagtgaaaaagattgacgtggaagaaaagcacgaactccgagccatccgcctctcacgagaggactgtggctgtgactgccgagtgttctgtgatccagacacgtgcacctgcagcctggctggcattaagtgccaggtggatcgtatgtctttcccatgcggctgcactaaagaaggatgtagtaacacagcaggtagaattgaatttaatcctatccgtgttcggactcactttttgcacacaataatgaaacttgaactggagaaaaaccgagagcagcaaatccccacgctgaatggctgccacagtgagataagtgctcacagtagttctatgggccctgtcgctcactccgtagaatattcaatcgcagacagttttgagattgaaactgagccccaggctgcagtgctgcacctgcagtcggctgaagaattagattgccaaggagaggaggaggaagaagaggaggatgggagcagcttttgcagcggagtcacagattctagcacgcaaagcttggcacctagtgagtcagacgaggaggaggaggaagaagaagaggaagaggaggaggaggatgacgatgatgacaaaggagatggcttcgtggaaggtttgggcacccatgccgaagttgtccctcttccttcagttctttgttattctgatggcaccgccgttcacgaaagccatgcaaagaatgcttctttttatgccaactcttcaactctgtattaccaaatagatagccacattccaggaactccaaatcagatctctgagaactattctgaaagagacactgtcaaaaatggtaccctttcgctggtgccttacaccatgaccccggagcaattcgttgactatgcccgacaagcagaagaggcctatggtgcctcccactacccagctgccaacccctctgtaatcgtttgctgctcctcttccgaaaatgatagcggtgtgccctgcaatagtttatatcctgaacacaggtccaatcaccctcaagtggaatttcactcatacttgaaaggcccctcccaagaagggtttgtctctgcattgaatggtgacagtcacatttcagagcatcctgctgaaaattctttgagccttgcagaaaagagcatattgcatgaagagtgcatcaaatcacccgtggttgagacagtccctgtttagtagcttaaattattctaggaccaactcttctcttatttaaggcactgtatttaattggatttcctgggctcatcattgtttaaactgaagaccaagaaaacttggacggtggttaatcttccagactgtattttgttttttcctttctagccacatgactgtggcattgcacaaatacagtctctgtagggattttaaaagatttcagactgttttgatagaaaaagctaaattttaaaatgcatatctcacagttgcctacctgtcaaactgtgtgaaacctgccaatctgtgtagatcagagctccaaattttggattatcgggcctgtgcaagattgttaactaaggctgggaaataataagatttagagtcctaattttcaatatatctgaagataatgatgactttttaatgtaaaagtaattattgtaagaaaaagatttaattgttccatgtgtattttatttatggtagtttagaagacatgttttgatgaaaatgaacagccgcatgttcattcaagctgaagatgcatagctagttccacagagcatgcccacatggattgcatctggaatccattcacatttttatgatcatgactgatcagatttgcaaattcttaagggtgaaataggcctatttttgctattttggacaaataaatgattctatatgtgcaggtccttacacagttttctctaaagttaagagttaggacaatcctctggggagagtctagttcactgccctccctcagctgactccagagatggaggtagaaggaattgcctttcttttttaaacagcatcatcttgattcttagcttggacagcacctttaagctctaccccctacatcaaaatgcactttagtgccccttcacggtacctcgtgtggggtggggactgagaactctttgagatgaaaaaatttaaaaaaaaattaaaaagatctttaactattataaggttcatataattaatatagaggaatcatccaatgatacttatgaagggaaaatgacctattttccttcaccactctgaggacctaactcagtaaatgcagaggaggctgaggaaacatggaagagacacgacctcagcaaccagccttttctccagcgtgatcaatccatctctacaaaatcagtgtataatgagatttccacttagtgactagctgattgaaggggggcctctacccaaatactcaactaggcctttcttttctgaagcattttgatttgtcttgcctgggacaactagcagaacagtccagaatgcattgcatactttctaattacctcacattctcttattaaagagaacagatagaaataaaacatgcactccccacctttagattacctgcacttggttcgtcggaggacttctaggatcccgtttccctgtaaattaatttaggtaactaaatagtgtaattctgcctttttttttccaatgcaatatgactatgctaaacctgtttcatatttttgaccttctattgttatatcacttcacatgttttataactatttgaaatgcggacatgacttgctattcagtgactgcatcgctacttattttttatgtcttttagacttgggtgtttagaattatggatataaatatattgtagatctcaatttctaaaaaaaatattttatttaattgaacttaaaaatgcttgatctagagaaagtcctccagtggaaaagtttctactaaactttgttttggggaaaaaatgtttacttggcagctcttccactgtgcagttggtttctgccccttctcttcccccctacattgggccaaatttataactcttaatattaacattaaaagagctttgggtttgtctttatgtaggttgcagtaatgagagcagggttgttccttttgaatgattggccctttgggctaatcagaatgaggatttgttgaaatctcaaatatacatatatatatatatatatatatatatatatatatacacacacacacacacatacacatatatatacacatatatgtatgtgtgtgtgtgtgtgtgtgtgtgtgtatatatatatatcccatgttgtctgcaaagtgacagtttttagtgcttaatctccaaaattttccccctactgatacaatctaaagagcacaggcccaaagagaaaatgacaagaggctattgttccttcattcaagcacatgaaaggatcatgtgtactgtatttgctggaccattacaagctcttgaaggatctgcttgtgaagtactctgaggttattcttggaacacagagtgtgggagagtggggaagagccagctccagcctgagcaaagctgaagggtagaatgacagtccagtttctgaaaagagatattttaattttagttcagctttattttcctaagacgatatgaagcctacttttttatttttggctaggtctttgttttctagctttgtttccaaaaggatgcttaagaaaacagagtttttttcccctatccatttatctagggtagaaagtcactgccctgtgagaagaattacccttccaatcatgacagcttctattccaacttttcatatacctgactaacctgtaaacatatcccacaaaccacatacacaggctacctattaaaactctcccatatacctaacacatacacatgcacacacatacaaaatatatacatatcacacacttagagaatgacagatttcaggcaatggccaatagtcagtattgagtttttctaaccccagaatctggttgggctttatgatctaaaaaaatgtggtttagaaaagaggataattggtagagctgtagtttgaaaatatcaggtcaaagttgcaaacatacttatgatggaatcatttcatttttagttcctttcccagaaaagctgagagagcacactgttccagctgacttttttttccattaatagccgttctattcaacaaagagctgcccacatgccaggaaagtgctacagtccttctaagcttttaaaaatggggatcaagctacatgcagccagttggaatacttaagatctttatgccaagacacaataacctgacctgcagctgttgtattgcctccatagtatatctagccaaactgtagtctttgacacacaactttttagtcattcactatcaattgcaaagcttcatgctccagccctggctattctagtaccagtcctatacctttaaatgggacttaattcccagttataatcctggccgaattgatttgaaagtcaagtggctgaagcagcttgcatctcctttgtcattcccaatttcctttgggagaagtcaatgaaagagatttacttaagtttttcctccttatctcttgatcattaattattaagacatgggtaaaattcatttgtctcatgtcttttggttgattgaataatatagttactttttgaaagcccatcatttctttgtgataaaaccattttctcaatgtgacagccacatgtaaaatgtgaaactaatgtttcttagtatgtttaaaatcttcacaatcatatatggccctgcaatactccctgaattccttccctccaaaaaaaaactatgagttgcaaaaacactagttacgaattaatcaagaagcaaagagagtatgttaagtggctatgttctttaaaattttacattctaatagatgacttctaggcaaaattttggtatgattaccattaaacaggaaaacataccatgatttactttctataacttgctaatcactgtttcttttatttcaatttttgatattgttgcacaagtttatgactctttggtctttatattcaaaatttattaagtatcaattctttctttcaacaaatatgtactgaacacatgctgtgttagaacaactgtcttgggtagtaaaaagaggggaacactacaaattataatggataatattaatgaagggtggcatgaaataatcaagctttctcaaatcctcttaatatgtgattttatcaagtgacattagaaaaactgacatcagttcttgtctaattatatgtgagctgcaactaaaagatgcttcctttacctaaattatagaactcactggatcgcccttcatctctctccctccatctgaaatgtatgaattaaatcaggactcagctaggactgaatcaaatgaaaaagaaattttcgattaattgcttcttcaatgttagacctatataagtgatgctaaatttacaccagcaaactcctatcagacagtttcaaggaggatttgactcatgcataacccaggaaacatttcaggaaacttttaagacaacagtgtggaacacaatcactcttacttctatttataaaaagcctatcaaaacagcaaaatcctgttgcaaattccaaagacatcactttgcagcaggtggaaaacagagaggttgttagactccatcactttcagctggagttacaaaccatcaaattagcaggtggaaaatttatattctcagaagccaacaggagactgcctttttaaaaggtgtcatgaagccttctatttctccaaacaactcaatatttctctttaaaatggcatctctgttccttattctcttgatgacagtttgcagtgccattatagccagtgtattaaataccaggctttaatgggaagcacctttgtgctttcaaaggcaagacttgtctgtaattttaaattagaactgttggttgtattcttaccacaaccaaaacccaaagtttaaaggcttgattactctatattaggtctaatatgaattttcaccttctgattgcattactttttctgaaatctgctaactagtgctggaataacaaaaatgcctaagccaaaatgctgtagctctgcaccaacagcacagctcatcagatgttttctatagtagtaaagaatttgattgacttaattgaatatcagcaattttaatacccactagaattatggaagtatcagagtggaagtgaggacgcaataaaagcttaataagtggtggtgtcttctaggaattatgaaaaaaaaagctcagcagagctaagccagatcttattacatcataaagactagagttacaaatggcagccccaaacctagaaggggcagttacaatgtggacaccctttcagcccagttggtgctcacatctgctgaccaacattcatatcaattacatttttacagtctgtaagtcatttgatgctttagaaaataaaaacacacacctacagcattctaaagaaactattttgttaaaaaatttaaacacattttatattaaaataagtgatcaatgactttcatgattgtcaaaagtaaaaagtgcagacatttaaaaaagctcttctttcacattttacctaccaaatctagatattcaacgtgagtccttaaaacagtcacttctaaattttattttgactcctttcttggctttttcaaactggaccatgagacccccttcctaaacaatgcagttgttttgttttattctttttttccagaaattcaagctgaaacatttgatatgacctgtgttttacctggtgatcagttctcaggctagtctaagtctgtgctgtcttggcatgccttgggtttcctatcctgagagtggtaatgccagtagaatgatgggaaccaggagagtgaatacgaccagattcaaagcctaaaacaatatgtttcagtttacttttatatgtagattttttaaatattcacatctagcctggaattttagtaaatacagatacttgttgtatccatgggaaatgaggtcatttcaaagatgtaagtcacgttggtgactactttcttttacttgtgataaatatatcactatacagggtaattgcttttataaatttgatcctttgcattggcttataattcaagaaatgtcaacttcactgtgtcactttatgtcatctctcataaaagtttctggcaggactaaagtttcaaaggaatgtgatagaatttattttggataacatttgtattcagcatgctaatgatgtaactcctctctttatcattaccacggtgatagttaagttcattcgttaactcattttagtgacatgtgaggccatttaaatatttttaagataatgtatattgattagaaagggttagaaggagacaaatttatggtagaaattagccttgccattgtctaagttaatttatgtgacctgattgaacagttttagttgtaactttagagtagcttctttgttagaggatctctttcctttctcttttggttttctcccaatatttttatctgtcttgggattatcttaaaaggtatttattaatgagtatttggaagaaaattgacctagaaaatgtctcttttaaatttatctaggtacttgtatcaccagagaccttcatcaagtcctactgccacactggataaggccactacccccgacccttcttgtcagggacatggcttcctaataatggttttgctgttgtctctacataggggacctatggaaaaggagtttgaaatttctacctttgtagtacattgtatccaattttgttttgctcctccttttcatgtggtcaccaagcttttttccttagccattaaaaaagccacccctctttaaaacaaatttaaagatctatatacatttttgcaactttatttaataaaaaagagaagaaaaaataaaatctaaatctcaattaccctaaagtggaaaaacctaagtatctaacctaggaacttgttgcctggtggtggttgttgttgttgttgttttttaatttatttagtgttgatccttgagttatttaatggtatccaaatgatatctgaaagtgattgattttaagatgtaatagttggcaaagtcatttcatttgtgtctcaaacaaataaagcccactgccatgggttaccatctgaaccctgattcattaggcactagtcatgccaaatggggatctcagaatagtttaatcttttcaaagatactcacaatggccaactgtgtgtgaatactggaaagtttgagattcttctatattcttcaaatttatggtcctgagactaggagggatctccagaggtcatatggctcatcgatctaccaccagggaagactgtcacttaggcatgcccaacaggagagatcgccatctattcttaacatctctagggaaggcagtttccttggcaacacaattcagctctcttaggttttctcacaataagaaaatatcttggccagtctttgagggttaggcacctggcaacagttgtggtgatttgggccattgtactaggggattcaagggaagttgggtttccccctacatttggtgattattacattaatatatgatcattccataagtctcctaagaaatcagatttttaaagaaagacacggattcagagacaatggtctgtaacatgaccaacttttgacaaatatggctgtactaggttttcatttttgctgttgttgttgtttgtttttgtgattgctcttatgtcggtaggtaatgtcaggaaaagtgactgtttcagatccccagtacaaacatcagaactaggatcaaatgacttgacttttaagctgttccattttctaagaagttacaattacaaaaagtaagcattttctacattcttacttctaagtaatgaccttctcattaatctttccttggcttaaaatgacaaataagaatccaaagtttttccactcctcctgtgggagataggaatagttgtgaagagtctgatggaataaaatgactccagagatttacacagccaccatttgatcccagcctttgtccttgtgttatttaaacaatggcttcctgctttctcaggggtcaggaaaatgatttaaaaatttgtcttcttgacaaggcctgaaaacgaagggaggtgtcgtggagaaatggtgatttttctggttacatcacttgattcaagcactccctggagctttcaaagccttttttatctgctcagagttgacacccaactcagagtcagaactcaccagaagatgaggaacacccccgaaatcaatgtttcctttctccatgggatttttttcaatcttggtacagctgcatatctcccaaactcggatgctcttgtgaaatgacagccacatcagtgtggttactccccacaaataacactagggggaaatgaccttttttatttaaaaaaaaaaaaaaggctaatgctatagaatgatcatgtaaagaatgttgaataaaatttggcccatgttttaattgactctaggcacctctattgaaataagtctgaggcatagtttgtgaaacatgtttcaaaagtgtttgatgtataataaatgctagaaatttacagtacagaaatagtaaaaaaataaaataaaaataaacctgtagattacagctctgttcctaagaacctcagcctttattgtgtcttagtaaagttgatctgctttatttttagtttattgaatttctggtgtactagcctcttaagatagaacttttaatacatatgtactggttaatgcctgtttacgcagaaaatggcactttgttctttcagtgtgtttccctcagtgtcacagggtatatcaatttgatagatcatttgacatttgtcaaaaatacgtttcccattttaaaaatatgtataattggttgcatagacatatgtcactttttgcagtgtcttcatcttgatcatagttttagacatcaactatgtctcactttccaactgccatagaaatttggtacatttgcaaattctggtggaatctagtgagctgaatgtattggtagatcaaatgatccaaaggacttgggtgttatccttcagtctgtgttgaaccattcagatattgggaatggtccttacacaagggaagtcttttgagaatatttgttctcttattttttgtttgtttgttgctggcaaaaaaaaaagtaactttaaaaactcagaaaagccactgaactgtattttgtgaccttatgattagttttatctttcaactgatttttattgttacttttactcaatatcaacagtacttcaatagatatttattagttatgttcaatctaatgacttaaaacagttgaaaaggaggaaaatcaactccagtccacacatacagtcatgttacattaagatgtcatgttgtatgtcacacagtttctagattgatttctcttgtgtataagttataacatcaaaaatgccaaagggtatataaaataagctacaataatattcaacagaacttaacctggaccttatgttgtaataatttattcatattagctgtagtcttctgtatttatattttcagtatttattatgaatgacatggaaattcgtgtatttattgtggctttttattgcagtgtgtatatatatataacaaataagcatttttaagtcttatccttaagtttcttttattagtggcacttgtattatgctgtactttttattacatattgtacaatatcttgtccatttgtttgcagcagagtaaaaccggtttctaagttgta

SEQ ID NO: 5017 - DNA, 2545 bp, Homo sapiens
  source 1..2545: mol_type = unassigned DNA
tcctgctctcccgtgattcaggtagcctggcagaaccgcagttccacaattccttacccagcattccgtttcagctgctggaggactgcctgagccttatgcaaatgagaccagctcggaggctttgactgcagaagcgagaggagggggcagaagggagttcaaaggtcacagggctggtggaaagctggatcagttgcctgaaaaaaatgtactggggttctctgcagcagtgttttgcagcagttaaatgaagtgtgctttatttctgagagtgaagattttacagcgtgtgtgccgtagtcgttatatagtgcacgcaggtacatgtgacagcactgcagcgatgagtggaattttaaagaggaagtttgaagaagttgacggctcctcaccctgctcctctgtgagggaatcagatgatgaagtttccagcagtgaaagtgctgacagtggggacagtgtcaatccatccacttctagtcattttaccccttcctccattctcaaaagggagaaacgactgaggacaaagaatgtacattttagttgtgtcaccgtgtactacttcaccaggaggcaaggcttcacaagtgtgcccagtcaagggggaagcaccctggggatgtccagccgccataacagcgtgcgccagtacactcttggcgagtttgcaagggagcaggagaggctccaccgggagatgttgagagaacaccttagggaggaaaagctgaactccttaaaactaaagatgactaagaatggcacagtagaatcagaagaagccagcactcttacactggatgacatttctgatgatgacattgacctggacaacacagaggtagatgagtacttcttcctacaacctttgccaacaaaaaaacgaagagctctgctgcgtgcctctggagtgaaaaagattgacgtggaagaaaagcacgaactccgagccatccgcctctcacgagaggactgtggctgtgactgccgagtgttctgtgatccagacacgtgcacctgcagcctggctggcattaagtgccaggtggatcgtatgtctttcccatgcggctgcactaaagaaggatgtagtaacacagcaggtagaattgaatttaatcctatccgtgttcggactcactttttgcacacaataatgaaacttgaactggagaaaaaccgagagcagcaaatccccacgctgaatggctgccacagtgagataagtgctcacagtagttctatgggccctgtcgctcactccgtagaatattcaatcgcagacagttttgagattgaaactgagccccaggctgcagtgctgcacctgcagtcggctgaagaattagattgccaaggagaggaggaggaagaagaggaggatgggagcagcttttgcagcggagtcacagattctagcacgcaaagcttggcacctagtgagtcagacgaggaggaggaggaagaagaagaggaagaggaggaggaggatgacgatgatgacaaaggagatggcttcgtggaaggtttgggcacccatgccgaagttgtccctcttccttcagttctttgttattctgatggcaccgccgttcacgaaagccatgcaaagaatgcttctttttatgccaactcttcaactctgtattaccaaatagatagccacattccaggaactccaaatcagatctctgagaactattctgaaagagacactgtcaaaaatggtaccctttcgctggtgccttacaccatgaccccggagcaattcgttgactatgcccgacaagcagaagaggcctatggtgcctcccactacccagctgccaacccctctgtaatcgtttgctgctcctcttccgaaaatgatagcggtgtgccctgcaatagtttatatcctgaacacaggtccaatcaccctcaagtggaatttcactcatacttgaaaggcccctcccaagaagggtttgtctctgcattgaatggtgacagtcacatttcagagcatcctgctgaaaattctttgagccttgcagaaaagagcatattgcatgaagagtgcatcaaatcacccgtggttgagacagtccctgtttagtagcttaaattattctaggaccaactcttctcttatttaaggcactgtatttaattggatttcctgggctcatcattgtttaaactgaagaccaagaaaacttggacggtggttaatcttccagactgtattttgttttttcctttctagccacatgactgtggcattgcacaaatacagtctctgtagggattttaaaagatttcagactgttttgatagaaaaagctaaattttaaaatgcatatctcacagttgcctacctgtcaaactgtgtgaaacctgccaatctgtgtagatcagagctccaaattttggattatcgggcctgtgcaagattgttaactaaggctgggaaataataagatttagagtcctaattttcaatatatctgaagataatgatgactttttaatgtaaaagtaattattgtaagaaaaa

SEQ ID NO: 5018 - DNA, 11788 bp, Homo sapiens
  source 1..11788: mol_type = unassigned DNA
attggttggctgccgcctgatggatagacgagggaggagtgtactctcttcagtgtgttctgacggagccgaagtacagaaaccatatttacaggtacatgtgacagcgttgcagctatgagtggaattttaaaggggaagtttgaagaagtcaacggctcctcaccctgctcttcagtgcaggaatcagatgatgaagttttcagctgtgacagtactgagagtgttgatagtgtcaatcgttcagttttaatgattttaccagaaaaaatgaggaaatatcaacagactgaaaatatgttttcagaggcatagaatcttcaggaaaatactggagttcctgagatctcaaggtacatgtgacagcactgcagcgatgagtggaattttaaagaggaagtttgaagaagttgacggctcctcaccctgctcctctgtgagggaatcagatgatgaagtttccagcagtgaaagtgctgacagtggggacagtgtcaatccatccacttctagtcattttaccccttcctccattctcaaaagggagaaacgactgaggacaaagaatgtacattttagttgtgtcaccgtgtactacttcaccaggaggcaaggcttcacaagtgtgcccagtcaagggggaagcaccctggggatgtccagccgccataacagcgtgcgccagtacactcttggcgagtttgcaagggagcaggagaggctccaccgggagatgttgagagaacaccttagggaggaaaagctgaactccttaaaactaaagatgactaagaatggcacagtagaatcagaagaagccagcactcttacactggatgacatttctgatgatgacattgacctggacaacacagaggtagatgagtacttcttcctacaacctttgccaacaaaaaaacgaagagctctgctgcgtgcctctggagtgaaaaagattgacgtggaagaaaagcacgaactccgagccatccgcctctcacgagaggactgtggctgtgactgccgagtgttctgtgatccagacacgtgcacctgcagcctggctggcattaagtgccaggtggatcgtatgtctttcccatgcggctgcactaaagaaggatgtagtaacacagcaggtagaattgaatttaatcctatccgtgttcggactcactttttgcacacaataatgaaacttgaactggagaaaaaccgagagcagcaaatccccacgctgaatggctgccacagtgagataagtgctcacagtagttctatgggccctgtcgctcactccgtagaatattcaatcgcagacagttttgagattgaaactgagccccaggctgcagtgctgcacctgcagtcggctgaagaattagattgccaaggagaggaggaggaagaagaggaggatgggagcagcttttgcagcggagtcacagattctagcacgcaaagcttggcacctagtgagtcagacgaggaggaggaggaagaagaagaggaagaggaggaggaggatgacgatgatgacaaaggagatggcttcgtggaaggtttgggcacccatgccgaagttgtccctcttccttcagttctttgttattctgatggcaccgccgttcacgaaagccatgcaaagaatgcttctttttatgccaactcttcaactctgtattaccaaatagatagccacattccaggaactccaaatcagatctctgagaactattctgaaagagacactgtcaaaaatggtaccctttcgctggtgccttacaccatgaccccggagcaattcgttgactatgcccgacaagcagaagaggcctatggtgcctcccactacccagctgccaacccctctgtaatcgtttgctgctcctcttccgaaaatgatagcggtgtgccctgcaatagtttatatcctgaacacaggtccaatcaccctcaagtggaatttcactcatacttgaaaggcccctcccaagaagggtttgtctctgcattgaatggtgacagtcacatttcagagcatcctgctgaaaattctttgagccttgcagaaaagagcatattgcatgaagagtgcatcaaatcacccgtggttgagacagtccctgtttagtagcttaaattattctaggaccaactcttctcttatttaaggcactgtatttaattggatttcctgggctcatcattgtttaaactgaagaccaagaaaacttggacggtggttaatcttccagactgtattttgttttttcctttctagccacatgactgtggcattgcacaaatacagtctctgtagggattttaaaagatttcagactgttttgatagaaaaagctaaattttaaaatgcatatctcacagttgcctacctgtcaaactgtgtgaaacctgccaatctgtgtagatcagagctccaaattttggattatcgggcctgtgcaagattgttaactaaggctgggaaataataagatttagagtcctaattttcaatatatctgaagataatgatgactttttaatgtaaaagtaattattgtaagaaaaagatttaattgttccatgtgtattttatttatggtagtttagaagacatgttttgatgaaaatgaacagccgcatgttcattcaagctgaagatgcatagctagttccacagagcatgcccacatggattgcatctggaatccattcacatttttatgatcatgactgatcagatttgcaaattcttaagggtgaaataggcctatttttgctattttggacaaataaatgattctatatgtgcaggtccttacacagttttctctaaagttaagagttaggacaatcctctggggagagtctagttcactgccctccctcagctgactccagagatggaggtagaaggaattgcctttcttttttaaacagcatcatcttgattcttagcttggacagcacctttaagctctaccccctacatcaaaatgcactttagtgccccttcacggtacctcgtgtggggtggggactgagaactctttgagatgaaaaaatttaaaaaaaaattaaaaagatctttaactattataaggttcatataattaatatagaggaatcatccaatgatacttatgaagggaaaatgacctattttccttcaccactctgaggacctaactcagtaaatgcagaggaggctgaggaaacatggaagagacacgacctcagcaaccagccttttctccagcgtgatcaatccatctctacaaaatcagtgtataatgagatttccacttagtgactagctgattgaaggggggcctctacccaaatactcaactaggcctttcttttctgaagcattttgatttgtcttgcctgggacaactagcagaacagtccagaatgcattgcatactttctaattacctcacattctcttattaaagagaacagatagaaataaaacatgcactccccacctttagattacctgcacttggttcgtcggaggacttctaggatcccgtttccctgtaaattaatttaggtaactaaatagtgtaattctgcctttttttttccaatgcaatatgactatgctaaacctgtttcatatttttgaccttctattgttatatcacttcacatgttttataactatttgaaatgcggacatgacttgctattcagtgactgcatcgctacttattttttatgtcttttagacttgggtgtttagaattatggatataaatatattgtagatctcaatttctaaaaaaaatattttatttaattgaacttaaaaatgcttgatctagagaaagtcctccagtggaaaagtttctactaaactttgttttggggaaaaaatgtttacttggcagctcttccactgtgcagttggtttctgccccttctcttcccccctacattgggccaaatttataactcttaatattaacattaaaagagctttgggtttgtctttatgtaggttgcagtaatgagagcagggttgttccttttgaatgattggccctttgggctaatcagaatgaggatttgttgaaatctcaaatatacatatatatatatatatatatatatatatatatatacacacacacacacacatacacatatatatacacatatatgtatgtgtgtgtgtgtgtgtgtgtgtgtgtatatatatatatcccatgttgtctgcaaagtgacagtttttagtgcttaatctccaaaattttccccctactgatacaatctaaagagcacaggcccaaagagaaaatgacaagaggctattgttccttcattcaagcacatgaaaggatcatgtgtactgtatttgctggaccattacaagctcttgaaggatctgcttgtgaagtactctgaggttattcttggaacacagagtgtgggagagtggggaagagccagctccagcctgagcaaagctgaagggtagaatgacagtccagtttctgaaaagagatattttaattttagttcagctttattttcctaagacgatatgaagcctacttttttatttttggctaggtctttgttttctagctttgtttccaaaaggatgcttaagaaaacagagtttttttcccctatccatttatctagggtagaaagtcactgccctgtgagaagaattacccttccaatcatgacagcttctattccaacttttcatatacctgactaacctgtaaacatatcccacaaaccacatacacaggctacctattaaaactctcccatatacctaacacatacacatgcacacacatacaaaatatatacatatcacacacttagagaatgacagatttcaggcaatggccaatagtcagtattgagtttttctaaccccagaatctggttgggctttatgatctaaaaaaatgtggtttagaaaagaggataattggtagagctgtagtttgaaaatatcaggtcaaagttgcaaacatacttatgatggaatcatttcatttttagttcctttcccagaaaagctgagagagcacactgttccagctgacttttttttccattaatagccgttctattcaacaaagagctgcccacatgccaggaaagtgctacagtccttctaagcttttaaaaatggggatcaagctacatgcagccagttggaatacttaagatctttatgccaagacacaataacctgacctgcagctgttgtattgcctccatagtatatctagccaaactgtagtctttgacacacaactttttagtcattcactatcaattgcaaagcttcatgctccagccctggctattctagtaccagtcctatacctttaaatgggacttaattcccagttataatcctggccgaattgatttgaaagtcaagtggctgaagcagcttgcatctcctttgtcattcccaatttcctttgggagaagtcaatgaaagagatttacttaagtttttcctccttatctcttgatcattaattattaagacatgggtaaaattcatttgtctcatgtcttttggttgattgaataatatagttactttttgaaagcccatcatttctttgtgataaaaccattttctcaatgtgacagccacatgtaaaatgtgaaactaatgtttcttagtatgtttaaaatcttcacaatcatatatggccctgcaatactccctgaattccttccctccaaaaaaaaactatgagttgcaaaaacactagttacgaattaatcaagaagcaaagagagtatgttaagtggctatgttctttaaaattttacattctaatagatgacttctaggcaaaattttggtatgattaccattaaacaggaaaacataccatgatttactttctataacttgctaatcactgtttcttttatttcaatttttgatattgttgcacaagtttatgactctttggtctttatattcaaaatttattaagtatcaattctttctttcaacaaatatgtactgaacacatgctgtgttagaacaactgtcttgggtagtaaaaagaggggaacactacaaattataatggataatattaatgaagggtggcatgaaataatcaagctttctcaaatcctcttaatatgtgattttatcaagtgacattagaaaaactgacatcagttcttgtctaattatatgtgagctgcaactaaaagatgcttcctttacctaaattatagaactcactggatcgcccttcatctctctccctccatctgaaatgtatgaattaaatcaggactcagctaggactgaatcaaatgaaaaagaaattttcgattaattgcttcttcaatgttagacctatataagtgatgctaaatttacaccagcaaactcctatcagacagtttcaaggaggatttgactcatgcataacccaggaaacatttcaggaaacttttaagacaacagtgtggaacacaatcactcttacttctatttataaaaagcctatcaaaacagcaaaatcctgttgcaaattccaaagacatcactttgcagcaggtggaaaacagagaggttgttagactccatcactttcagctggagttacaaaccatcaaattagcaggtggaaaatttatattctcagaagccaacaggagactgcctttttaaaaggtgtcatgaagccttctatttctccaaacaactcaatatttctctttaaaatggcatctctgttccttattctcttgatgacagtttgcagtgccattatagccagtgtattaaataccaggctttaatgggaagcacctttgtgctttcaaaggcaagacttgtctgtaattttaaattagaactgttggttgtattcttaccacaaccaaaacccaaagtttaaaggcttgattactctatattaggtctaatatgaattttcaccttctgattgcattactttttctgaaatctgctaactagtgctggaataacaaaaatgcctaagccaaaatgctgtagctctgcaccaacagcacagctcatcagatgttttctatagtagtaaagaatttgattgacttaattgaatatcagcaattttaatacccactagaattatggaagtatcagagtggaagtgaggacgcaataaaagcttaataagtggtggtgtcttctaggaattatgaaaaaaaaagctcagcagagctaagccagatcttattacatcataaagactagagttacaaatggcagccccaaacctagaaggggcagttacaatgtggacaccctttcagcccagttggtgctcacatctgctgaccaacattcatatcaattacatttttacagtctgtaagtcatttgatgctttagaaaataaaaacacacacctacagcattctaaagaaactattttgttaaaaaatttaaacacattttatattaaaataagtgatcaatgactttcatgattgtcaaaagtaaaaagtgcagacatttaaaaaagctcttctttcacattttacctaccaaatctagatattcaacgtgagtccttaaaacagtcacttctaaattttattttgactcctttcttggctttttcaaactggaccatgagacccccttcctaaacaatgcagttgttttgttttattctttttttccagaaattcaagctgaaacatttgatatgacctgtgttttacctggtgatcagttctcaggctagtctaagtctgtgctgtcttggcatgccttgggtttcctatcctgagagtggtaatgccagtagaatgatgggaaccaggagagtgaatacgaccagattcaaagcctaaaacaatatgtttcagtttacttttatatgtagattttttaaatattcacatctagcctggaattttagtaaatacagatacttgttgtatccatgggaaatgaggtcatttcaaagatgtaagtcacgttggtgactactttcttttacttgtgataaatatatcactatacagggtaattgcttttataaatttgatcctttgcattggcttataattcaagaaatgtcaacttcactgtgtcactttatgtcatctctcataaaagtttctggcaggactaaagtttcaaaggaatgtgatagaatttattttggataacatttgtattcagcatgctaatgatgtaactcctctctttatcattaccacggtgatagttaagttcattcgttaactcattttagtgacatgtgaggccatttaaatatttttaagataatgtatattgattagaaagggttagaaggagacaaatttatggtagaaattagccttgccattgtctaagttaatttatgtgacctgattgaacagttttagttgtaactttagagtagcttctttgttagaggatctctttcctttctcttttggttttctcccaatatttttatctgtcttgggattatcttaaaaggtatttattaatgagtatttggaagaaaattgacctagaaaatgtctcttttaaatttatctaggtacttgtatcaccagagaccttcatcaagtcctactgccacactggataaggccactacccccgacccttcttgtcagggacatggcttcctaataatggttttgctgttgtctctacataggggacctatggaaaaggagtttgaaatttctacctttgtagtacattgtatccaattttgttttgctcctccttttcatgtggtcaccaagcttttttccttagccattaaaaaagccacccctctttaaaacaaatttaaagatctatatacatttttgcaactttatttaataaaaaagagaagaaaaaataaaatctaaatctcaattaccctaaagtggaaaaacctaagtatctaacctaggaacttgttgcctggtggtggttgttgttgttgttgttttttaatttatttagtgttgatccttgagttatttaatggtatccaaatgatatctgaaagtgattgattttaagatgtaatagttggcaaagtcatttcatttgtgtctcaaacaaataaagcccactgccatgggttaccatctgaaccctgattcattaggcactagtcatgccaaatggggatctcagaatagtttaatcttttcaaagatactcacaatggccaactgtgtgtgaatactggaaagtttgagattcttctatattcttcaaatttatggtcctgagactaggagggatctccagaggtcatatggctcatcgatctaccaccagggaagactgtcacttaggcatgcccaacaggagagatcgccatctattcttaacatctctagggaaggcagtttccttggcaacacaattcagctctcttaggttttctcacaataagaaaatatcttggccagtctttgagggttaggcacctggcaacagttgtggtgatttgggccattgtactaggggattcaagggaagttgggtttccccctacatttggtgattattacattaatatatgatcattccataagtctcctaagaaatcagatttttaaagaaagacacggattcagagacaatggtctgtaacatgaccaacttttgacaaatatggctgtactaggttttcatttttgctgttgttgttgtttgtttttgtgattgctcttatgtcggtaggtaatgtcaggaaaagtgactgtttcagatccccagtacaaacatcagaactaggatcaaatgacttgacttttaagctgttccattttctaagaagttacaattacaaaaagtaagcattttctacattcttacttctaagtaatgaccttctcattaatctttccttggcttaaaatgacaaataagaatccaaagtttttccactcctcctgtgggagataggaatagttgtgaagagtctgatggaataaaatgactccagagatttacacagccaccatttgatcccagcctttgtccttgtgttatttaaacaatggcttcctgctttctcaggggtcaggaaaatgatttaaaaatttgtcttcttgacaaggcctgaaaacgaagggaggtgtcgtggagaaatggtgatttttctggttacatcacttgattcaagcactccctggagctttcaaagccttttttatctgctcagagttgacacccaactcagagtcagaactcaccagaagatgaggaacacccccgaaatcaatgtttcctttctccatgggatttttttcaatcttggtacagctgcatatctcccaaactcggatgctcttgtgaaatgacagccacatcagtgtggttactccccacaaataacactagggggaaatgaccttttttatttaaaaaaaaaaaaaaggctaatgctatagaatgatcatgtaaagaatgttgaataaaatttggcccatgttttaattgactctaggcacctctattgaaataagtctgaggcatagtttgtgaaacatgtttcaaaagtgtttgatgtataataaatgctagaaatttacagtacagaaatagtaaaaaaataaaataaaaataaacctgtagattacagctctgttcctaagaacctcagcctttattgtgtcttagtaaagttgatctgctttatttttagtttattgaatttctggtgtactagcctcttaagatagaacttttaatacatatgtactggttaatgcctgtttacgcagaaaatggcactttgttctttcagtgtgtttccctcagtgtcacagggtatatcaatttgatagatcatttgacatttgtcaaaaatacgtttcccattttaaaaatatgtataattggttgcatagacatatgtcactttttgcagtgtcttcatcttgatcatagttttagacatcaactatgtctcactttccaactgccatagaaatttggtacatttgcaaattctggtggaatctagtgagctgaatgtattggtagatcaaatgatccaaaggacttgggtgttatccttcagtctgtgttgaaccattcagatattgggaatggtccttacacaagggaagtcttttgagaatatttgttctcttattttttgtttgtttgttgctggcaaaaaaaaaagtaactttaaaaactcagaaaagccactgaactgtattttgtgaccttatgattagttttatctttcaactgatttttattgttacttttactcaatatcaacagtacttcaatagatatttattagttatgttcaatctaatgacttaaaacagttgaaaaggaggaaaatcaactccagtccacacatacagtcatgttacattaagatgtcatgttgtatgtcacacagtttctagattgatttctcttgtgtataagttataacatcaaaaatgccaaagggtatataaaataagctacaataatattcaacagaacttaacctggaccttatgttgtaataatttattcatattagctgtagtcttctgtatttatattttcagtatttattatgaatgacatggaaattcgtgtatttattgtggctttttattgcagtgtgtatatatatataacaaataagcatttttaagtcttatccttaagtttcttttattagtggcacttgtattatgctgtactttttattacatattgtacaatatcttgtccatttgtttgcagcagagtaaaaccggtttctaagttgta

SEQ ID NO: 5019 - DNA, 2129 bp, Homo sapiens
  source 1..2129: mol_type = unassigned DNA
ggcttgttcctgtttgcatgacaggaaactcctgaaatgcccctcgcacgtgcaagacgttttccgcggtggcggcgacagggcgcacagtgggaccgcagcacgagctcggagcacccccagagtcggcgactcctgcccccgcccctgccggccggccttcccggggcctaggagggcagcaccgccgggcttcgcgccatgacatcagccctggagtggtgcagtgtgcaaagcccactggttggcgtggcccgggacacgccttccgcggagcggaacaaaacggcgcgcaggccgggcgcacccagccgccacttccgagagcgcctgccgcccctgcgccgccgagccagctgccagaatgccgaactggggaggaggcaagaaatgtggggtgtgtcagaagacggtttactttgccgaagaggttcagtgcgaaggcaacagcttccataaatcctgcttcctgtgcatggtctgcaagaagaatctggacagtaccactgtggccgtgcatggtgaggagatttactgcaagtcctgctacggcaagaagtatgggcccaaaggctatggctacgggcagggcgcaggcaccctcagcactgacaagggggagtcgctgggtatcaagcacgaggaagcccctggccacaggcccaccaccaaccccaatgcatccaaatttgcccagaagattggtggctccgagcgctgcccccgatgcagccaggcagtctatgctgcggagaaggtgattggtgctgggaagtcctggcataaggcctgctttcgatgtgccaagtgtggcaaaggccttgagtcaaccaccctggcagacaaggatggcgagatttactgcaaaggatgttatgctaaaaacttcgggcccaagggctttggttttgggcaaggagctggggccttggtccactctgagtgaggccaccatcacccaccacaccctgcccactcctgcgcttttcatcgccattccattcccagcagctttggagacctccaggattatttctctgtcagccctgccacatatcactaatgacttgaacttgggcatctggctccctttggtttgggggtctgcctgaggtcccaccccactaaagggctccccaggcctgggatctgacaccatcaccagtaggagacctcagtgttttgggtctaggtgagagcaggcccctctccccacacctcgccccacagagctctgttcttagcctcctgtgctgcgtgtccatcatcagctgaccaagacacctgaggacacatcttggcacccagaggagcagcagcaacaggctggagggagagggaagcaagaccaagatgaggaggggggaaggctgggttttttggatctcagagattctcctctgtgggaaagaggttgagcttcctggtgtccctcagagtaagcctgaggagtcccagcttagggagtcactattggaggcagagaggcatgcaggcagggtcctaggagcccctgcttctccaggcctcttgcctttgagtctttgtggaatggatagcctcccactaggactgggaggagaataacccaggtcttaaggaccccaaagtcaggatgttgtttgatcttctcaaacatctagttccctgcttgatgggaggatcctaatgaaatacctgaaacatatattggcatttatcaatggctcaaatcttcatttatctctggccttaaccctggctcctgaggctgcggccagcagagcccaggccagggctctgttcttgccacacctgcttgatcctcagatgtggagggaggtaggcactgcctcagtcttcatccaaacacctttccctttgccctgagacctcagaatcttccctttaacccaagaccctgcctcttccactccacccttctccagggacccttagatcacatcactccacccctgccaggccccaggttaggaatagtggtgggaggaaggggaaagggctgggcctcaccgctcccagcaactgaaaggacaacactatctggagccacccactgaaagggctgcaggcatgggctgtacccaagctgatttctcatctggtcaataaagctgtttagaccagaa

SEQ ID NO: 5020 - DNA, 8475 bp, Homo sapiens
  source 1..8475: mol_type = unassigned DNA
aggcctgcctttaaaattccccttgattgagtctttggtggatcttacaaagactttggtgagttgcagagtctctcagtatatcacctggatggaggtagaggggcagagggccacgatgggcaggattgggcctctgggagaacagaagggccaaggcaaagcagaaaggagcagggaggtcctcggcaggggagccatctggaagatgtcaacttgcaggccctgaggtctgccctgggctgagttcctgggtctcctactggagagatcagccaaaatacacctctgttcccccaagcactctttgctttctgccttctctctggtcttggaattttcagttcaattgggatcttacaggaaaacaattccaggccaattcctgacttcccaccctagaagggaatgttggagcccttggcctgtggttccctctccctccttcttgggagctggtcccggggggaaatggtgggaagttccatatttggatggcccagagtgctggaatgagatggagatctccagagcaggacaagagggtccttatttagtctgaagtctccaacctggggcttagggtgagagaggagctggcagagggatggaccctttaaaggcaagaggatggcagttgcaaggaaaggagctgagagcttctccgagggtggtaaaaggcgtggcttctccagtggtatccctcggtttctatgttcaggacatgtttgaggatgcgtccaactgagatgctgaactccaatatttaaggaatatgatcaaaccgaattaggattacaggacaagtaaagaaaaagaatgcagttgaatctcttgagaggagtatgtgaaagttagaagcaatgatctcttgaagctggggcctgtccctcccacttccttgtctcccgatggtactaactttatataatactaataagagtagccaacatttattatgcatttgttgtatgcagggtattatgccaagtacttcacatgtcagatctcatttgattctcaccaccagcttttggggcagacattattatgttcatttacaaatgaggacacagaggctggaaaggcaaaaaaaacttgcaaatggctggaaagggagagagctgggatttgattctgggcagtctgactcttcatgaccccaggctctgaactgctttaactttatttttatttttaaaagttttatttatttatttatttttaaataaatagagacagggttatgccatcttccccaggctgatctcaaactcctgggctcaagtaatcctccagccttggcttcccactgctggaactacaggcatgagccactgcacccagcccaaactgttttattctggatagctgggcatagctcccctctgagattaacaggacgaaatatgaggcccacagcctttccagctcagaccattgcaatccctagttccttccgttccactctctcttaccccaggagtcaggaagttcttctgtgtctgaccctcacttcttcctgtggtaaagtgatttctgagattagaaacttcaaatcctcttgtgattagcatgagctgcatcccatttcaaagcccaccatgttgggcacttaataaatgttaaacatttcttatggggtatcacatcacctgcatctccccccgttggctccctgccaacatgcacagatagtctcttctggattccactgttgaaggcaggaaaactgcccttcttttctttttcctcctcccccattgggacatatggtctctgttgagggcagagtgaggaacctcaacaggcgtcctgtggcttggggtcagcctaggctgttgcctctgaaccctgtgttgcactgcagcctgaggaagtttaggggtgcagaggaccaaaggagacacatatggattcctggaagaggaattggtgttggccagcatttctagagtcggatatgcagatcccatccctctgtcctcccacccattggccatcccgcctgcctccatttgtagacagttcctgaaagatcaggatattatgtatgcaaagaggccagagagcttcagctgtaagaagcttgcaatgagcaagaaggtcaccccagcttcaactcaatgcgtccgcttccccttcccctccacagtggtctgcaagaagaatctggacagtaccactgtggccgtgcatggtgaggagatttactgcaagtcctgctacggcaagaagtatgggcccaaaggctatggctacgggcagggcgcaggcaccctcagcactgacaagggggagtcgctgggtatcaagcacgaggagtgagtaaaagatcccctcccaacctttttcttgagctctctcccccaccctgtattaggcctcatgtgtatttacaaccatttttgggtaagcaatggaaggctcagaaaaccagttatttaaaaggcagtcacagagcagtgtctatgtgtcaggctgctgcaggagctggggatgcagcagggactaaaacaggctgggctcctccctgcaaggagcgtgcattctatatttgtatgagagtcagagctgggaggggccccaagaatcacttagtccaatttcctctttttttgtttttttttgaaagggagtcttgctctgtcacccaggctggagtgcagtggtacaatcttggctcactgcagcctctgcttcttgggctcaagtgatcctcttgcctcaggctcccgagtagctgggagtacaggcatgtgccaccacacccagctaattctgtattttgtagagacagggtttcaccatgttgcctcctctttttatagatgagaaaatccagcccaggctcagtgacttgcctggggtcccacggctagtgagtgtcggagccagatcaggggctcagggcagcaccgttgccacaccagcctcactgtctcagccctgctatctctcactactgagaagaagtcatttccctttcttcgaaatgccatagggtgtcatcagccccaccacacccccctcaccccacggcactccctggcctctgggtaaatggtggctgttggcagtcagcctggcttgctcctcggcctggggggtggacggaaatgatggatgaattaccaagtttcagccaaggtcattgccccagtgggaatgattcatcagcagatttctcctgtaaagaatctgataatagaccagctgcaggaatgaggggcagaggagggcaattcttagcaaatggggtgttaaatgattctggggttaactgggtgaccgagggaagtatgatgttacaatggaaataacattgtgctgaggcttggtttgtccatctgtaaaatgggagatgaccctagaggccctagcctttgtgactttggcagagagaattgcgcgctgctctggcatgagatgaaggtagggtcatgccctctcagtgccagccccacctgtacttacagtgtaagtcacctcaccccatgcccttctccatgcagagcccctggccacaggcccaccaccaaccccaatgcatccaaatttgcccagaagattggtggctccgagcgctgcccccgatgcagccaggcagtctatgctgcggagaaggtgattggtgctgggaaggtaaggtggctgctgggcatgagagggatggggggagatatcttcctgaaatgtggattccagaacttttaaattggtgacctagctctgctcagggcagcctgagcactggggtttaacctcttctctttgtccctgtgggttgcatgtacctgtgctttccagtctccaaggagctcatatcagccatgagcagtaacatccccagcattgatggacaatgggcaattcatagggagtggcaatgatcaatctgtatctctaatataggagaacagaaagtaagggtacgtggatgggctgcagagggtccacaaagccctgaagattatatacaaagtttcatgggaacctgtctgtttcttagaagaagatccatagcttttattaaattttcaaaggatttgtgatcccaaaaatatacattctgtttcatgggatgtggactcccaaaaacccatccaaatacccccagggcagagattttcaaggttcagacctaccagagcctcctaggaggcttttttcacactgtttagaattgccgcacatgcccttcccccatgatattctgacagtagcccccaatcaccaatgcacagtgagaatcactgtagcaaatcaacagttcccaattgagctgatcacttccttcagataggctgcagtagagaagaggcagaactcttgcccctggggtttgcagtgtcagattagcagtcagaaaatcacagaagagatgtctttcagctgtggggccagagaggaattctggagcatcacgtgaggcctgagatagaaaagtgacttggccaagatcacacaacaaggttatggaatgtctgggcctggagcccatcttcatctcttctggattcaggttttggctttcaaggctttttgaccttgaggaatgggataggggaattgatcaagaaatgttaaacaattaacacttaggccagtgttagaatctctactctcacagtcatggttggacagagatggggattagtatccctgttgtacagatgaagaaactgggagtcaggaggattacataatttgcccagatccgctagctaggaaggggctaagccagactcaagcccaggtttgtctgactccgaagcccttgctcttactgctgttactactgttaatgctactttgggccatttagcctcttcaaacccatttccaaggctgcaaaatgggaggggatcctagcacggtgattaagagcttggactctagacagcctgctttgaatcctagttttgccatttattggctgagcgaacttgggaaaatttagccttcctaagcctcagttcttcagctctaaagtgggcctggatggtggaggaaatgcaaagtggaccaagtaatggcccctgacaaataaggcagtttttttttgtttgtttgtttttgtttttgttttcttttggcagaatttcacacttgtcacctaggctggagtacagtggcgcgatcttagcactctgccttccgggttcaagtgattctcctgcctcagcctcccaagtggatgggactacaggcacgcgccaccacacccagctaatttttgtatttttagtgaagatggggtttgaccatgttggccaggctggtcttgaaccagcctggacctcacgatccacccacctcggcctccaaaagtgctgggattacaggtgtgagctaccacacccaacaacaaggcagttttaatgattaaatgagatagtacatgtataatgtgcaatgtagtgcctggtatgtcctcagtacagttttgctattgttattattattgttgtttattttcagggattattttgaggtcacaatgaagatccttgccattgactaaaggatatgaaaacaggagacattaatattattattaagttgggttttttgttctatctcattatgagaatagaaaattattaagaatagctaagaatcactatttccattacttaggcaggctataaggtaaagttagggctgtactaaggagtaggataagagaattttgcattcaagtggaaaaggtagggagaagccccacctttctattgcctcgctcaagaaatgttgagctgggagtacttttgggtgcttatgaatgagcaaagggattcagcttattttggcagggaggtggctaggaaatatgaggagaggtgttggtctaggtgtgattcagtttttctccagcctagagagcttggggtagcagcccctgctttacagaggaggcagcaaaggctgggtgactattgaggttgcaccagcactgacctagacccaggtccccccatttcagctctctggaggagaagccaatgtgcaaggttaggcaaccaggaaatctgaggggatgaatttcctttctcatccaccagcctgggcactgggagtgtctttgcccttaaaaggccttgttttgtcttatctgactgctgcctgcctcttgcttttcctgggttaagcagagctgtctacacatcagcctcttagcctgcccagctgttgatgggaactggctgcggagaagtctgtctgtgcaacgtcccatcactgtgtacaaactcgggcctcactttttttctgggacagctgtttgccctgtgttacagaatgcatgtgaggactagatatttaaacatatgatgcctggccacagagaaggtatttgtaattggattctcctggaccagcccagcctctgaagttctagaattaggtgcctcctttgcccaaaggctatcagctattggaggggagggtggcagtatgtccctcactgggtagctgtgaacactaactgacttcaccagtgtaaagtgcctggcacagggcctggcacagaggaagccagagtcaatgttgtctagtatcactttggaaggagaataagtctatgaaatgcattaaactcagcagggaaagtcctaaggagtagtttctccaggggccacagaagaccctttgggtctctatgagaggccccaaggcaacacagggcagagaggtctttctggtgagggctgttcaagtactaagtgacagtaccaggaggagtgcaaagccctggctcacaccactgatctactggcaagatgggtctggagaaggctcatctggcccagccagtggggtaacagctactttggtgttaaacccaccccctcacctgccttttgtggtatagctggtgaccctaatcatcaggccattgcaacatagcatggaagatggtgcgaggtggcgtgtggtccctggccttctccctctactgccttgcaccataggccatgtcctcccagcagcaccagctgagtagacttcagaagtggcttgagcccttataccatggttatgtcaaagggagtgggcctggggtggagggtaccctcatcactggtggcagccattaactatttccttccctgcctagtcctggcataaggcctgctttcgatgtgccaagtgtggcaaaggccttgagtcaaccaccctggcagacaaggatggcgagatttactgcaaaggatgttatgctaaaaacttcgggcccaagggctttggttttgggcaaggagctggggccttggtccactctgagtgaggccaccatcacccaccacaccctgcccactcctgcgcttttcatcgccattccattcccagcagctttggagacctccaggattatttctctgtcagccctgccacatatcactaatgacttgaacttgggcatctggctccctttggtttgggggtctgcctgaggtcccaccccactaaagggctccccaggcctgggatctgacaccatcaccagtaggagacctcagtgttttgggtctaggtgagagcaggcccctctccccacacctcgccccacagagctctgttcttagcctcctgtgctgcgtgtccatcatcagctgaccaagacacctgaggacacatcttggcacccagaggagcagcagcaacaggctggagggagagggaagcaagaccaagatgaggaggggggaaggctgggttttttggatctcagagattctcctctgtgggaaagaggttgagcttcctggtgtccctcagagtaagcctgaggagtcccagcttagggagtcactattggaggcagagaggcatgcaggcagggtcctaggagcccctgcttctccaggcctcttgcctttgagtctttgtggaatggatagcctcccactaggactgggaggagaataacccaggtcttaaggaccccaaagtcaggatgttgtttgatcttctcaaacatctagttccctgcttgatgggaggatcctaatgaaatacctgaaacatatattggcatttatcaatggctcaaatcttcatttatctctggccttaaccctggctcctgaggctgcggccagcagagcccaggccagggctctgttcttgccacacctgcttgatcctcagatgtggagggaggtaggcactgcctcagtcttcatccaaacacctttccctttgccctgagacctcagaatcttccctttaacccaagaccctgcctcttccactccacccttctccagggacccttagatcacatcactccacccctgccaggccccaggttaggaatagtggtgggaggaaggggaaagggctgggcctcaccgctcccagcaactgaaaggacaacactatctggagccacccactgaaagggctgcaggcatgggctgtacccaagctgatttctcatctggtcaataaagctgtttagaccag

SEQ ID NO: 5021 - DNA, 4208 bp, Homo sapiens
  source 1..4208: mol_type = unassigned DNA
acaccagcgtctcctcacctgcaggctgagacttactgacacttttcaccctcttggccccacatgtgtggcccactggaggggagcaatggctggcagaaaaccaccaggtctggaggtcaggggctgggttctggcctggccctgcatctggccaacacgtgatctggaactgttttgtgggcctcggttttccttccagaagcagagaatcattctctatttctgagtggggcaagggggctctgacctctcccctggggctgccttttccctttatttccaagcagtatcacaagggcccaccaaagtggcatctggaagtatgtgtttccaacaaatccagtcttttttttttcttttccccttattggcttaccatgatatggtagaaatttattcaggcctgcctttaaaattccccttgattgagtctttggtggatcttacaaagactttggtgagttgcagagtctctcagtatatcacctggatggaggtagaggggcagagggccacgatgggcaggattgggcctctgggagaacagaagggccaaggcaaagcagaaaggagcagggaggtcctcggcaggggagccatctggaagatgtcaacttgcaggccctgaggtctgccctgggctgagttcctgggtctcctactggagagatcagccaaaatacacctctgttcccccaagcactctttgctttctgccttctctctggtcttggaattttcagttcaattgggatcttacaggaaaacaattccaggccaattcctgacttcccaccctagaagggaatgttggagcccttggcctgtggttccctctccctccttcttgggagctggtcccggggggaaatggtgggaagttccatatttggatggcccagagtgctggaatgagatggagatctccagagcaggacaagagggtccttatttagtctgaagtctccaacctggggcttagggtgagagaggagctggcagagggatggaccctttaaaggcaagaggatggcagttgcaaggaaaggagctgagagcttctccgagggtggtaaaaggcgtggcttctccagtggtatccctcggtttctatgttcaggacatgtttgaggatgcgtccaactgagatgctgaactccaatatttaaggaatatgatcaaaccgaattaggattacaggacaagtaaagaaaaagaatgcagttgaatctcttgagaggagtatgtgaaagttagaagcaatgatctcttgaagctggggcctgtccctcccacttccttgtctcccgatggtactaactttatataatactaataagagtagccaacatttattatgcatttgttgtatgcagggtattatgccaagtacttcacatgtcagatctcatttgattctcaccaccagcttttggggcagacattattatgttcatttacaaatgaggacacagaggctggaaaggcaaaaaaaacttgcaaatggctggaaagggagagagctgggatttgattctgggcagtctgactcttcatgaccccaggctctgaactgctttaactttatttttatttttaaaagttttatttatttatttatttttaaataaatagagacagggttatgccatcttccccaggctgatctcaaactcctgggctcaagtaatcctccagccttggcttcccactgctggaactacaggcatgagccactgcacccagcccaaactgttttattctggatagctgggcatagctcccctctgagattaacaggacgaaatatgaggcccacagcctttccagctcagaccattgcaatccctagttccttccgttccactctctcttaccccaggagtcaggaagttcttctgtgtctgaccctcacttcttcctgtggtaaagtgatttctgagattagaaacttcaaatcctcttgtgattagcatgagctgcatcccatttcaaagcccaccatgttgggcacttaataaatgttaaacatttcttatggggtatcacatcacctgcatctccccccgttggctccctgccaacatgcacagatagtctcttctggattccactgttgaaggcaggaaaactgcccttcttttctttttcctcctcccccattgggacatatggtctctgttgagggcagagtgaggaacctcaacaggcgtcctgtggcttggggtcagcctaggctgttgcctctgaaccctgtgttgcactgcagcctgaggaagtttaggggtgcagaggaccaaaggagacacatatggattcctggaagaggaattggtgttggccagcatttctagagtcggatatgcagatcccatccctctgtcctcccacccattggccatcccgcctgcctccatttgtagacagttcctgaaagatcaggatattatgtatgcaaagaggccagagagcttcagctgtaagaagcttgcaatgagcaagaaggtcaccccagcttcaactcaatgcgtccgcttccccttcccctccacagtggtctgcaagaagaatctggacagtaccactgtggccgtgcatggtgaggagatttactgcaagtcctgctacggcaagaagtatgggcccaaaggctatggctacgggcagggcgcaggcaccctcagcactgacaagggggagtcgctgggtatcaagcacgaggaagcccctggccacaggcccaccaccaaccccaatgcatccaaatttgcccagaagattggtggctccgagcgctgcccccgatgcagccaggcagtctatgctgcggagaaggtgattggtgctgggaagtcctggcataaggcctgctttcgatgtgccaagtgtggcaaaggccttgagtcaaccaccctggcagacaaggatggcgagatttactgcaaaggatgttatgctaaaaacttcgggcccaagggctttggttttgggcaaggagctggggccttggtccactctgagtgaggccaccatcacccaccacaccctgcccactcctgcgcttttcatcgccattccattcccagcagctttggagacctccaggattatttctctgtcagccctgccacatatcactaatgacttgaacttgggcatctggctccctttggtttgggggtctgcctgaggtcccaccccactaaagggctccccaggcctgggatctgacaccatcaccagtaggagacctcagtgttttgggtctaggtgagagcaggcccctctccccacacctcgccccacagagctctgttcttagcctcctgtgctgcgtgtccatcatcagctgaccaagacacctgaggacacatcttggcacccagaggagcagcagcaacaggctggagggagagggaagcaagaccaagatgaggaggggggaaggctgggttttttggatctcagagattctcctctgtgggaaagaggttgagcttcctggtgtccctcagagtaagcctgaggagtcccagcttagggagtcactattggaggcagagaggcatgcaggcagggtcctaggagcccctgcttctccaggcctcttgcctttgagtctttgtggaatggatagcctcccactaggactgggaggagaataacccaggtcttaaggaccccaaagtcaggatgttgtttgatcttctcaaacatctagttccctgcttgatgggaggatcctaatgaaatacctgaaacatatattggcatttatcaatggctcaaatcttcatttatctctggccttaaccctggctcctgaggctgcggccagcagagcccaggccagggctctgttcttgccacacctgcttgatcctcagatgtggagggaggtaggcactgcctcagtcttcatccaaacacctttccctttgccctgagacctcagaatcttccctttaacccaagaccctgcctcttccactccacccttctccagggacccttagatcacatcactccacccctgccaggccccaggttaggaatagtggtgggaggaaggggaaagggctgggcctcaccgctcccagcaactgaaaggacaacactatctggagccacccactgaaagggctgcaggcatgggctgtacccaagctgatttctcatctggtcaataaagctgtttagaccag

SEQ ID NO: 5022 - DNA, 5239 bp, Homo sapiens
  source 1..5239: mol_type = unassigned DNA
gccgaactggggaggaggcaagaaatgtggggtgtgtcagaagacggtttactttgccgaagaggttcagtgcgaaggcaacagcttccataaatcctgcttcctgtgcatggtctgcaagaagaatctggacagtaccactgtggccgtgcatggtgaggagatttactgcaagtcctgctacggcaagaagtatgggcccaaaggctatggctacgggcagggcgcaggcaccctcagcactgacaagggggagtcgctgggtatcaagcacgaggaagcccctggccacaggcccaccaccaaccccaatgcatccaaatttgcccagaagattggtggctccgagcgctgcccccgatgcagccaggcagtctatgctgcggagaaggtgattggtgctgggaaggtaaggtggctgctgggcatgagagggatggggggagatatcttcctgaaatgtggattccagaacttttaaattggtgacctagctctgctcagggcagcctgagcactggggtttaacctcttctctttgtccctgtgggttgcatgtacctgtgctttccagtctccaaggagctcatatcagccatgagcagtaacatccccagcattgatggacaatgggcaattcatagggagtggcaatgatcaatctgtatctctaatataggagaacagaaagtaagggtacgtggatgggctgcagagggtccacaaagccctgaagattatatacaaagtttcatgggaacctgtctgtttcttagaagaagatccatagcttttattaaattttcaaaggatttgtgatcccaaaaatatacattctgtttcatgggatgtggactcccaaaaacccatccaaatacccccagggcagagattttcaaggttcagacctaccagagcctcctaggaggcttttttcacactgtttagaattgccgcacatgcccttcccccatgatattctgacagtagcccccaatcaccaatgcacagtgagaatcactgtagcaaatcaacagttcccaattgagctgatcacttccttcagataggctgcagtagagaagaggcagaactcttgcccctggggtttgcagtgtcagattagcagtcagaaaatcacagaagagatgtctttcagctgtggggccagagaggaattctggagcatcacgtgaggcctgagatagaaaagtgacttggccaagatcacacaacaaggttatggaatgtctgggcctggagcccatcttcatctcttctggattcaggttttggctttcaaggctttttgaccttgaggaatgggataggggaattgatcaagaaatgttaaacaattaacacttaggccagtgttagaatctctactctcacagtcatggttggacagagatggggattagtatccctgttgtacagatgaagaaactgggagtcaggaggattacataatttgcccagatccgctagctaggaaggggctaagccagactcaagcccaggtttgtctgactccgaagcccttgctcttactgctgttactactgttaatgctactttgggccatttagcctcttcaaacccatttccaaggctgcaaaatgggaggggatcctagcacggtgattaagagcttggactctagacagcctgctttgaatcctagttttgccatttattggctgagcgaacttgggaaaatttagccttcctaagcctcagttcttcagctctaaagtgggcctggatggtggaggaaatgcaaagtggaccaagtaatggcccctgacaaataaggcagtttttttttgtttgtttgtttttgtttttgttttcttttggcagaatttcacacttgtcacctaggctggagtacagtggcgcgatcttagcactctgccttccgggttcaagtgattctcctgcctcagcctcccaagtggatgggactacaggcacgcgccaccacacccagctaatttttgtatttttagtgaagatggggtttgaccatgttggccaggctggtcttgaaccagcctggacctcacgatccacccacctcggcctccaaaagtgctgggattacaggtgtgagctaccacacccaacaacaaggcagttttaatgattaaatgagatagtacatgtataatgtgcaatgtagtgcctggtatgtcctcagtacagttttgctattgttattattattgttgtttattttcagggattattttgaggtcacaatgaagatccttgccattgactaaaggatatgaaaacaggagacattaatattattattaagttgggttttttgttctatctcattatgagaatagaaaattattaagaatagctaagaatcactatttccattacttaggcaggctataaggtaaagttagggctgtactaaggagtaggataagagaattttgcattcaagtggaaaaggtagggagaagccccacctttctattgcctcgctcaagaaatgttgagctgggagtacttttgggtgcttatgaatgagcaaagggattcagcttattttggcagggaggtggctaggaaatatgaggagaggtgttggtctaggtgtgattcagtttttctccagcctagagagcttggggtagcagcccctgctttacagaggaggcagcaaaggctgggtgactattgaggttgcaccagcactgacctagacccaggtccccccatttcagctctctggaggagaagccaatgtgcaaggttaggcaaccaggaaatctgaggggatgaatttcctttctcatccaccagcctgggcactgggagtgtctttgcccttaaaaggccttgttttgtcttatctgactgctgcctgcctcttgcttttcctgggttaagcagagctgtctacacatcagcctcttagcctgcccagctgttgatgggaactggctgcggagaagtctgtctgtgcaacgtcccatcactgtgtacaaactcgggcctcactttttttctgggacagctgtttgccctgtgttacagaatgcatgtgaggactagatatttaaacatatgatgcctggccacagagaaggtatttgtaattggattctcctggaccagcccagcctctgaagttctagaattaggtgcctcctttgcccaaaggctatcagctattggaggggagggtggcagtatgtccctcactgggtagctgtgaacactaactgacttcaccagtgtaaagtgcctggcacagggcctggcacagaggaagccagagtcaatgttgtctagtatcactttggaaggagaataagtctatgaaatgcattaaactcagcagggaaagtcctaaggagtagtttctccaggggccacagaagaccctttgggtctctatgagaggccccaaggcaacacagggcagagaggtctttctggtgagggctgttcaagtactaagtgacagtaccaggaggagtgcaaagccctggctcacaccactgatctactggcaagatgggtctggagaaggctcatctggcccagccagtggggtaacagctactttggtgttaaacccaccccctcacctgccttttgtggtatagctggtgaccctaatcatcaggccattgcaacatagcatggaagatggtgcgaggtggcgtgtggtccctggccttctccctctactgccttgcaccataggccatgtcctcccagcagcaccagctgagtagacttcagaagtggcttgagcccttataccatggttatgtcaaagggagtgggcctggggtggagggtaccctcatcactggtggcagccattaactatttccttccctgcctagtcctggcataaggcctgctttcgatgtgccaagtgtggcaaaggccttgagtcaaccaccctggcagacaaggatggcgagatttactgcaaaggatgttatgctaaaaacttcgggcccaagggctttggttttgggcaaggagctggggccttggtccactctgagtgaggccaccatcacccaccacaccctgcccactcctgcgcttttcatcgccattccattcccagcagctttggagacctccaggattatttctctgtcagccctgccacatatcactaatgacttgaacttgggcatctggctccctttggtttgggggtctgcctgaggtcccaccccactaaagggctccccaggcctgggatctgacaccatcaccagtaggagacctcagtgttttgggtctaggtgagagcaggcccctctccccacacctcgccccacagagctctgttcttagcctcctgtgctgcgtgtccatcatcagctgaccaagacacctgaggacacatcttggcacccagaggagcagcagcaacaggctggagggagagggaagcaagaccaagatgaggaggggggaaggctgggttttttggatctcagagattctcctctgtgggaaagaggttgagcttcctggtgtccctcagagtaagcctgaggagtcccagcttagggagtcactattggaggcagagaggcatgcaggcagggtcctaggagcccctgcttctccaggcctcttgcctttgagtctttgtggaatggatagcctcccactaggactgggaggagaataacccaggtcttaaggaccccaaagtcaggatgttgtttgatcttctcaaacatctagttccctgcttgatgggaggatcctaatgaaatacctgaaacatatattggcatttatcaatggctcaaatcttcatttatctctggccttaaccctggctcctgaggctgcggccagcagagcccaggccagggctctgttcttgccacacctgcttgatcctcagatgtggagggaggtaggcactgcctcagtcttcatccaaacacctttccctttgccctgagacctcagaatcttccctttaacccaagaccctgcctcttccactccacccttctccagggacccttagatcacatcactccacccctgccaggccccaggttaggaatagtggtgggaggaaggggaaagggctgggcctcaccgctcccagcaactgaaaggacaacactatctggagccacccactgaaagggctgcaggcatgggctgtacccaagctgatttctcatctggtcaataaagctgtttagaccag

SEQ ID NO: 5023 - DNA, 890 bp, Homo sapiens
  source 1..890: mol_type = unassigned DNA
ggcttgttcctgtttgcatgacaggaaactcctgaaatgcccctcgcacgtgcaagacgttttccgcggtggcggcgacagggcgcacagtgggaccgcagcacgagctcggagcacccccagagtcggcgactcctgcccccgcccctgccggccggccttcccggggcctaggagggcagcaccgccgggcttcgcgccatgacatcagccctggagtggtgcagtgtgcaaagcccactggttggcgtggcccgggacacgccttccgcggagcggaacaaaacggcgcgcaggccgggcgcacccagccgccacttccgagagcgcctgccgcccctgcgccgccgagccagctgccagaatgccgaactggggaggaggcaagaaatgtggggtgtgtcagaagacggtttactttgccgaagaggttcagtgcgaaggcaacagcttccataaatcctgcttcctgtgcatggtctgcaagaagaatctggacagtaccactgtggccgtgcatggtgaggagatttactgcaagtcctgctacggcaagaagtatgggcccaaaggctatggctacgggcagggcgcaggcaccctcagcactgacaagggggagtcgctgggtatcaagcacgaggaagcccctggccacaggcccaccaccaaccccaatgcatccaaatttgcccagaagattggtggctccgagcgctgcccccgatgcagccaggcagtctatgctgcggagaaggaccccaaagtcaggatgttgtttgatcttctcaaacatctagttccctgcttgatgggaggatcctaatgaaatacctgaaacatatattggcatttatcaatggctcaaatcttcatttatctctggcctt

SEQ ID NO: 5024 - DNA, 1469 bp, Homo sapiens
  source 1..1469: mol_type = unassigned DNA
atcctttagagtgcctagcacagggctgaaaatgcagcagctgctctgtaaagacctgttgattagattggggggaggaaatccccgagaacgtgcgaggctgctgtcgagagctagcagaaagtgctctgccaggcctggtggccccccagaatgccgaactggggaggaggcaagaaatgtggggtgtgtcagaagacggtttactttgccgaagaggttcagtgcgaaggcaacagcttccataaatcctgcttcctgtgcatggtctgcaagaagaatctggacagtaccactgtggccgtgcatggtgaggagatttactgcaagtcctgctacggcaagaagtatgggcccaaaggctatggctacgggcagggcgcaggcaccctcagcactgacaagggggagtcgctgggtatcaagcacgaggaagcccctggccacaggcccaccaccaaccccaatgcatccaaatttgcccagaagattggtggctccgagcgctgcccccgatgcagccaggcagtctatgctgcggagaaggtgattggtgctgggaagtcctggcataaggcctgctttcgatgtgccaagtgtggcaaaggccttgagtcaaccaccctggcagacaaggatggcgagatttactgcaaaggatgttatgctaaaaacttcgggcccaagggctttggttttgggcaaggagctggggccttggtccactctgagtgaggccaccatcacccaccacaccctgcccactcctgcgcttttcatcgccattccattcccagcagctttggagacctccaggattatttctctgtcagccctgccacatatcactaatgacttgaacttgggcatctggctccctttggtttgggggtctgcctgaggtcccaccccactaaagggctccccaggcctgggatctgacaccatcaccagtaggagacctcagtgttttgggtctaggtgagagcaggcccctctccccacacctcgccccacagagctctgttcttagcctcctgtgctgcgtgtccatcatcagctgaccaagacacctgaggacacatcttggcacccagaggagcagcagcaacaggctggagggagagggaagcaagaccaagatgaggaggggggaaggctgggttttttggatctcagagattctcctctgtgggaaagaggttgagcttcctggtgtccctcagagtaagcctgaggagtcccagcttagggagtcactattggaggcagagaggcatgcaggcagggtcctaggagcccctgcttctccaggcctcttgcctttgagtctttgtggaatggatagcctcccactaggactgggaggagaataacccaggtcttaaggaccccaaagtcaggatgttgtttgatcttctcaaacatctagttccctgcttgatgggaggatcctaatgaaatacctg

SEQ ID NO: 5025 - DNA, 582 bp, Homo sapiens
  source 1..582: mol_type = unassigned DNA
agccgccacttccgagagcgcctgccgcccctgcgccgccgagccagctgccagaatgccgaactggggaggaggcaagaaatctggggccttggtccactctgagtgaggccaccatcacccaccacaccctgcccactcctgcgcttttcatcgccattccattcccagcagctttggagacctccaggattatttctctgtcagccctgccacatatcactaatgacttgaacttgggcatctggctccctttggtttgggggtctgcctgaggtcccaccccactaaagggctccccaggcctgggatctgacaccatcaccagtaggagacctcagtgttttgggtctaggtgagagcaggcccctctccccacacctcgccccacagagctctgttcttagcctcctgtgctgcgtgtccatcatcagctgaccaagacacctgaggacacatcttggcacccagaggagcagcagcaacaggctggagggagagggaagcaagaccaagatgaggaggggggaaggctgggttttttggatctcagagattctcctctgtgggaaagaggttgag

SEQ ID NO: 5026 - DNA, 1149 bp, Homo sapiens
  source 1..1149: mol_type = unassigned DNA
gtgcgtgacccagggcgacccggctccccgcaaccgcctgcaagtcgggcagaacaatcggcgattctgcgcgccactgacgctcattgtatggcagagagatgagggcatccgtgccaccccctccctcaccctcctgctggggagaaaatgcccgcgggcggggtggggcaaacatctgggcctgaccttggacatctgtgtccctgagcgcagaatgccgaactggggaggaggcaagaaatgtggggtgtgtcagaagacggtttactttgccgaagaggttcagtgcgaaggcaacagcttccataaatcctgcttcctgtgcatggtctgcaagaagaatctggacagtaccactgtggccgtgcatggtgaggagatttactgcaagtcctgctacggcaagaagtatgggcccaaaggctatggctacgggcagggcgcaggcaccctcagcactgacaagggggagtcgctgggtatcaagcacgaggaagcccctggccacaggcccaccaccaaccccaatgcatccaaatttgcccagaagattggtggctccgagcgctgcccccgatgcagccaggcagtctatgctgcggagaaggtgattggtgctgggaagtcctggcataaggcctgctttcgatgtgccaagtgtggcaaaggccttgagtcaaccaccctggcagacaaggatggcgagatttactgcaaaggatgttatgctaaaaacttcgggcccaagggctttggttttgggcaaggagctggggccttggtccactctgagtgaggccaccatcacccaccacaccctgcccactcctgcgcttttcatcgccattccattcccagcagctttggagacctccaggattatttctctgtcagccctgccacatatcactaatgacttgaacttgggcatctggctccctttggtttgggggtctgcctgaggtcccaccccactaaagggctccccaggcctgggatctgacaccatcaccagtaggagacctcagtgttttgggtctaggtgagagcaggcccctctccccacacctcgccccacagagctctgttcttagcctcctgtgctgcgtgtccatcatcagctgaccaagacacctgaggacacat

SEQ ID NO: 5027 - DNA, 568 bp, Homo sapiens
  source 1..568: mol_type = unassigned DNA
agccgccacttccgagagcgcctgccgcccctgcgccgccgagccagctgccagtggtctgcaagaagaatctggacagtaccactgtggccgtgcatggtgaggagatttactgcaagtcctgctacggcaagaagtatgggcccaaaggctatggctacgggcagggcgcaggcaccctcagcactgacaagggggagtcgctgggtatcaagcacgaggaagcccctggccacaggcccaccaccaaccccaatgcatccaaatttgcccagaagattggtggctccgagcgctgcccccgatgcagccaggcagtctatgctgcggagaaggtgattggtgctgggaagtcctggcataaggcctgctttcgatgtgccaagtgtggcaaaggccttgagtcaaccaccctggcagacaaggatggcgagatttactgcaaaggatgttatgctaaaaacttcgggcccaagggctttggttttgggcaaggagctggggccttggtccactctgagtgaggccaccatcacccaccacaccctgcccactcctgcgcttttca

SEQ ID NO: 5028 - DNA, 574 bp, Homo sapiens
  source 1..574: mol_type = unassigned DNA
agccgccacttccgagagcgcctgccgcccctgcgccgccgagccagctgccagaatgccgaactggggaggaggcaagaaatgtggggtgtgtcagaagacggtttactttgccgaagagatttactgcaagtcctgctacggcaagaagtatgggcccaaaggctatggctacgggcagggcgcaggcaccctcagcactgacaagggggagtcgctgggtatcaagcacgaggaagcccctggccacaggcccaccaccaaccccaatgcatccaaatttgcccagaagattggtggctccgagcgctgcccccgatgcagccaggcagtctatgctgcggagaaggtgattggtgctgggaagtcctggcataaggcctgctttcgatgtgccaagtgtggcaaaggccttgagtcaaccaccctggcagacaaggatggcgagatttactgcaaaggatgttatgctaaaaacttcgggcccaagggctttggttttgggcaaggagctggggccttggtccactctgagtgaggccaccatcacccaccacaccctgcccactcctgc

SEQ ID NO: 5029 - DNA, 374 bp, Homo sapiens
  source 1..374: mol_type = unassigned DNA
agccgccacttccgagagcgcctgccgcccctgcgccgccgagccagctgccagaatgccgaactggggaggaggcaagaaatgtggggtgtgtcagaagacggtttactttgccgaagaggttcagtgcgaaggcaacagcttccataaatcctgcttcctgtgcatcctggcataaggcctgctttcgatgtgccaagtgtggcaaaggccttgagtcaaccaccctggcagacaaggatggcgagatttactgcaaaggatgttatgctaaaaacttcgggcccaagggctttggttttgggcaaggagctggggccttggtccactctgagtgaggccaccatcacccaccacaccctgcccactcctgc

SEQ ID NO: 5030 - DNA, 582 bp, Homo sapiens
  source 1..582: mol_type = unassigned DNA
agccgccacttccgagagcgcctgccgcccctgcgccgccgagccagctgccagaagacggtttactttgccgaagaggttcagtgcgaaggcaacagcttccataaatcctgcttcctgtgcatggtctgcaagaagaatctggacagtaccactgtggccgtgcatggtgaggagatttactgcaagtcctgctacggcaagaagtatgggcccaaaggctatggctacgggcagggcgcaggcaccctcagcactgacaagggggagtcgctgggtatcaagcacgaggaagcccctggccacaggcccaccaccaaccccaatgcatccaaatttgcccagaagattggtggctccgagcgctgcccccgatgcagccaggcagtctatgctgcggagaaggtgattggtgctgggaagtcctggcataaggcctgctttcgatgtgccaagtgtggcaaaggccttgagtcaaccaccctggcagacaaggatggcgagatttactgcaaaggatgttatgctaaaaacttcgggcccaagggctttggttttgggcaaggagctggggccttggtc

SEQ ID NO: 5031 - DNA, 1324 bp, Homo sapiens
  source 1..1324: mol_type = unassigned DNA
agccgccacttccgagagcgcctgccgcccctgcgccgccgagccagctgccagaatgccgaactggggaggaggcaagaaatgtggggtgtgtcagaagacggtttactttgccgaagaggttcagtgcgaaggcaacagcttccataaatcctgcttcctgtgcatggtctgcaagaagaatctggacagtaccactgtggccgtgcatggtgaggagatttactgcaagtcctgctacggcaagaagtatgggcccaaaggctatggctacgggcagggcgcaggcaccctcagcactgacaagggggagtcgctgggtatcaagcacgaggaagcccctggccacaggcccaccaccaaccccaatgcatccaaatttgcccagaagattggtggctccgagcgctgcccccgatgcagccaggcagtctatgctgcggagaaggtgattggtgctgggaagggattattttgaggtcacaatgaagatccttgccattgactaaaggatatgaaaacaggagacattaatattattattaagttgggttttttgttctatctcattatgagaatagaaaattattaagaatagctaagaatcactatttccattacttaggcaggctataaggtaaagttagggctgtactaaggagtaggataagagaattttgcattcaagtggaaaaggtagggagaagccccacctttctattgcctcgctcaagaaatgttgagctgggagtacttttgggtgcttatgaatgagcaaagggattcagcttattttggcagggaggtggctaggaaatatgaggagaggtgttggtctaggtgtgattcagtttttctccagcctagagagcttggggtagcagcccctgctttacagaggaggcagcaaaggctgggtgactattgaggttgcaccagcactgacctagacccaggtccccccatttcagctctctggaggagaagccaatgtgcaaggttaggcaaccaggaaatctgaggggatgaatttcctttctcatccaccagcctgggcactgggagtgtctttgcccttaaaaggccttgttttgtcttatctgactgctgcctgcctcttgcttttcctgggttaagcagagctgtctacacatcagcctcttagcctgcccagctgttgatgggaactggctgcggagaagtctgtctgtgcaacgtcccatcactgtgtacaaactcgggcctcactttttttctgggacagctgtttgccctgtgttacagaatgcatgtgaggactagatatttaaacatatgatgcctg

SEQ ID NO: 5032 - DNA, 567 bp, Homo sapiens
  source 1..567: mol_type = unassigned DNA
agccgccacttccgagagcgcctgccgcccctgcgccgccgagccagctgccagaatgccgaactggggaggaggcaagaaatgtggggtgtgtcagaagacggtttactttgccgaagaggttcagtgcgaaggcaacagcttccataaatcctgcttcctgtgcatggtctgcaagaagaatctggacagtaccactgtggccgtgcatggtgaggagatttactgcaagtcctgctacggcaagaagtatgggcccaaaggctatggctacgggcagggcgcaggcaccctcagcactgacaagggggagtcgctgggtatcaagcacgaggaagcccctggccacaggcccaccaccaaccccaatgcatccaaatttgcccagaagattggtggctccgagcgctgcccccgatgcagccaggcagtctatgctgcggagaaggtgattggtgctgggaagggattattttgaggtcacaatgaagatccttgccattgactaaaggatatgaaaacaggagacattaatattattattaagttgggttttttgttctatct

SEQ ID NO: 5033 - DNA, 548 bp, Homo sapiens
  source 1..548: mol_type = unassigned DNA
ctgctggggagaaaatgcccgcgggcggggtggggcaaacatctgggcctgaccttggacatctgtgtccctgagcgcaggtaatgccgaactggggaggaggcaagaaatgtggggtgtgtcagaagacggtttactttgccgaagaggttcagtgcgaaggcaacagcttccataaatcctgcttcctgtgcatggtctgcaagaagaatctggacagtaccactgtggccgtgcatggtgaggagatttactgcaagtcctgctacggcaagaagtatgggcccaaaggctatggctacgggcagggcgcaggcaccctcagcactgacaagggggagtcgctgggtatcaagcacgaggaagcccctggccacaggcccaccaccaaccccaatgcatccaaatttgcccagaagattggtggctccgagcgctgcccccgatgcagccaggcagtctatgctgcggagaaggtgattggtgctgggaagctgtggggccagagaggaattctggagcatcacgtgaggcctgagatagaaaag

SEQ ID NO: 5034 - DNA, 581 bp, Homo sapiens
  source 1..581: mol_type = unassigned DNA
agccgccacttccgagagcgcctgccgcccctgcgccgccgagccagctgccagtggtctgcaagaagaatctggacagtaccactgtggccgtgcatggtgaggagatttactgcaagtcctgctacggcaagaagtatgggcccaaaggctatggctacgggcagggcgcaggcaccctcagcactgacaagggggagtcgctgggtatcaagcacgaggaagcccctggccacaggcccaccaccaaccccaatgcatccaaatttgcccagaagattggtggctccgagcgctgcccccgatgcagccaggcagtctatgctgcggagaaggtgattggtgctgggaaggtaaggtggctgctgggcatgagagggatggggggagatatcttcctgaaatgtggattccagaacttttaaattggtgacctagctctgctcagggcagcctgagcactggggtttaacctcttctctttgtccctgtgggttgcatgtacctgtgctttccagtctccaaggagctcatatcagccatgagcagtaacatccccagcattgatggacaatgggcaa

SEQ ID NO: 5035 - DNA, 758 bp, Homo sapiens
  source 1..758: mol_type = unassigned DNA
cctgccgcccctgcgccgccgagccagctgccagaatgccgaactggggaggaggcaagaaatgtggggtgtgtcagaagacggtttactttgccgaagaggttcagtgcgaaggcaacagcttccataaatcctgcttcctgtgcatggtctgcaagaagaatctggacagtaccactgtggccgtgcatggtgaggagatttactgcaagtcctgctacggcaagaagtatgggcccaaaggctatggctacgggcagggcgcaggcaccctcagcactgacaagggggagtcgctgggtatcaagcacgaggagtgagtaaaagatcccctcccaacctttttcttgagctctctcccccaccctgtattaggcctcatgtgtatttacaaccatttttgggtaagcaatggaaggctcagaaaaccagttatttaaaaggcagtcacagagcagtgtctatgtgtcaggctgctgcaggagctggggatgcagcagggactaaaacaggctgggctcctccctgcaaggagcgtgcattctatatttgtatgagagtcagagctgggaggggccccaagaatcacttagtccaatttcctctttttttgtttttttttgaaagggagtcttgctctgtcacccaggctggagtgcagtggtacaatcttggctcactgcagcctctgcttcttgggctcaagtgatcctcttgcctcaggctcccgagtagctgggagtacaggcatgtgccac

SEQ ID NO: 5036 - DNA, 741 bp, Homo sapiens
  source 1..741: mol_type = unassigned DNA
gcctgccgcccctgcgccgccgagccagctgccagaatgccgaactggggaggaggcaagaaatgtggggtgtgtcagaagacggtttactttgccgaagaggttcagtgcgaaggcaacagcttccataaatcctgcttcctgtgcagtgagtacgccccaggccctattgctgttgccttggacaccctggacgggcctgcccccacaggctgggcctgtcaacaccccagggaactgatcccatgggatgtaaacagcttgacatttggctgaagcgcagctgggcagggaaacacttcagggcctctttgttccgttcagaagcttctttctaagggatgaactggccagagcgggtcggggtggcaggcgttcaggggctgaaagccaagctgtaaagacttggttaagaaaactttccactcagctctctcttctctctctccctgtcatgatttcaccatttcagaggaaaacactttcagccctttgcaccctaattatctcttgttcaaaggcaacagaggccacaacctcatggtgaagctgaatctggaggaagagtggggctcctccttcctcagccccttgcaggctggcctgttcagttcttcacttcccattcccactcagcctgggatgagaggaagagggagtacaaagttccctgatatctactcctaagaagccagagcaaggtttgctccagtcataagcctagatgagtaagaaatcaga

SEQ ID NO: 5037 - DNA, 1952 bp, Homo sapiens
  source 1..1952: mol_type = unassigned DNA
ggagggcagcaccgccgggcttcgcgccatgacatcagccctggagtggtgcagtgtgcaaagcccactggttggcgtggcccgggacacgccttccgcggagcggaacaaaacggcgcgcaggccgggcgcacccagccgccacttccgagagcgcctgccgcccctgcgccgccgagccagctgccagaatgccgaactggggaggaggcaagaaatgtggggtgtgtcagaagacggtttactttgccgaagaggttcagtgcgaaggcaacagcttccataaatcctgcttcctgtgcatggtctgcaagaagaatctggacagtaccactgtggccgtgcatggtgaggagatttactgcaagtcctgctacggcaagaagtatgggcccaaaggctatggctacgggcagggcgcaggcaccctcagcactgacaagggggagtcgctgggtatcaagcacgaggaagcccctggccacaggcccaccaccaaccccaatgcatccaaatttgcccagaagattggtggctccgagcgctgcccccgatgcagccaggcagtctatgctgcggagaaggtgattggtgctgggaagtcctggcataaggcctgctttcgatgtgccaagtgtggcaaaggccttgagtcaaccaccctggcagacaaggatggcgagatttactgcaaaggatgttatgctaaaaacttcgggcccaagggctttggttttgggcaaggagctggggccttggtccactctgagtgaggccaccatcacccaccacaccctgcccactcctgcgcttttcatcgccattccattcccagcagctttggagacctccaggattatttctctgtcagccctgccacatatcactaatgacttgaacttgggcatctggctccctttggtttgggggtctgcctgaggtcccaccccactaaagggctccccaggcctgggatctgacaccatcaccagtaggagacctcagtgttttgggtctaggtgagagcaggcccctctccccacacctcgccccacagagctctgttcttagcctcctgtgctgcgtgtccatcatcagctgaccaagacacctgaggacacatcttggcacccagaggagcagcagcaacaggctggagggagagggaagcaagaccaagatgaggaggggggaaggctgggttttttggatctcagagattctcctctgtgggaaagaggttgagcttcctggtgtccctcagagtaagcctgaggagtcccagcttagggagtcactattggaggcagagaggcatgcaggcagggtcctaggagcccctgcttctccaggcctcttgcctttgagtctttgtggaatggatagcctcccactaggactgggaggagaataacccaggtcttaaggaccccaaagtcaggatgttgtttgatcttctcaaacatctagttccctgcttgatgggaggatcctaatgaaatacctgaaacatatattggcatttatcaatggctcaaatcttcatttatctctggccttaaccctggctcctgaggctgcggccagcagagcccaggccagggctctgttcttgccacacctgcttgatcctcagatgtggagggaggtaggcactgcctcagtcttcatccaaacacctttccctttgccctgagacctcagaatcttccctttaacccaagaccctgcctcttccactccacccttctccagggacccttagatcacatcactccacccctgccaggccccaggttaggaatagtggtgggaggaaggggaaagggctgggcctcaccgctcccagcaactgaaaggacaacactatctggagccacccactgaaagggctgcaggcatgggctgtacccaagctgatttctcatctggtcaataaagctgtttagacc

SEQ ID NO: 5038 - DNA, 751 bp, Homo sapiens
  source 1..751: mol_type = unassigned DNA
gttcactttggttccagcatcctgtccagcaaagaagcaatcagccaaaatgatacctggaggcttatctgaggccaaacccgccactccagaaatccaggagattgttgataaggttaaaccacagcttgaagaaaaaacaaatgagacttacggaaaattggaagctgtgcagtataaaactcaagttgttgctggaacaaattactacattaaggtacgagcaggtgataataaatatatgcacttgaaagtattcaaaagtcttcccggacaaaatgaggacttggtacttactggataccaggttgacaaaaacaaggatgacgagctgacgggcttttagcagcatgtacccaaagtgttctgattccttcaactggctactgagtcatgatccttgctgataaatataaccatcaataaagaagcattcttttccaaagaaattatttcttcaattatttctcatttattgtattaagcagaaattaccttttctttctcaaaatcagtgttattgctttagagtataaactccatataaattgatggcaattggaaatcttataaaaactagtcaagcctaatgcaactggctaaaggatagtaccaccctcacccccaccataggcaggctggatcgtggactatcaattcaccagcctccttgttccctgtggctgctgataacccaacattccatctctaccctcatacttcaaaattaaatcaagtattttacaaagtg

SEQ ID NO: 5039 - DNA, 821 bp, Homo sapiens
  source 1..821: mol_type = unassigned DNA
atcctgtccagcaaagaagcaatcagccaaaatgatacctggaggcttatctgaggccaaacccgccactccagaaatccaggagattgttgataaggttaaaccacagcttgaagaaaaaacaaatgagacttacggaaaattggaagctgtgcagtataaaactcaagttgttgctggaacaaattactacattaaggttagagttcagcacctactttagcgccaaaagatgtatttctcattttatgtaaaatattccctgatttccctaccacataattccttccttacggttgtcctaaattaagatgcccagcatgattccttccaagtggtggactctcaaatttggtagatgatgtgacaccattttttttcttgtgaattcagaaagttttattacattgattcttgatttctggaaattgtatagaaaaagatttcataacagttcagggcatgctggatttgtggctgtgctgctgcttaggtaaggagggaggatcacgtctcatctgcctgaaggtgtggggctggaccacatggtatcttgaagctgattctacctcaaagctgtatgattctctatgtctaaattaaataaattaaagtaacgactcaaatcattagctgggaaaataatttaaaccttttttgcccttcaattaatataatgtaaatactattttgtaactcaaattagatttaacttgtggcactctaggcatagtttaaaagagtggagtatttaaaatagtttaaaagttaattttatagctctgtcaaaaaattacacaatgcattgatcgagttctaat

SEQ ID NO: 5040 - DNA, 4105 bp, Homo sapiens
  source 1..4105: mol_type = unassigned DNA
gcctcgaagaatccgctatcggctgtctgcacaaccggaatcatgtcgagtttggcggtgagagacccggcaatggatcgatcactgcgttccgtgttcgtggggaacattccatatgaggcaactgaggagcagttaaaggacattttctcggaggttggttctgttgtcagtttccggctggtatacgatagagagacgggaaaacccaagggctatggcttctgcgaataccaagaccaggagaccgcgcttagtgccatgcggaacctcaatgggcgggagttcagtgggagagcgcttcgggtggacaatgctgccagtgaaaagaataaggaggagttaaagagccttgggcctgcagcgcccattattgactcaccctatggggatcccatcgatccagaagatgcccctgaatcgattaccagagcagtagccagtctccccccggagcagatgtttgagctgatgaagcagatgaagctctgtgtccaaaacagccaccaggaagctcgaaacatgttacttcaaaatccacaactggcttatgcactgttgcaggcacaagtagtgatgagaatcatggatccagagattgctctgaaaattctgcatcggaagatacatgtcacaccactgatcccaggcaaatctcagtctgtgtctgtctctggccctggccctggccctggccctgggctctgcccaggacctaatgttctgctgaaccagcagaatcctccagctcctcagcctcagcatttggctagaagacctgtgaaggacattcctcctctgatgcagactcctatccagggtggaattccagctccagggccaataccagctgcagttcccggagctggtcctggttccttaactcctggaggagcaatgcagccccaacttggaatgccaggggttggcccagtgcctttagagcggggacaagtgcagatgtcagatcctagagctcctatacctcgcggacccgtgactcctggtggtctgcctcctcgaggactgttaggagatgctccaaatgacccacgtggagggactttgctttcagtcactggagaagtggagcccagaggttatctgggtccaccccatcagggtccccccatgcatcatgcctctggtcatgacactcgtggcccttcctcacatgagatgaggggagggccattaggagatcccagactgctaattggagagcccagaggccccatgatagatcaaaggggtctacctatggatggtagaggtggtagagattctcgagcgatggagactcgtgccatggaaactgaggtcttagagacacgtgtaatggagaggagaggaatggagacctgtgcgatggaaaccagagggatggaagcaaggggcatggatgcaagaggattggagatgaggggccctgtccccagttcaagaggccctatgactggtggaattcagggtcctggtcccattaatataggggcaggtggccctcctcagggacccagacaggtcccaggcatttcaggggtggggaatcctggagctggtatgcagggtacaggcatacaaggaacaggcatgcagggagcaggcatacaaggaggagggatgcagggggcaggcatacaaggagtcagtatacaaggaggaggtatacaaggaggaggtatacagggggcaagcaagcaaggtggaagccagcctagcagttttagtcctgggcagagccaggtcactccacaggatcaggagaaggcagctttgatcatgcaggttcttcaactgactgcagatcagattgccatgctgccccctgagcaaaggcagagtatcctgattttaaaggaacaaatccagaaatccactggagcgtcttgaaaggttttagaaaatatttggctgtagtctcaaattttattctgtagcatggagaatgggtgcaaaaagctgacttctgtatccccacacttggattagggtttccctcctcctagaacctaatcttattttttgttctttttctttctttctgttttccttttttttttaattgagggtggggggaggagggagtgcgtctgttcactttaagttactttaaaataactctgaacatgattatattatgccaaataagattacaaagaataagcagcaatattgaagcatctacagtatgttaactacattttttaaatgtcgagtaaaacttcgtgaaaactgctcataaagactaaaagttgacctgttaaaacgttaatgtactaagatagttttaagatttttggttgtataacaaaataaaagtttacccaaaagtataagatacattttttggtaaaccatttaaaatacaaaatcctattttggaggcaataggataagcattgtcttagtgttttagaattatttttgaaacagagttaacaggataaggttacacttgtattagaattgtttttttctaaagttatgttacctgaaaaatcaaggagtgcacctgatttactgttgcttcatttatcccatccttcagagaccagcaaggttctgccaggccccaagcatctgagcatgatgattttgctgtgacaattctaagatcaaccaggttacttaagtccgctctgatgaaacccagtctctcaataccttcctatttctcaatagtctttaagccctaaatctgagtcagtaattctctaaaaatccttcccaaaaatcagtgtctagggactggttgatctagatgagttataaatggtatttgacttttcataagtagtggaaggtttcactaagtaaagatctgagtttcttggtatctgacgtttgtatacagatggtgtccatttgctcaaccagacaggagttaacttgtattagaattgttttttctaaagttatgttacctgagaaattaaggactgcacctggtttaatgttgcttcacttatcccaccctacagagaccagcaaggttctgccaggcctcgagcatccaagcatgattttgctgtgacaaatctaaaatcaaccaggctacttaagtctgctctgatgaaacccaataatctctcaataccttcctatttctcaatagtctttaaaccctaaatctgagtcagtaattctcttacatccttcccaaaaatcagtgtctagggactagttgatctggatgagttatacatgatatttgacttttcataagtagtggaaggtttcactaagtaaaactctcagtttcttggtatctggctttcttatacagatggtgtccatttgctccaccagacaggagttaaaaacctttaaagagcatttaacatgccttttagttttcttatttcataatctacttttctatcattaatcatcttaccaggaataatcaaggcccaggtaggtagaagtttttatatagcctgaatactcacttgacttactgctcattttactttttgcatggaatacagccatttagtcctaatatacataccaatgagacaattaaaaattggttggaagatggagcttatcacattgtgctactacgactttattttttcttgaaaataaagccttgaggatgtgaacataaatgttggtatcataaaacaagtagtaataaaagcataaattatcaaatatcaggtgatcttactatggagaagaaaaaccaatatctagttacagatgaaaaaatgtttaatacaaagagctgaaaatgtagaaattgagttatcttccctttgcaaaatttttacactttaaattagtaattctttgtttgcaaggttttcatccctatgctgttgttttctactacctgttttactcttgttcatactgctactttcccatgtttcctatatgcctcccctatattggagaggataactcgcgtttacatatgtgatagttatgcttaatactaattcacagagttggctcgatcattttgagattctagttgctttatctcaaagctttcactgaagggctgtaactgaaaattattaaatgttagtctttagtcaaatctctgcattgtttcatgcagaaaataaagatacaattaaggctg

SEQ ID NO: 5041 - DNA, 3591 bp, Homo sapiens
  source 1..3591: mol_type = unassigned DNA
gctagaatgcactgtctttgaagcattgagcaggccctcaccagacaccaaatctgctggttcctggatcttggacttcccagcctcataactaggcatcacaaatctccgagaggaacgcatccacttcctggcctggtagagcggagagcagaggtgggcccaggagtccaagaacttcccctaaggctgctagtcgcacccatctcttgagcagagacccaagagggcaggacaggaagaatggaagtgagatttggccccggtcatgttttccaaagtgctgacatcaggaaaataatagaagttaacgcagatatggggctgccactgaggagagagaagactgaaagaagcatatagataaaagtttcagttacctgaggtcaaccttggtctgaaattagattatctgagtaggctgaaccatcggtgaaaaggaggccaagcatctcaaaaataggacacgtgagagtatggagccaatgtgacactcaggtgagttagccttatgatccctaagcatgcagtccttggaccagatgcatcaggatcttctggtaagtgtgctaaaatataggctactgagacccaccctatgtctgtcaaatcagaatattctaaggaagcaggtcccagggaatatatattttaaagctccctaaatacacttcatgggctgccagatttgggaatcgcaggattaggtagctacctaaatgaagacacttaaatgtgccaaaagcttctctttcacccatccatttatccatctattcacccatccatcaaccaaacatgtgccagtatctggtatttgcttcatgacctgctactgctgtggtgggtgcaaagataaatgatcaatgttctcaaagagtcaatagtctaagagaatggatgaatgaagtataaataataaaagatgtgctatgaagtacgataggggtccagaaaagtatatacttattccagattgtggcagaagactctggagaggtttcgttttatataatggcatgaattccccttcagatccatctctaaatcaagcttcacctacttctgactgtttgtgttagataccaatcctatggatttctatagttttctggaattactttttacacactacagtagagttatgtggctgcttccatgttttacttagaagctgagagcttgataaaagtgaaggctgcatcttaatcatcaccttttcccccacctcctagctagggtctggctctgcctaagcagctgccattggtgctcaataaacattgaagaagttgggttgttgcactggttatgcaaagaaagggacacagtgggtgtaagcgtggggcggggagcaaagctgggaccaatcatggaacacctagaatttgaatcaaatttgggctttagtttttaggcaatgagcctaagacaattttggaagcatcctttgttcacaaaaaagttagaaatggtgagaactagggcagtctatcacaaagtgtgggagaggtaattttatatgtaaactattataaatcacatttgagttatgaagtgagacaattattccctttgcagtttcatttcattctgtctaattatttcagggagacattctgaattgggtgctagtattttaacacttctctaacactttctctttttaaattttgtttatttttaattgacaaataataattgtgtatatttatggggtacattgggcatggagggtgggttattctgtgatgtcttgacctgtgtgtacattgtaacacttctctaatactttctaatccagccatccccaacctttttggcaccaggaaccagttttgtggaagacgatttttccacagatggttgggggatgattttgggatggaactattccacctcagatcatcaggcattagattctcataagaagcatgcaacgtagatccctcacatatacagttcacaatagggttcatggttctatgagaatctaatgctgccactgatctaacaggaggcagagctcagctgataatgctttttcacctgctactgacttcctgctgtgttgcccagttcctaacaggccatagactggtaccagtccatagcctggggcttgaggacccctgctctatgatgtctatacaacaataaaattgcctaatgatacatttctcagaatgtatacccatcattaagtgacacatggctgcttgtgtatttttatatatagctaaatgtggctagattagatgtgatatctctttggatgcagggataggtgggcaagtttctaaaacacgaaactaactgtgtcttttctctgcttaagaaccttccatgactccctgttgttcataaccggataaattctaagctgcctaactcagaattctagcttagagatgtctacgcctggctgctcccaacagttagtctcatgtcctgtctcaaacatggggcttcagtaagaatgaaatttccaaggagaattttatattctgcatgcctttaaaggctcaagcctggagaccccccttcttgcctctcttacccttttcaccagggcaccctctattcatccttccagagccttctctgggaagtcctttcccaaagcccacttcccagcctaagcttagtgctatttctgtagatacccagaaacacatcaactatatgtacagtttaccctagtatgtcaaagttatagttactgccttaggagggattttgagcttttcatctttattactcgggcttctgctactgtgtcaagcaggtagttgacactcaacaaatgtttgtttagcctaactcagcagaacacatggagtgtgttcacatggagtaacctgattttgcttagtctgcaacatttcttgcatgcatcccctgcttgcagtctcaattacagtcatcctgtttcagttttcttaacttgtcactcccttcctctgataacttttgccatacctctgtataacatggcctactttttgaaaaagatttttttacattcacctacatttgtctcaaatttttttttaaaagaaactttgtattactaccgtcattgaaaaccttcatcacttggcacaaaagaaagtttaaaaaatacaacaaaagacattctactaaattctggctagacaaccttgcctgctctagtagatgcactgagaccattaatgaatctttcatcccaccttgtgtcatattctttgccacatgactttgggtctccctcactactaggcaagttcctgtctccatctcttgattctgaattcagccataatacttgctctccccaatgttgttttagcagatttgacacatacagaagcgtgaaaaactcttgtgtgactgggatagctcctctgcaatgagaacatgcctgggataatgtactgaaaagatgtgagaaatacatgaagcagagtccagtcatcccagccaagaaccagctgtgaatgtaaccgcatgactttgaggcaagtccagaccaagaacaaagaaccactggtcttaaagacagacctgcagattcctgagctaaataaaagtttattgttgaaaggc

SEQ ID NO: 5042 - DNA, 399 bp, Homo sapiens
  source 1..399: mol_type = unassigned DNA
gtaacttgctcctcaccttccaccgtgattgtgaggcctccccagccatgtggaactattatctgagtaggctgaaccatcggtgaaaaggaggccaagcatctcaaaaataggacacgtgagagtatggagccaatgtgacactcagatttgacacatacagaagcgtgaaaaactcttgtgtgactgggatagctcctctgcaatgagaacatgcctgggataatgtactgaaaagatgtgagaaatacatgaagcagagtccagtcatcccagccaagaaccagctgtgaatgtaaccgcatgactttgaggcaagtccagaccaagaacaaagaaccactggtcttaaagacagacctgcagattcctgagctaaataaaagtttattgttgaaa

SEQ ID NO: 5043 - DNA, 425 bp, Homo sapiens
  source 1..425: mol_type = unassigned DNA
catcaggaaaataatagaagttaacgcagatatggggctgccactgaggagagagaagactgaaagaagcatatagataaaagattatctgagtaggctgaaccatcggtgaaaaggaggccaagcatctcaaaaataggacacgtgagagtatggagccaatgtgacactcagatttgacacatacagaagcgtgaaaaactcttgtgtgactgggatagctcctctgcaatgagaacatgcctgggataatgtactgaaaagatgtgagaaatacatgaagcagagtccagtcatcccagccaagaaccagctgtgaatgtaaccgcatgactttgaggcaagtccagaccaagaacaaagaaccactggtcttaaagacagacctgcagattcctgagctaaataaaagtttattgttgaaa

SEQ ID NO: 5044 - DNA, 463 bp, Homo sapiens
  source 1..463: mol_type = unassigned DNA
accccatgactggtatagaactgaaagtaaatcaagctggacttatgaaggattcctctctccattcgtggatgaatttgagtggcactggaacaagtttcagttacctgaggtcaaccttggtctgaaattagattatctgagtaggctgaaccatcggtgaaaaggaggccaagcatctcaaaaataggacacgtgagagtatggagccaatgtgacactcagatttgacacatacagaagcgtgaaaaactcttgtgtgactgggatagctcctctgcaatgagaacatgcctgggataatgtactgaaaagatgtgagaaatacatgaagcagagtccagtcatcccagccaagaaccagctgtgaatgtaaccgcatgactttgaggcaagtccagaccaagaacaaagaaccactggtcttaaagacagacctgcagattcctgagctaaataaaag

SEQ ID NO: 5045 - DNA, 772 bp, Homo sapiens
  source 1..772: mol_type = unassigned DNA
ctttagtgcgctcgccgtcggctctacctgcgtgctttagctccttctcgcctgatccttctgtctctcccaaccccggacacccggcttcgactggttatatcttcggtgttcttttcctctcttcttctttcgcggttcagcatgcaggaaaaagacgcctcctcacaaggtttcctgccacacttccaacatttcgccacgcaggcgatccatgtgggccaggatccagagcaatggacctccagggctgtagtgccccccatctcactgtccaccacgttcaagcaaggggcgcctggccagcactcgggttttgaatatagccgttctggaaatcccactaggaattgccttgaaaaagcagtggcagcactggatggggctaagtactgtacaaacaggtacttcaggcaagtggcatctgaatttggattaaagatttcttttgttgattgttccaaaatcaaattactagaggcagcaattacaccagaaaccaagcttgtttggatcgaaacccccacaaaccccacccagaaggtgattgacattgaaggctgtgcacatattgtccataagcatggagacattattttggtcgtggataacacttttatgtcaccatatttccagcgccctttggctctgggagctgatatttctatgtattctgcaacaaaatacatgaatggccacagtgatgttgtaatgggcctggtgtctgttaattgtgaaagccttcataatagacttcgtttcttgcaaaact

SEQ ID NO: 5046 - DNA, 1805 bp, Homo sapiens
  source 1..1805: mol_type = unassigned DNA
ctttagtgcgctcgccgtcggctctacctgcgtgctttagctccttctcgcctgatccttctgtctctcccaaccccggacacccggcttcgactggttatatcttcggtgttcttttcctctcttcttctttcgcggttcagcatgcaggaaaaagacgcctcctcacaaggtttcctgccacacttccaacatttcgccacgcaggcgatccatgtgggccaggatccagagcaatggacctccagggctgtagtgccccccatctcactgtccaccacgttcaagcaaggggcgcctggccagcactcgggttttgaatatagccgttctggaaatcccactaggaattgccttgaaaaagcagtggcagcactggatggggctaagtactgtttggcctttgcttcaggtttagcagccactgtaactattacccatcttttaaaagcaggagaccaaattatttgtatggatgatgtgtatggaggtacaaacaggtacttcaggcaagtggcatctgaatttggattaaagatttcttttgttgattgttccaaaatcaaattactagaggcagcaattacaccagaaaccaagcttgtttggatcgaaacccccacaaaccccacccagaaggtgattgacattgaaggctgtgcacatattgtccataagcatggagacattattttggtcgtggataacacttttatgtcaccatatttccagcgccctttggctctgggagctgatatttctatgtattctgcaacaaaatacatgaatggccacagtgatgttgtaatgggcctggtgtctgttaattgtgaaagccttcataatagacttcgtttcttgcaaaactctcttggagcagttccatctcctattgattgttacctctgcaatcgaggtctgaagactctacatgtccgaatggaaaagcatttcaaaaacggaatggcagttgcccagttcctggaatctaatccttgggtagaaaaggttatttatcctgggctgccctctcatccacagcatgagttggtgaagcgtcagtgtacaggttgtacagggatggtcaccttttatattaagggcactcttcagcatgctgagattttcctcaagaacctaaagctatttactctggccgagagcttgggaggattcgaaagccttgctgagcttccggcaatcatgactcatgcatcagttcttaagaatgacagagatgtccttggaattagtgacacactgattcgactttctgtgggcttagaggatgaggaagacctactggaagatctagatcaagctttgaaggcagcacaccctccaagtggaagtcacagctagtattccagagctgctattagaagctgcttcctgtgaagatcaaatcttcctgagtaattaaatggaccaacaatgagcctttgcaaaattttcaagcggaaattttaaggcacctcattatctttcataactgtaattttcttagggatcatctctgttaaaaagttttctgtatgtcatgttataattacaggtcaattctgttaatatctttttgttaattttgctctatgtttgcctctgaaggaggtgagatttgtgctactttgggagattatgttcttttttcatgtctaagatttattttgatcatgtttataatataatggtaattcatttttgatgttttgtgaagaatttaaatttaaacgaatgttcttaaatcaagtgtgatttttttgcatatcattgaaaagaacattaaaagcaatggtttacactta

SEQ ID NO: 5047 - DNA, 1196 bp, Homo sapiens
  source 1..1196: mol_type = unassigned DNA
ttcttttcctctcttcttctttcgcggttcagcatgcaggaaaaagacgcctcctcacaaggtttcctgccacacttccaacatttcgccacgcaggcgatccatgtgggccaggatccagagcaatggacctccagggctgtagtgccccccatctcactgtccaccacgttcaagcaaggggcgcctggccagcactcgggttttgaatatagccgttctggaaatcccactaggaattgccttgaaaaagcagtggcagcactggatggggctaagtactgtttggcctttgcttcaggtttagcagccactgtaactattacccatcttttaaaagcaggagaccaaattatttgtatggatgatgtgtatggaggtacaaacaggtacttcaggcaagtggcatctgaatttggattaaagatttcttttgttgattgttccaaaatcaaattactagaggcagcaattacaccagaaaccaagcgccctttggctctgggagctgatatttctatgtattctgcaacaaaatacatgaatggccacagtgatgttgtaatgggcctggtgtctgttaattgtgaaagccttcataatagacttcgtttcttgcaaaactctcttggagcagttccatctcctattgattgttacctctgcaatcgaggtctgaagactctacatgtccgaatggaaaagcatttcaaaaacggaatggcagttgcccagttcctggaatctaatccttgggtagaaaaggttatttatcctgggctgccctctcatccacagcatgagttggtgaagcgtcagtgtacaggttgtacagggatggtcaccttttatattaagggcactcttcagcatgctgagattttcctcaagaacctaaagctatttactctggccgagagcttgggaggattcgaaagccttgctgagcttccggcaatcatgactcatgcatcagttcttaagaatgacagagatgtccttggaattagtgacacactgattcgactttctgtgggcttagaggatgaggaagacctactggaagatctagatcaagctttgaaggcagcacaccctccaagtggaagtcacagctagtattccagagctgctattagaagctgcttcctgtgaagatcaaatcttcctgagtaattaaatggaccaacaatgag

SEQ ID NO: 5048 - DNA, 598 bp, Homo sapiens
  source 1..598: mol_type = unassigned DNA
gaagtgatactcctgcttcagccttccaggtagctgggattacaggtgcgtgccaccatgctcagctaatttttgtatttttagtagagatggggtttcactagttggccaggctggtctcgaactcctgacctcggtgatccgcctgacttggcctcccaaagtgctgggattacaggcatgagccactgtgcctggcctaaaaacatttatttttagattttagtatttttattttactagaaaatctaaattcatgttttctttgctatagctatttactctggccgagagcttgggaggattcgaaagccttgctgagcttccggcaatcatgactcatgcatcagttcttaagaatgacagagatgtccttggaattagtgacacactgattcgactttctgtgggcttagaggatgaggaagacctactggaagatctagatcaagctttgaaggcagcacaccctccaagtggaagtcacagctagtattccagagctgctattagaagctgcttcctgtgaagatcaaatcttcctgagtaattaaatggaccaacaatgagcctttgcaaaattttcaagcggaaattt

SEQ ID NO: 5049 - DNA, 2044 bp, Homo sapiens
  source 1..2044: mol_type = unassigned DNA
tcgtgagactgcagacccgctaataaaatccaccccaacaatcgctgtgtgccgctttagtgcgctcgccgtcggctctacctgcgtgctttagctccttctcgcctgatccttctgtctctcccaaccccggacacccggcttcgactggttatatcttcggtgttcttttcctctcttcttctttcgcggttcagcatgcaggaaaaagacgcctcctcacaaggtttcctgccacacttccaacatttcgccacgcaggcgatccatgtgggccaggatccagagcaatggacctccagggctgtagtgccccccatctcactgtccaccacgttcaagcaaggggcgcctggccagcactcgggttttgaatatagccgttctggaaatcccactaggaattgccttgaaaaagcagtggcagcactggatggggctaagtactgtacaaacaggtacttcaggcaagtggcatctgaatttggattaaagatttcttttgttgattgttccaaaatcaaattactagaggcagcaattacaccagaaaccaagcttgtttggatcgaaacccccacaaaccccacccagaaggtgattgacattgaaggctgtgcacatattgtccataagcatggagacattattttggtcgtggataacacttttatgtcaccatatttccagcgccctttggctctgggagctgatatttctatgtattctgcaacaaaatacatgaatggccacagtgatgttgtaatgggcctggtgtctgttaattgtgaaagccttcataatagacttcgtttcttgcaaaactctcttggagcagttccatctcctattgattgttacctctgcaatcgaggtctgaagactctacatgtccgaatggaaaagcatttcaaaaacggaatggcagttgcccagttcctggaatctaatccttgggtagaaaaggttatttatcctgggctgccctctcatccacagcatgagttggtgaagcgtcagtgtacaggttgtacagggatggtcaccttttatattaagggcactcttcagcatgctgagattttcctcaagaacctaaagctatttactctggccgagagcttgggaggattcgaaagccttgctgagcttccggcaatcatgactcatgcatcagttcttaagaatgacagagatgtccttggaattagtgacacactgattcgactttctgtgggcttagaggatgaggaagacctactggaagatctagatcaagctttgaaggcagcacaccctccaagtggaagtcacagctagtattccagagctgctattagaagctgcttcctgtgaagatcaaatcttcctgagtaattaaatggaccaacaatgagcctttgcaaaattttcaagcggaaattttaaggcacctcattatctttcataactgtaattttcttagggatcatctctgttaaaaagttttctgtatgtcatgttataattacaggtcaattctgttaatatctttttgttaattttgctctatgtttgcctctgaaggaggtgagatttgtgctactttgggagattatgttcttttttcatgtctaagatttattttgatcatgtttataatataatggtaattcatttttgatgttttgtgaagaatttaaatttaaacgaatgttcttaaatcaagtgtgatttttttgcatatcattgaaaagaacattaaaagcaatggtttacacttagttaccataagccgaaaatcaaatacttgaaaagtttactgtgaaattctactgatttaagactatacttaatatttttaaaaaaataaatcagctgggcgcggtggctcacgcatgtaatgccagcacttttggaggataaggcgggcggatcacgaggtcaggagattgagaccatcctggctagcgcagtgaaacccccatctctactaaaaatgcaaaaaaaattagacggacgtggtggcgggtgcctgtagtcccagctacttgggaggctgagg

SEQ ID NO: 5050 - DNA, 10675 bp, Homo sapiens
  source 1..10675: mol_type = unassigned DNA
caacgctcagcgaaattgactgccccactgtcatctgcctctcaatttggtactctgtaactctgtgaccaccaagaagcctttttccgtcccccacaaagctctttttggaaaattccctacgggagctgaattttaagcccatttactttataggaagaaacagaaaggcagcatgtcagctgaaacaccaatcacattgaatatcgatcctcaggatctgcaggtccaaacattcaccgtggagaagctactggagcctctcataatccaggttaccacacttgtaaactgtccccagaacccttccagcaggaaaaaaggacgttcgaaaagagccagtgtccttctagcttctgtggaggaagcaacttggaatttattagacaagggagagaagattgcccaggaagctacagttttaaaggatgagcttacggcttcacttgaggaagttcgcaaagaaagtgaagctctgaaagtatcagctgagagatttacagatgacccctgttttctcccaaaaagggaggctgtggttcaagctgcccgtgccttgctggctgcggtgacgagactccttatccttgcggacatgattgatgtcatgtgcctcttgcaacatgtgtcagcttttcaaaggacatttgagtctctcaaaaatgttgccaacaaatctgacctccagaaaacctaccagaagcttgggaaggagctggaaaatttggattatttagccttcaaacgtcagcaggacttaaaatctccaaatcagagagatgaaattgcaggagcccgagcttcactgaaggagaactctcccctcttgcattcaatttgttcagcttgtttggagcattctgatgttgcttccctcaaagcaagcaaggacacagtttgtgaagaaattcagaatgctctcaatgtaatttcaaatgcttcacaagggatccagaatatgacaaccccaccagaacctcaggcagcaaccctgggaagtgcccttgatgagctggagaatttaattgtcctgaatccactcacagtaactgaggaggaaatacgaccatcactagagaaacgccttgaagccattatcagtggggctgctctgctggcggattcttcatgtacgagggacttacaccgagagcggattatcgcagaatgcaacgccattcgccaggctcttcaggatctgctttcagagtacatgaacaacgctggaaaaaaagaaaggagtaataccctgaatattgctttagacaacatgtgtaagaagacaagagaccttcgcagacagctccgcaaggctattatagatcatgtgtcagactctttcctggatacgacagtccctcttttggttctcattgaagctgctaagaatggccgggaaaaggaaataaaagaatatgctgcgatatttcatgaacacaccagcaggcttgtagaggtggcaaatcttgcttgttccatgtcaacaaatgaagatggaattaaaattgtcaaaattgcagccaatcatttggaaaccttgtgtccacagattattaatgctgcacttgctttggctgcaagacccaaaagtcaagcggtcaaaaacaccatggaaatgtacaagcgtacatgggagaatcatatacatgtcctcactgaagccgtagatgacattacaagcattgatgacttccttgctgtatctgaaagccatatcttggaagatgtcaacaagtgtatcatagccttaagagaccaggatgctgataatttagaccgtgctgcgggtgctatcagaggccgggcagcaagagttgctcacatcgtcacgggtgaaatggacagttacgagccaggggcttacacggaaggtgtaatgagaaatgttaacttccttacaagtactgtaattcctgaatttgtaacacaagtgaatgttgccttggaagccttaagcaaaagctcattgaatgtgttggatgataatcaatttgtggacatctcaaagaagatctatgatacaattcatgatatcagatgttcagtcatgatgattcggaccccagaggaactggaggatgtttctgaccttgaagaggaacacgaggtccgcagtcacaccagcattcagaccgaagggaaaactgatagggctaagatgactcaactgcctgaggcagaaaaagaaaagattgctgagcaagttgctgatttcaagaaagtaaagagtaagctggatgctgagattgagatatgggatgatacaagcaacgacatcattgttctggccaagaacatgtgtatgatcatgatggagatgacagacttcactaggggcaaaggaccactaaagcatacaactgatgtgatctatgcagcgaaaatgatatcagaatcaggatcaaggatggatgtccttgctcggcagattgctaatcagtgcccagatccatcttgtaaacaggacttgttggcctacctggaacagattaagttctactcccaccaactgaaaatctgcagtcaagttaaagctgagatccagaacctgggaggagagctcatcatgtcagctttggacagtgtcacatccctgatccaagcagccaaaaatttaatgaatgctgtagtgcaaacagtgaaaatgtcttacattgcctcaaccaagatcatccgaatccagagtcctgctgggccccggcacccagttgtgatgtggagaatgaaggctcctgcaaaaaaacccttgattaaaagagagaagccagaggaaacgtgtgcagctgtcagacgaggctcagcaaagaaaaaaatccatccattgcaagtcatgagtgaatttagaggaagacaaatctactgaaaccactattctacatatagtgcctatatgacaaaatcctgcctaaccacactgctttattttacacttaagaagttctgtaatttcactaagttttggtgtttaactcacaaataacataaaatattgggcgctaaatcaacaaaagcaatatatatttgggatcatatcactgtcatttctgtatggtcagcacctaatagttaaggaatatttgcttgttgaatgaatgaaattatcacgtgtcattcagcgtttcccatcatagagattatctactattcgttaccaaataaacacaggagaggccagagagtcctgtttatctgtaatacttcatgtacacttatcatccttatcttgaattaaaacactaacatgagctcctaacttggttttttaatagaaacaaaagacttttataaaatattttcccatttaatctccatgctttctttatctgatctaacctggcacctaaccaggcagaaatgtatgattcctgccatagcaaaaaaaccaccttttaatctctagatagctgtactcattgtcaacttattaggctaatatccattataaactaatcaaatttgaatagttaggctacttgctggattttgaaggtcaaccttgtttattaataaaatgctttcttaacattataaaggttacaatgagttctgatgccacatactcaccttttgggtttccaatgtgttagagagttctgtacttttgagtgttaggcctatccgaatacatatgtgaaagaagagttatcacccattgggaaaatgagacaacaaactatatcccaaagtgagttatattaataataacagaagtgtaagttctgtatgaccctatttttacaaacataaaaatacatttttatcagcttgcaattgtaattaaaaggaaaatggcagtttgaaaaatcttttgacgttgagtaaaatataactgcatgaactgtaccattgaactatgaagcagttaatggcaatgaagctggagtgattttaataacgttcttttaaataaaagtcactggggtcattttacaactccagtcactgtgttcattcctagttgagttcataatggacttcataatagtcttagagtctagtgtacctctctctgtcattctctctctctttttctctcccctgatgacctgcctctctctgtctttcaaaaatgtccttaacagaaactctttggaggccataagttttgttttcattttttctcattcatagagttctgattcacagactttaaaaaacattttctattctacattatcataatagtattatattgtacctttttacttctaaaacattgccattgatgagaggcgtctcagcaacgatgtaaccttagattgatgagaaaaaaatttacacatacaataccagttgatattaggagaaccagtttgggtaaaaggatgcatgaaacatagaaaagcataaagattgacagtacgatatgtgtggaatcttaagcataatggtatgggaaaagaaggatctatttaataggtcattattaattatgcaggaaatgttaaatttcttgtaatgaattatttcaatcttccaagtagctggattgcctgagctcagtgtaaaacttcctaggaggtgaaggcaataaactcctccctgttttgcaccatagactggcctacaataactattctgaacagaatgcactgcccagaagaaaaggcagtgaagaagggaattagggaattcagatgactctgtttttcagaattatctagatgattgaggcaaatagagattttcttttattgaaatgctgccatcattttctgctctaagtgtagatgttgcacgagtgacatctgtggtatatccttcttccagatagaagtataaatttataatttagtggggagaggaattttcttttaatcaccaaactaccagctgtatagaaaatttttttgaaatcaccaaactagcagttgtgtatcttagctcctaaagccacattcacaagaatcataagcatctcatttagaaaatctaatgtccaccggacccaacatcatctttccacatgttggagtttagaacatgcagtattggacaccaaaagaacagaaataacttgaaattatacaattaccaaataacctccatctctttgataaaaatgactttttacccaaagtgagatgtgaacaagttctcctctttaacccaggcagattttcagcttagctcaaagcaaactataattaaataaaacaataaaaattttaactcaatgaatatcctaggagttaatctgctgtggtaatcgatagtgacataaaaacaagatgcatagagctgaaaaaggcatctgtccacctgagtgaattcctgtagtaggcagcatttcaagatttagtttgattcaaacctgctgataaaacaaatgcttatatgcaagaaaaactagcagcaagatatgaataaatctccccattatgttaaaaactaatcagcatgacacatttatatttaggtatttcttctgcagaggattgccagaaatttcttaatgagagtgataatttggtgatccacctatgtaccttttgatgtctcatcacagagattagtgcttcctctgataatacatttgcttgatcctgctaataagaactcacctttctttttaacgaaatcaatttgtgttaatttacatagggaaaaacgttccttgagagggaggagaggggtgtttaccacccacaggagcagttccatccctggttacccaccagtatccctgccagatgttagactggaattagaatgaaaatttaaaaaaaaacgaaataataatccactaaatggccttctaattagagaaatttgaagatttctatcaaatataaaaagtgagaaatagaaatcattccctttaatttatgacaaattaaaattattgaagtaaaatgtttctaagtcagtttctggatagttcttgaatgagtcaagaaaaaactcaaacactaaatttctaagctaatttgttcattattcctttctgtttattatttattatatgagtgcaaattgcaaatgtattagaaaagacaatatagccttcacattcacaagtgtgccttctggcctttgaaatcttttaacataagatcaatataacatatttgttccccataaaaatctcttatgtacagggaataaggtcctccatagctacacagagacacccattcttgcagtctggcattcttaacacctttagcttcaaaggcagtcggtttcaatttcaagctaaaattgtgaatatacaattaagtgcgcaacttgggccttcagaccaaataattaatgctcctcaaattaaataatgagtggctgaaaagcctaatgtgtaacaacagagtaagtgacttcaacggcttcctgaaccttcattttgagggtgttctcatctcacccacctctgggctaggtatcctctgttaattgctaacaatttcctaccaaaatagtgcaatcaggactgcccatcacagcaaattactccaattaatgccctttcctcttctgtgaaccaaaaatatctctctcctgtctctcatctctatcccaggtataaattgactaataaattttacagagttttagtcaaaattatgaattttaatttccagcaacattattcctttagtctttctattccccaaaacattcttaaattttggtatcaaatgttcatttctgtcctagagattgtggttcccatggctacagatttttgtatagtggtagtatgagtggaataagatctgagacttttcctggtgatatccaccattctcttgtgaactcattgcagaataaacagcctctttcactttcattgtaagtagttctttaggttggcaaagcaggcaccagaatctgaatttgaatgaaatctgtactttcttttgttggcctattttttgccaagacagcctgcctattgtatatttaggaatcaaatattcattttttctgtttgtaaagccagaaatatttcagttaaaaagaatataattttatattattttaataattctttttaagtaaagtaggaaaatttctgccacctgagatgttactgtttttatttatatgaaaattccatttttttctttatgactcttttcccataccattatgatatgttcagcattagtattttccattttaccactaaacaaataagccaggactaataacaatagcagtttgagagtttttattttggcattttggttttaattaggaaagaaaacatggatgctattaaaactagttgtagttaaaaatgttttgaatgaggctactaacgctatcttagtcatctcaaagagaaagagaagaagtaaaattttaaatacctttttggcatttttaaccaattcatatgaacaaaaacatatattctattaaagcaaaataaagaatagtttaaaacactagtcttcttgcatgtgaatattttccccctaacagacaagatagaatccatttctggacactctaaaagaaagtaatgttaattgagagagctgtctccaaatggaactcaacctgaccagaatcccatccgcaggcaagagatgggctgtggggccgaccataagttttattctgagacgagatgctttatggctgctggctgcattatggcatctagcagtccccactggtttgtgggaacaaaacacatggattgatattcaatatgagtttggtaagttggagaaaaatggagacgatacggagtagtctaaaggcacaacaaataagaaggtgccagaggtagggaagggtctgagaggggtagttgcagaagcatttagctttcatagatgaggggagagttttttggttttatgaagattaggcagccctcctgaggaaagtattaaggatagaatgagacacttgtcttggtggtttggtgaagtcgtgtcgaaggcaaaaggatgaactacacatattttgagcatgatttagtaatattgtttgcaagttgagaaacagaaattcagccattctcctgactgatggtaggtgaaattcttcccaatattagagccaatctgggttaccatacgttcatatatttaacagctatttgttaaacaactgtgatgttccaggcactgttctaggttcttaggatacaccatataacaaaacaaatagtgatccttgccctcatgtgccagctctgtgttaaatgctaactattatcttattcaatcctccaaataaccctataggatatatatcattccacagacaaggaagctgagggttaaatgggataagaatcttgctcaaagtctcactggctttaaaatattaatatatattttacatcattcaagacagatatataattagctgaatattctcacctctattaactgaatgtagagtgtcaggtacatgggaagtaagttatttacgtgatctgaaataagaggacaacctttgccaaattacttttattaccatggagaagaaagcttcaatgaaatgcctgtttcagcccatcttcagtattggttggttaataccatttgttaacaccaatcctttcctcttttactgctaacatgtgactgtgtttaaaattatagattgcagcagagtgttggccaaggattattgtagtaggataaagtttccctgtatttgaaatttacccaaactgtagcaaatacatctttccttctttatggaggtcacacgtgtgcatagtatgtgcctgaatacaggtaaactttgtgttttaaaattacatggccttttttagagtcgactgaaggctagactcttcttgcccatgttgctggataggctttcaaatctcaggccttggagagttaaatgactttctgatatttcttacggtggagccacataagaaatacacacattcctagtttgagcaatggatgtgtatattggggatcttcacttttatgtatctggtagtcatgatggtgcctattcccaactgtaggaaaggaaagccctcaaggagaaaattctctttcaaaaaggctcagatttctaacaattatgtctaaatgtttcttcaatttagaacatgtacaaaagctacttaatattagcagagtagttcttgtgttttcatttcaaatgaaatattcccagttccaaagtttatttccttggcattttcaagaaggatggttatttttagttctggttatttggtgttggaggtctgtgacacttccttatacatttaaagccccctttgaatagttgtatcaatagttcaaaagcctgtagatatcttgcttttctattctgacagcccagcttctgcagactcaggccaaccttaggtatgtcacatcagttccccatctgtgtaaattacctgaacctctctgtggtattcactgagagttgagcttctactaagggatttccttgacctgggcttttaacaccagatttgtagtggagtgtttattagtaaagcaaaggagtaagtcagagatgctagcccctgctctcagttaaacagaactatcctccttcctgaatatttaaacataaaattaattttaaactactataaaaatcatgttccattgcttgccaaatcttataccattataatgctgtatttttacatgttagtatacattgtgtccatagggatataaatatgagaatttcagcaactgtcttgcagggttaagatgtgctatttgttgattttgcaaatttttctcatgtggtacagtccctccaaagaaaatttccttagacctaaatggtagcataataatttctcctccatatccgtgactaacaagttcctgaaaacagaagtagacatattttatgcccaatttagtacctaataattgaggcttaaaacaaaattttcttgggcaagttgggtgattaaatatgaattaaaacttctagagaaagatttccagatgcccctgttttccattttgattatggttttagtttcatagcaacttgggggaaaaaaatcatttactttatgtcgtattacaacaacaactttgacagcttaaatgtagtgacctctctgaaggtaatatgcacattataatttaggatgaaagcagatttaaactaagactttctgagatgaaataaaagtaaccaattcataatagtcatgtttattgcagcaatatcttgggaacttaagtttagtggcgtttgaggtgtttctgactatcttgcttgttcatttcaccctgctctgcagagacagaatatgattgaatgaactgcccattatattaatgaccagttcaaagcagttttgtgctttggctatagataaaatttggcaaaaatactgtaggcctttctggtccatatttatccttaaagtatttttgccaatcaataaaaatgaaatatttatccagaaatagaaaaagctctttcctatgacattgacatagaagcccaaatactccttgtttgagaccctgcatgtcttttgtgtttaactgaatcaatgattttttttagttgtgctcttaattgcattatttcacatatgtaacactgggtttgttttggttatatagtattattttactttattctaatttcaactcatgtcactctgtagctcattaagaatttgttcaactgaaaattaaaatgtgtgttaaagcaataaaaatgaaaagattggctatgcatttta

SEQ ID NO: 5051 - DNA, 1083 bp, Homo sapiens
  source 1..1083: mol_type = unassigned DNA
aagcaggaaagcttatttataacttgaagggcctcattatctgactgagtagtctgtctcttttttgatagattttcttttccatctttgtggtcagactaatacaccttctgtctacttccaatttactgtaaactgggtcatggaattcaggctaagatgactcaactgcctgaggcagaaaaagaaaagattgctgagcaagttgctgatttcaagaaagtaaagagtaagctggatgctgagattgagatatgggatgatacaagcaacgacatcattgttctggccaagaacatgtgtatgatcatgatggagatgacagacttcactaggggcaaaggaccactaaagcatacaactgatgtgatctatgcagcgaaaatgatatcagaatcaggatcaaggatggatgtccttgctcggcagattgctaatcagtgcccagatccatcttgtaaacaggacttgttggcctacctggaacagattaagttctactcccaccaactgaaaatctgcagtcaagttaaagctgagatccagaacctgggaggagagctcatcatgtcagctttggacagtgtcacatccctgatccaagcagccaaaaatttaatgaatgctgtagtgcaaacagtgaaaatgtcttacattgcctcaaccaagatcatccgaatccagagtcctgctgggccccggcacccagttgtgatgtggagaatgaaggctcctgcaaaaaaacccttgattaaaagagagaagccagaggaaacgtgtgcagctgtcagacgaggctcagcaaagaaaaaaatccatccattgcaagtcatgagtgaatttagaggaagacaaatctactgaaaccactattctacatatagtgcctatatgacaaaatcctgcctaaccacactgctttattttacacttaagaagttctgtaatttcactaagttttggtgtttaactcacaaataacataaaatattgggcgctaaatcaacaaaagcaatatatatttgggatcatatcactgtcatttctgtatggtcagcacctaatagttaaggaatatttgct

SEQ ID NO: 5052 - DNA, 470 bp, Homo sapiens
  source 1..470: mol_type = unassigned DNA
tatcagtggggctgctctgctggcggattcttcatgtacgagggacttacaccgagagcggattatcgcagaatgcaacgccattcgccaggctcttcaggatctgctttcagagtacatgaacaacgctggaaaaaaagaaaggagtaataccctgaatattgctttagacaacatgtgtaagaagacaagagaccttcgcagacagctccgcaaggctattatagatcatgtgtcagactctttcctggatacgacagtccctcttttggttctcattgaagctgctaagaatggccgggaaaaggaaataaaagaatatgctgcgatatttcatgaacacaccagcaggcttgtagaggtaagcatgctagaactgtaactcactaaagtccaggagaatgaggctcccattctccatttatggttgaattgtacctaaataaaaacttttgacaccgtgttacaaa

SEQ ID NO: 5053 - DNA, 696 bp, Homo sapiens
  source 1..696: mol_type = unassigned DNA
atcataagccaaattgtgagccatgatagtggcactgaatttctaaatacaagaaattgcttagacaattggtttagtatctgtatatgggcaatactctgtcctgcagtaggcagcatgtcagctgaaacaccaatcacattgaatatcgatcctcaggatctgcaggtccaaacattcaccgtggagaagctactggagcctctcataatccaggttaccacacttgtaaactgtccccagaacccttccagcaggaaaaaaggacgttcgaaaagagccagtgtccttctagcttctgtggaggaagcaacttggaatttattagacaagggagagaagattgcccaggaagctacagttttaaaggatgagcttacggcttcacttgaggaagttcgcaaagaaagtgaagctctgaaagtatcagctgagagatttacagatgacccctgttttctcccaaaaagggaggctgtggttcaagctgcccgtgccttgctggctgcggtgacgagactccttatccttgcggacatgattgatgtcatgtgcctcttgcaacatgtgtcagcttttcaaaggacatttgagtctctcaaaaatgttgccaacaaatctgacctccagaaaacctaccagaagcttgggaaggagctggaaaatttggattatttagccttcaaacgtcagcag

SEQ ID NO: 5054 - DNA, 555 bp, Homo sapiens
  source 1..555: mol_type = unassigned DNA
caggacttaaaatctccaaatcagagagatgaaattgcaggagcccgagcttcactgaaggagaactctcccctcttgcattcaatttgttcagcttgtttggagcattctgatgttgcttccctcaaagcaagcaaggacacagtttgtgaagaaattcagaatgctctcaatgtaatttcaaatgcttcacaagggatccagaatatgacaaccccaccagaacctcaggcagcaaccctgggaagtgcccttgatgagctggagaatttaattgtcctgaatccactcacagtaactgaggaggaaatacgaccatcactagagaaacgccttgaagccattatcagtggggctgctctgctggcggattcttcatgtacgagggacttacaccgagagcggattatcgcagaatgcaacgccattcgccaggctcttcaggatctgctttcagagtacatgaacaacctctgtaatcaaaagtctgacctgggcctcactggagtaaaaatcaaattgttggaggaatgcattattttctggagtctctag

SEQ ID NO: 5055 - DNA, 2177 bp, Homo sapiens
  source 1..2177: mol_type = unassigned DNA
agccagtctcctccctcctagggtctggtcttgacgatagcatctcgtgttttggggatgcctttccttaccagattcttctaaagcccagctgcacccacccttaagtgggagataaggcttctgcccgcgggctctgcgttcgtccacccggccccacgtttgctgtggactaaacaggagccactggactagagtacacttgactctcggctctgcggaccaaaaattccaggactaaggaatagcaaggttaggctgaaacagtccacacagggcttgcggtaaacgtcttttcaggagccactcgcccagtgcagtaagtcgtgtacttagttgactcgagcgctccagggagacgcccgaccctactctgcgccgccccggggcaccagctctgcttcctccaggtccactgaggcaggcacgcccagctctgggacagtcagtaaacaagccacgaaccgcgccagggatcagagcacccagagtccccgcccagctgccggcacagccaatcgcagcgcagccaggcggcggggcggtgccggccgaacccagacccgaggttttagaagcagagtcaggcgaagctgggccagaaccgcgacctccgcaaccttgagcggcatccgtggagtgcgcctgcgcagctacgaccgcagcaggaaagcgccgccggccaggcccagctgtggccggacagggactggaagagaggacgcggtcgagtaggtgtgcaccagccctggcaacgagagcgtctaccccgaactctgctggccttgaggtggggaagccggggagggcagttgaggaccccgcggaggcgcgtgactggttgagcgggcaggccagcctccgagccgggtggacacaggttttaaaacatgaatcctacactcatccttgctgccttttgcctgggaattgcctcagctactctaacatttgatcacagtttagaggcacagtggaccaagtggaaggcgatgcacaacagattatacggcatgaatgaagaaggatggaggagagcagtgtgggagaagaacatgaagatgattgaactgcacaatcaggaatacagggaagggaaacacagcttcacaatggccatgaacgcctttggagacatgaccagtgaagaattcaggcaggtgatgaatggctttcaaaaccgtaagcccaggaaggggaaagtgttccaggaacctctgttttatgaggcccccagatctgtggattggagagagaaaggctacgtgactcctgtgaagaatcagggtcagtgtggttcttgttgggcttttagtgctactggtgctcttgaaggacagatgttccggaaaactgggaggcttatctcactgagtgagcagaatctggtagactgctctgggcctcaaggcaatgaaggctgcaatggtggcctaatggattatgctttccagtatgttcaggataatggaggcctggactctgaggaatcctatccatatgaggcaacagaagaatcctgtaagtacaatcccaagtattctgttgctaatgacaccggctttgtggacatccctaagcaggagaaggccctgatgaaggcagttgcaactgtggggcccatttctgttgctattgatgcaggtcatgagtccttcctgttctataaagaaggcatttattttgagccagactgtagcagtgaagacatggatcatggtgtgctggtggttggctacggatttgaaagcacagaatcagataacaataaatattggctggtgaagaacagctggggtgaagaatggggcatgggtggctacgtaaagatggccaaagaccggagaaaccattgtggaattgcctcagcagccagctaccccactgtgtgagctggtggacggtgatgaggaaggacttgactggggatggcgcatgcatgggaggaattcatcttcagtctaccagcccccgctgtgtcggatacacactcgaatcattgaagatccgagtgtgatttgaattctgtgatattttcacactggtaaatgttacctctattttaattactgctataaataggtttatattattgattcacttactgactttgcattttcgtttttaaaaggatgtataaatttttacctgtttaaataaaatttaatttcaaatgt

SEQ ID NO: 5056 - DNA, 1436 bp, Homo sapiens
  source 1..1436: mol_type = unassigned DNA
aagctgggccagaaccgcgacctccgcaaccttgagcggcatccgtggagtgcgcctgcgcagctacgaccgcagcaggaaagcgccgccggccaggcccagctgtggccggacagggactggaagagaggacgcggtcgagtaggttttaaaacatgaatcctacactcatccttgctgccttttgcctgggaattgcctcagctactctaacatttgatcacagtttagaggcacagtggaccaagtggaaggcgatgcacaacagattatacggcatgaatgaagaaggatggaggagagcagtgtgggagaagaacatgaagatgattgaactgcacaatcaggaatacagggaagggaaacacagcttcacaatggccatgaacgcctttggagacatgaccagtgaagaattcaggcaggtgatgaatggctttcaaaaccgtaagcccaggaaggggaaagtgttccaggaacctctgttttatgaggcccccagatctgtggattggagagagaaaggctacgtgactcctgtgaagaatcagggtcagtgtggttcttgttgggcttttagtgctactggtgctcttgaaggacagatgttccggaaaactgggaggcttatctcactgagtgagcagaatctggtagactgctctgggcctcaaggcaatgaaggctgcaatggtggcctaatggattatgctttccagtatgttcaggataatggaggcctggactctgaggaatcctatccatatgaggcaacagaagaatcctgtaagtacaatcccaagtattctgttgctaatgacaccggctttgtggacatccctaagcaggagaaggccctgatgaaggcagttgcaactgtggggcccatttctgttgctattgatgcaggtcatgagtccttcctgttctataaagaaggcatttattttgagccagactgtagcagtgaagacatggatcatggtgtgctggtggttggctacggatttgaaagcacagaatcagataacaataaatattggctggtgaagaacagctggggtgaagaatggggcatgggtggctacgtaaagatggccaaagaccggagaaaccattgtggaattgcctcagcagccagctaccccactgtgtgagctggtggacggtgatgaggaaggacttgactggggatggcgcatgcatgggaggaattcatcttcagtctaccagcccccgctgtgtcggatacacactcgaatcattgaagatccgagtgtgatttgaattctgtgatattttcacactggtaaatgttacctctattttaattactgctataaataggtttatattattgattcacttactgactttgcattttcgtttttaaaaggatgtataaatttttacctgtttaaataaaatttaatttc

SEQ ID NO: 5057 - DNA, 975 bp, Homo sapiens
  source 1..975: mol_type = unassigned DNA
gggccagaaccgcgacctccgcaaccttgagcggcatccgtggagtgcgcctgcgcagctacgaccgcagcaggaaagcgccgccggccaggcccagctgtggccggacagggactggaagagaggacgcggtcgagtagaaggatggaggagagcagtgtgggagaagaacatgaagatgattgaactgcacaatcaggaatacagggaagggaaacacagcttcacaatggccatgaacgcctttggagacatgaccagtgaagaattcaggcaggtgatgaatggctttcaaaaccgtaagcccaggaaggggaaagtgttccaggaacctctgttttatgaggcccccagatctgtggattggagagagaaaggctacgtgactcctgtgaagaatcagggtcagtgtggttcttgttgggcttttagtgctactggtgctcttgaaggacagatgttccggaaaactgggaggcttatctcactgagtgagcagaatctggtagactgctctgggcctcaaggcaatgaaggctgcaatggtggcctaatggattatgctttccagtatgttcaggataatggaggcctggactctgaggaatcctatccatatgaggcaacagaagaatcctgtaagtacaatcccaagtattctgttgctaatgacaccggctttgtggacatccctaagcaggagaaggccctgatgaaggcagttgcaactgtggggcccatttctgttgctattgatgcaggtcatgagtccttcctgttctataaagaaggcatttattttgagccagactgtagcagtgaagacatggatcatggtgtgctggtggttggctacggatttgaaagcacagaatcagataacaataaatattggctggtgaagaacagctggggtgaagaatggggcatgggtggctacgtaaagatggccaaagaccggagaaaccattgtgg

SEQ ID NO: 5058 - DNA, 988 bp, Homo sapiens
  source 1..988: mol_type = unassigned DNA; mol_type = unassigned DNA
gcaaccttgagcggcatccgtggagtgcgcctgcgcagctacgaccgcagcaggaaagcgccgccggccaggcccagctgtggccggacagggactggaagagaggacgcggtcgagtaggttttaaaacatgaatcctacactcatccttgctgccttttgcctgggaattgcctcagctactctaacatttgatcacagtttagaggcacagtggaccaagtggaaggctgcaatggtggcctaatggattatgctttccagtatgttcaggataatggaggcctggactctgaggaatcctatccatatgaggcaacagaagaatcctgtaagtacaatcccaagtattctgttgctaatgacaccggctttgtggacatccctaagcaggagaaggccctgatgaaggcagttgcaactgtggggcccatttctgttgctattgatgcaggtcatgagtccttcctgttctataaagaaggcatttattttgagccagactgtagcagtgaagacatggatcatggtgtgctggtggttggctacggatttgaaagcacagaatcagataacaataaatattggctggtgaagaacagctggggtgaagaatggggcatgggtggctacgtaaagatggccaaagaccggagaaaccattgtggaattgcctcagcagccagctaccccactgtgtgagctggtggacggtgatgaggaaggacttgactggggatggcgcatgcatgggaggaattcatcttcagtctaccagcccccgctgtgtcggatacacactcgaatcattgaagatccgagtgtgatttgaattctgtgatattttcacactggtaaatgttacctctattttaattactgctataaataggtttatattattgattcacttactgactttgcattttcgtttttaaaaggatgtataaatttttacctgtttaaataaaatttaatttcaaatgta

SEQ ID NO: 5059 - DNA, 933 bp, Homo sapiens
  source 1..933: mol_type = unassigned DNA; mol_type = unassigned DNA
ttgagcggcatccgtggagtgcgcctgcgcagctacgaccgcagcaggaaagcgccgccggccaggcccagctgtggccggacagggactggaagagaggacgcggtcgagtaggttttaaaacatgaatcctacactcatccttgctgccttttgcctgggaattgcctcagctactctaacatttgatcacagtttagaggcacagtggaccaagtggaaggcgatgcacaacagattatacggcatgaatgaagaaggatggaggagagcagtgtgggagaagaacatgaagatgattgaactgcacaatcaggaatacagggaagggaaacacagcttcacaatggccatgaacgcctttggagacatgaccagtgaagaattcaggcaggtgatgaatggctttcaaaaccgtaagcccaggaaggggaaagtgttccaggaacctctgttttatgaggcccccagatctgtggattggagagagaaaggctacgtgactcctgtgaagaatcagggtcagtgtggttcttgttgggcttttagtgctactggtgctcttgaaggacagatgttccggaaaactgggaggcttatctcactgagtgagcagaatctggtagactgctctgggcctcaaggcaatgaaggctgcaatggtggcctaatggattatgctttccagtatgttcaggataatggaggcctggactctgaggaatcctatccatatgaggcaacagtaagtggagctccttgtcatcattccagctcagcttttggaaggtggacactttaagagataacagatacctttttcggaattcatatattagggctgggtggggtggctcacgcctgtaatcccagccctttaggaggctgagccaggcagatggcttaagctcaggagtttgagaccagcctggg

SEQ ID NO: 5060 - DNA, 908 bp, Homo sapiens
  source 1..908: mol_type = unassigned DNA; mol_type = unassigned DNA
ttgagcggcatccgtggagtgcgcctgcgcagctacgaccgcagcaggaaagcgccgccggccaggcccagctgtggccggacagggactggaagagaggacgcggtcgagtaggtgtgcaccagccctggcaacgagagcgtctaccccgaactctgctggccttgaggttttaaaacatgaatcctacactcatccttgctgccttttgcctgggaattgcctcagctactctaacatttgatcacagtttagaggcacagtggaccaagtggaaggcgatgcacaacagattatacggcatgaatgaagaaggatggaggagagcagtgtgggagaagaacatgaagatgattgaactgcacaatcaggaatacagggaagggaaacacagcttcacaatggccatgaacgcctttggagacatgaccagtgaagaattcaggcaggtgatgaatggctttcaaaaccgtaagcccaggaaggggaaagtgttccaggaacctctgttttatgaggcccccagatctgtggattggagagagaaaggctacgtgactcctgtgaagaatcagggtcagtgtggttcttgttgggcttttagtgctactggtgctcttgaaggacagatgttccggaaaactgggaggcttatctcactgagtgagcagaatctggtagactgctctgggcctcaaggcaatgaaggctgcaatggtggcctaatggattatgctttccagtatgttcaggataatggaggcctggactctgaggaatcctatccatatgaggcaacagaagaatcctgtaagtacaatcccaagtattctgttgctaatgacaccggctttgtggacatccctaagcaggagaaggccctgatgaaggcagttgcaactgtgggg

SEQ ID NO: 5061 - DNA, 4107 bp, Homo sapiens
  source 1..4107: mol_type = unassigned DNA; mol_type = unassigned DNA
gacaagggctcttcttgatggcttactgtatccactttgtccccaagaccatagggaaatgactagaggtgactgtactagctagattttaaatgaaactgaaatgaaagttcacttcctcattttgagtacctcatgtgacaagttccaatttcttttcaagtcaattgaactgaaatctccttgttgctttgaaatcttagaagagagcccactaattcaaggactcttactgtgggagcaactgctggttctatcacaatgaaacggctggtttgtgtgctcttggtgtgctcctctgcagtggcacagttgcataaagatcctaccctggatcaccactggcatctctggaagaaaacctatggcaaacaatacaaggaaaagaatgaagaagcagtacgacgtctcatctgggaaaagaatctaaagtttgtgatgcttcacaacctggagcattcaatgggaatgcactcatacgatctgggcatgaaccacctgggagacatgaccagtgaagaagtgatgtctttgatgagttccctgagagttcccagccagtggcagagaaatatcacatataagtcaaaccctaatcggatattgcctgattctgtggactggagagagaaagggtgtgttactgaagtgaaatatcaaggttcttgtggtgcttgctgggctttcagtgctgtgggggccctggaagcacagctgaagctgaaaacaggaaagctggtgtctctcagtgcccagaacctggtggattgctcaactgaaaaatatggaaacaaaggctgcaatggtggcttcatgacaacggctttccagtacatcattgataacaagggcatcgactcagacgcttcctatccctacaaagccatggatcagaaatgtcaatatgactcaaaatatcgtgctgccacatgttcaaagtacactgaacttccttatggcagagaagatgtcctgaaagaagctgtggccaataaaggcccagtgtctgttggtgtagatgcgcgtcatccttctttcttcctctacagaagtggtgtctactatgaaccatcctgtactcagaatgtgaatcatggtgtacttgtggttggctatggtgatcttaatgggaaagaatactggcttgtgaaaaacagctggggccacaactttggtgaagaaggatatattcggatggcaagaaataaaggaaatcattgtgggattgctagctttccctcttacccagaaatctagaggatctctcctttttataacaaatcaagaaatatgaagcactttctcttaacttaatttttcctgctgtatccagaagaaataattgtgtcatgattaatgtgtatttactgtactaattagaaaatatagtttgaggccgggcacggtggctcacgcctgtaatcccagtacttgggaggccaaggcaggcatatcaacttgaggccaggagttaaagagcagcctggctaacatggtgaaaccccatctctactaaaaatacaaaaaattagccgagcacggtggtgcatgcctgtaatcccagctacttgggaggctgaggcacgagattccttgaacccaagaggttgaggctatgttgagctgagatcacaccactgtactccagcctggatgacagagtggagactctgtttcaaaaaaacagaaaagaaaatatagtttgattcttcatttttttaaatttgcaaatctcaggataaagtttgctaagtaaattagtaatgtactatagatataactgtacaaaaattgttcaacctaaaacaatctgtaattgcttattgttttattgtatactctttgtctttttaagacccctaatagccttttgtaacttgatggcttaaaaatacttaataaatctgccatttcaaatttctatcattgccacataccattcttattcctaggcaactattaataatctatcctgagaatattaattgtggtattctggtgatggggtttagcaactttgatggaagaaaatattaggctataaatgtcctaaggactcagattgtatctttgtacagaagaggattcaaaacgccacgtgtagtggctcatgcctgtaatcccaacactttgggaggctgaagtaggaggatcgtcttgagcccaggagttcaagaccagcctggacaacatagtgagaccttgtctccacaaaaataaaaaagaaactatccaggagtggtggtgtgtgcctgtggtccctgctatgcagatgtctaagacaggaggatcacaagagcccaggaggttgagaatgcagtgagcttgtaattgcaccactgcactccagcctgggtgacagagcaagaccctgtcttaaaaaaagaggattcaacacatatttttatattatgttaaagtaaagaaatgcataaaagacaagcactttggaagaattattttaatgatcaacaatttaatgtattagtccaaattatttttacgtagtcatcaacaatttgaccagggcctttatttggcaaataactgagccaaccagaataaaataaccaatactccactgctcatatttttatctaattcagatggatcttccttacaactgctctagattagtagatgcatctaagcaggcagcaggaactttaaattttttaagttcatgtctatgacatgaacaatgtgtgggataatgtcattaatatatcctaaattaacctaaacgtatttcactaactctggctccttctccataaagcacattttaaggaacaagaattgctaaatataaaaacataaataataccataatacatggctatcatcaaaagtgtatagaatattatagtttaaaagtatttagttgattacttttcagttttgttttgttttttgagacggagtctcactctgttgcccaggctggagtgcagtggcaccatctcagttcactgcaacttctgcctcccgagttcaagcgattctcctgcctcagcctcccgagtagctggaattataggcgtgcaccaccacgcccagctaatttttgtatttttagtaaagacagggttttgccacattagccaggctggtctcaaactcctgacctcaggtgatccacccaccccagcctcccaaagtgctaagattacaggcgtgagccactgagcccagcctacttttcagtttttaacataatttttgttttatccacaacttttcaagtattgaaagtagaataaaaacatgggttcttagtctttagctatctgttaaagcctatgaatgccttcttaaaatcatgtttttaaatgcataaaatatataggattacaaaggaatctaattatatcgaaatacagttattaaaatgttaaaagataagtttgttatatattaatatgcatgcttctttataaatgcattaaataagagttaatagctatcctaaatttgaaatagtgataagcataatgaaaatagatgcaaaaaactaatgtgatatgaaaatatctgggtttttcttttgatgatgaagtattgctaatattaccgtggtttatgaactatgttcagaattgaagaaaatcctaactttcagttagaggttagtgacggggttcaggacaccctacacaaaatacagcactttgacatattgaatattttaagctgaaggcatttgaggaaattgcagaagcaggaaggtgactctgaccttctgcctgctgttctccccagaagcagccataaaacctgggaaggattttctgaccttcccctgaagtagatcataagactgtcatgtaagaggtgctctcctggcacccagagaaaaggagcatccttacctccaaaagcacagggacacaaagaggaatctaaacaaacaggcctctcagtttcccccagtttattacatttagcttgttcacactttgccctatgacatttctacatcactggctgctcttcatcaaacctactataaaaaacattcaagttcaactgtttctttgggcctttatttccttatggagcccctcgtgtcgtgtaaaacttatattaaataaatgtgcatgcttt

SEQ ID NO: 5062 - DNA, 673 bp, Homo sapiens
  source 1..673: mol_type = unassigned DNA; mol_type = unassigned DNA
tgtcctgaaagaagctgtggccaataaaggcccagtgtctgttggtgtagatgcgcgtcatccttctttcttcctctacagaagtggtgtctactatgaaccatcctgtactcagaatgtgaatcatggtgtacttgtggttggctatggtgatcttaatgggaaagaatactggcttgtgaaaaacagctggggccacaactttggtgaagaaggatatattcggatggcaagaaataaaggaaatcattgtgggattgctagctttccctcttacccagaaatctagaggatctctcctttttataacaaatcaagaaatatgaagcactttctcttaacttaatttttcctgctgtatccagaagaaataattgtgtcatgattaatgtgtatttactgtactaattagaaaatataattacaggcgtgagccactgagcccagcctacttttcagtttttaacataatttttgttttatccacaacttttcaagtattgaaagtagaataaaaacatgggttcttagtctttagctatctgttaaagcctatgaatgccttcttaaaatcatgtttttaaatgcataaaatatataggattacaaaggaatctaattatatcgaaatacagttattaaaatgttaaaagataagtttgttatatattaa

SEQ ID NO: 5063 - DNA, 390 bp, Homo sapiens
  source 1..390: mol_type = unassigned DNA; mol_type = unassigned DNA
cttacccagaaatctagaggatctctcctttttataacaaatcaagaaatatgaagcactttctcttaacttaatttttcctgctgtatccagaagaaataattgtgtcatgattaatgtgtatttactgtactaattagaaaatatagtttgagccactgagcccagcctacttttcagtttttaacataatttttgttttatccacaacttttcaagtattgaaagtagaataaaaacatgggttcttagtctttagctatctgttaaagcctatgaatgccttcttaaaatcatgtttttaaatgcataaaatatataggattacaaaggaatctaattatatcgaaatacagttattaaaatgttaaaagataagtttgttatata

SEQ ID NO: 5064 - DNA, 1421 bp, Homo sapiens
  source 1..1421: mol_type = unassigned DNA; mol_type = unassigned DNA
aattgaactgaaatctccttgttgctttgaaatcttagaagagagcccactaattcaaggactcttactgtgggagcaactgctggttctatcacaatgaaacggctggtttgtgtgctcttggtgtgctcctctgcagtggcacagttgcataaagatcctaccctggatcaccactggcatctctggaagaaaacctatggcaaacaatacaaggaaaagaatgaagaagcagtacgacgtctcatctgggaaaagaatctaaagtttgtgatgcttcacaacctggagcattcaatgggaatgcactcatacgatctgggcatgaaccacctgggagacatgggttcttgtggtgcttgctgggctttcagtgctgtgggggccctggaagcacagctgaagctgaaaacaggaaagctggtgtctctcagtgcccagaacctggtggattgctcaactgaaaaatatggaaacaaaggctgcaatggtggcttcatgacaacggctttccagtacatcattgataacaagggcatcgactcagacgcttcctatccctacaaagccatggatcagaaatgtcaatatgactcaaaatatcgtgctgccacatgttcaaagtacactgaacttccttatggcagagaagatgtcctgaaagaagctgtggccaataaaggcccagtgtctgttggtgtagatgcgcgtcatccttctttcttcctctacagaagtggtgtctactatgaaccatcctgtactcagaatgtgaatcatggtgtacttgtggttggctatggtgatcttaatgggaaagaatactggcttgtgaaaaacagctggggccacaactttggtgaagaaggatatattcggatggcaagaaataaaggaaatcattgtgggattgctagctttccctcttacccagaaatctagaggatctctcctttttataacaaatcaagaaatatgaagcactttctcttaacttaatttttcctgctgtatccagaagaaataattgtgtcatgattaatgtgtatttactgtactaattagaaaatatagtttgaggccgggcacggtggctcacgcctgtaatcccagtacttgggaggccaaggcaggcatatcaacttgaggccaggagttaaagagcagcctggctaacatggtgaaaccccatctctactaaaaatacaaaaaattagccgagcacggtggtgcatgcctgtaatcccagctacttgggaggctgaggcacgagattccttgaacccaagaggttgaggctatgttgagctgagatcacaccactgtactccagcctggatgacagagtggagactctgtttcaaaaaaacagaaaagaaaatatagtttgattcttcatttttttaaatttgcaaatctca

SEQ ID NO: 5065 - DNA, 752 bp, Homo sapiens
  source 1..752: mol_type = unassigned DNA; mol_type = unassigned DNA
atcattgataacaagggcatcgactcagacgcttcctatccctacaaagccatggatcagaaatgtcaatatgactcaaaatatcgtgctgccacatgttcaaagtacactgaacttccttatggcagagaagatgtcctgaaagaagctgtggccaataaaggcccagtgtctgttggtgtagatgcgcgtcatccttctttcttcctctacagaagtgatggagtcttgctctgttgccaggctggagtgaggtggcacgatctcagctcactgcaacctctgcctcctgggttcaagcaattctcctgcctcagcctcctgagtagctgggactacaggtgtctactatgaaccatcctgtactcagaatgtgaatcatggtgtacttgtggttggctatggtgatcttaatgggaaagaatactggcttgtgaaaaacagctggggccacaactttggtgaagaaggatatattcggatggcaagaaataaaggaaatcattgtgggattgctagctttccctcttacccagaaatctagaggatctctcctttttataacaaatcaagaaatatgaagcactttctcttaacttaatttttcctgctgtatccagaagaaataattgtgtcatgattaatgtgtatttactgtactaattagaaaatatagtttgaggccgggcacggtggctcacgcctgtaatcccagtacttgggaggccaaggcaggcatatcaacttgaggc

SEQ ID NO: 5066 - DNA, 650 bp, Homo sapiens
  source 1..650: mol_type = unassigned DNA; mol_type = unassigned DNA
atcctaccctggatcaccactggcatctctggaagaaaacctatggcaaacaatacaaggaaaagaatgaagaagcagtacgacgtctcatctgggaaaagaatctaaagtttgtgatgcttcacaacctggagcattcaatgggaatgcactcatacgatctgggcatgaaccacctgggagacatgaccagtgaagaagtgatgtctttgatgagttccctgagagttcccagccagtggcagagaaatatcacatataagtcaaaccctaatcggatattgcctgattctgtggactggagagagaaagggtgtgttactgaagtgaaatatcaaggttcttgtggtgcttgctgggctttcagtgctgtgggggccctggaagcacagctgaagctgaaaacaggaaagctggtgtctctcagtgcccagaacctggtggattgctcaactgaaaaatatggaaacaaaggctgcaatggtggcttcatgacaacggctttccagtacatcattgataacaagggcatcgactcagacgcttcctatccctacaaagccatggtgtctactatgaaccatcctgtactcagaatgtgaatcatggtgtacttgtggttggctatggtgatcttaatgggaaagaat

SEQ ID NO: 5067 - DNA, 5970 bp, Homo sapiens
  source 1..5970: mol_type = unassigned DNA; mol_type = unassigned DNA
ggacagcagcgggttaagtgccgcccgcgcggagacggctgagtccggagccgcggctccgagctcgcattcggatccgctagagcaggaagatggcgacggacggcgcgagctgcgagcccgacttgtcccgggccccggaggacgcggcgggggccgcggcggaggcggcgaaaaaagagtttgatgtggatactctcagtaaatccgagctgcggatgctcctcagcgtgatggaaggggagctggaggccagagaccttgtcatcgaggccctgcgggctcgcaggaaggaggtatttatccaggaacggtatgggagatttaatctaaatgacccgttcctggcactccagagagactatgaagcaggtgctggtgacaaagagaagaagccagtttgtaccaaccccctctccatccttgaagcagtcatggcccactgcaagaaaatgcaagaaaggatgtccgcacagctggctgctgctgagagcagacaaaagaagctggaaatggagaagcttcagctacaagcccttgagcaagagcacaagaagctggctgcccgccttgaggaagagcgtggcaagaacaagcaggtggtcctgatgctggtcaaagagtgcaagcagctctcaggcaaagtcatagaggaggcccagaagctcgaagacgtaatggccaaactggaagaggaaaagaaaaagacgaatgaattagaagaggaactctccgctgagaaacgaagaagcacagaaatggaagctcagatggaaaaacaactctctgagtttgacactgagcgggaacagcttcgtgccaagctgaaccgggaagaagcacacaccactgacctcaaagaggagatagacaagatgaggaaaatgattgagcaactgaaaaggggaagtgacagcaaaccaagcctctctcttccacggaagacaaaagataggcgtttggtttccatatctgtgggaacagaaggaactgtgacaaggtctgttgcatgccagacagacctagtgacagaaaatgctgaccacatgaaaaagttgcctttaaccatgcctgtaaaaccttccacagggagtcccctagtttctgcaaatgcaaaagggagcgtgtgcaccagtgccaccatggccagaccaggtattgacaggcaggcttcctatggtgacttgattggcgcttctgtacccgctttcccacctccaagtgcaaacaaaattgaggaaaatggaccaagcactggctcaacaccagatccaaccagtagcacacccccacttcccagtaacgctgcccctcccaccgctcaaacaccaggcatagctcctcagaactcgcaagctccacctatgcacagtttacattcaccatgtgccaacacctctttgcatccaggtctaaacccacgaatccaagcagctagatttagatttcagggcaatgctaacgacccagaccaaaatggaaatactacccaaagtcctccgtcaagagatgtctcgcctacaagtcgtgacaacctagtggccaaacaactagctcggaatactgtgacccaagcactgtcaagatttacaagccctcaagcaggtgctccctcaaggcctggagtgcccccaacaggggatgttggcacccaccctccagttggtcggaccagtttaaagactcatggtgtagcacgagttgacagaggaaatcctcctcctatccctccaaaaaagccagggctctcccaaactccttctccaccacacccccaactcaaggttattatagacagcagcagggcctcgaacacaggggccaaagttgataacaaaactgtggcttcgactccttccagtttgccacaagggaacagggtgatcaatgaggagaaccttcctaagtcatcctcccctcagctgccaccaaaaccatccatagatttaactgtggcacctgcaggctgtgccgtttcagccctggccacgtctcaggtgggtgcctggcctgctgcaacccccggactgaaccaacctgcatgttcagacagttcccttgtcattcctaccaccattgccttttgctcttccataaaccccgttagtgcctcatcctgtagaccaggtgcctcagacagcctcctggtaacagcatcaggctggtcaccctccctaacccctttgctaatgagtggtggtcctgcccccctggctggcaggcccacccttcttcagcaagctgctgcccagggaaatgtcactttattatcaatgctgcttaatgaagaaggactggacattaattactcctgtgaagatggccattctgccttgtattctgctgctaagaatggacatacagactgtgtgagattgctgctgagtgcagaagcccaagtcaatgctgctgataaaaatggcttcacacccttgtgtgctgcagctgctcagggacatttcgagtgtgtagaattattaatttcatatgatgctaacattaatcatgctgctgatggaggacagacacctctatacctggcctgtaaaaatggaaataaagaatgtattaaactcttgttggaagctggaaccaatcgaagtgtaaaaaccacagatggctggacaccagttcacgcagctgtggacactggtaatgtggacagcctcaagcttcttatgtaccatagaataccagctcatggaaattctttcaatgaggaggagtccgagtcaagtgtctttgacttggatggaggagaagagagtcctgaaggcatatccaagcctgttgttcctgcagacctcattaaccacgccaacagagaaggctggactgctgcccacattgctgcttccaaaggttttaagaactgcctagaaatcttgtgtaggcacggagggcttgagccagaaaggagagacaagtgcaatcggactgtgcatgatgttgccactgatgactgcaagcatttgctggagaatctgaatgctcttaaaatacccttaaggatttcagtgggtgagattgaaccaagcaactatggttctgatgacttggaatgtgaaaacacaatatgtgctttaaatatccgcaaacagacatcatgggatgatttttcaaaagcagtgagtcaagctctgacaaatcatttccaggcaatctcttctgatggatggtggagtctggaagacgtgacttgcaataacaccactgattccaacatcggcctcagtgcaagaagcatacgatccatcacgctaggaaatgtgccgtggtcagtgggtcagagcttcgcgcagtccccgtgggactttatgaggaagaataaggcagagcacatcactgtgcttttgtcaggtcctcaagaaggctgtctcagtagtgtgacttatgcctccatgatccctctccagatgatgcagaactacctcaggctggttgagcaatatcataatgtcattttccacggcccagaaggaagcttgcaagactacatagtacatcagcttgcactctgcctgaagcacagacaaatggctgcaggattctcctgtgaaatagtgagagctgaagtagatgctggtttttccaaggaacagctactagacctgttcattagtagcgcttgtctgatcccagtgaaacaatctcccagtaagaagaaaatcatcatcattttagaaaatttagaaaaatcttcactgtcggagttattgagggactttttggcacctcttgaaaatcgcagcactgaaagcccctgcactttccaaaaaggaaatggactgtccgaatgttattactttcatgagaactgctttctgatgggaaccatcgccaaggcctgtctccagggctccgacttgctggtgcagcagcatttccgctgggtgcagctgcggtgggatggcgagcccatgcaaggactgctgcagaggttcttacgaaggaaagttgtgaataagttcaaaggtcaggcgccctccccctgcgatcctgtgtgcaagattgtcgactgggctctgtccgtctggcgtcagcttaactcctgcctggcccgcttgggcacacctgaagcacttcttggaccaaaatatttcctgtcttgtcctgtagttcctgggcatgcccaagtgacagtgaagtggatgtctaagctgtggaatggcgtcatcgcacccagagttcaagaagcaatattgtcaagagcctctgtgaaaagacaacctggctttgggcagacaactgctaaaagacaccctagccaaggacagcaggctgtggtcaaagctgctctcagcatcttgctaaataaagctgtactgcatggctgtcccctccccagagcagagctagaccagcatacagctgatttcaaaggaggaagtttccctttatccatagtttccagttataacacttgtaacaagaagaaaggagagagtggtgcctggagaaaggtgaacaccagtcctcgcaggaagtctggccgcttctctttacccacctggaataagccagacctaagcactgaaggtatgaaaaataagactatatcacagctgaattgtaacaggaatgcttctctgtcaaaacaaaagtctttagagaatgatctatcactgacgttgaatttggatcagagactctctctgggttcagatgacgaagcagatcttgtcaaggaacttcagagcatgtgctccagcaagtctgagtctgatatcagcaagattgctgattccagggatgatttaaggatgtttgatagttctggaaacaaccctgtactttcagcaactattaataatctgagaatgccagtgtcacaaaaggaggtcagtcctctcagcagccatcaaactactgaatgcagcaacagtaaatcaaagactgagttgggtgtttcaagagttaaatcttttcttcctgttcctagaagtaaagtcacccagtgttcccagaacaccaaaagaagcagcagcagcagtaatacaaggcaaatagaaatcaacaacaactcaaaagaagtgaattggaacttacacaaaaatgaacacctagaaaaacctaacaaataggcctgcctacaatattctcattattaacttcctctatttcacacagaaaccaaggacaacaagatacaaatacctttaaattgataaaatgttttcactgtaatataaattatgagtgcgggaccactattcaatttttttttgtaaagaatgtatttataaccaacattttgttgcttttttttttaattctgtaggattgaacttcaataccaggaagttatgccaacttttcaagtagttttataatagaaaaattgtaatagttttaatcaagatgttcaggggtattaaaacagaactgtgtactgtatatctgtatatatgtatatatgtatgtatatttaaggaagtccagaaatcatactgcatacatgctacaaaaaagtagcaaaaaagtacaaagttggcttagataacttgtaccgttttaaatggagatcataattttatgttcacttgatggggaatgactagaatggggcaataacaaatcatttctaaacagttattttccattaaaagccatattaagtattttgcttgttaaattctagttttatgttttaaatctcttagtggttacattgccatttggtagcatcatgtatatatttatgcttataagtttgcattatgactcctgtaaaatatgaaattataatgcaataaaagtgttatctttcttacaaaagttttgtacctaagtggatatagataactgcataaatgaataaattcagaattaactccttcaatatttctagtagcacaactgataatattgatattttctacaaatgttacttctaaaattacagacaaaattacttacacaattcagttaagatgctttgacactgaataaaatattgatttcatgaaa

SEQ ID NO: 5068 - DNA, 4250 bp, Homo sapiens
  source 1..4250: mol_type = unassigned DNA; mol_type = unassigned DNA
agatgtctcgcctacaagtcgtgacaacctagtggccaaacaactagctcggaatactgtgacccaagcactgtcaagatttacaagccctcaagcaggtgctccctcaaggcctggagtgcccccaacaggggatgttggcacccaccctccagttggtcggaccagtttaaagactcatggtgtagcacgagttgacagaggaaatcctcctcctatccctccaaaaaagccagggctctcccaaactccttctccaccacacccccaactcaaggttattatagacagcagcagggcctcgaacacaggggccaaagttgataacaaaactgtggcttcgactccttccagtttgccacaagggaacagggtgatcaatgaggagaaccttcctaagtcatcctcccctcagctgccaccaaaaccatccatagatttaactgtggcacctgcaggctgtgccgtttcagccctggccacgtctcagaaaatacaaaaggtaaaatgtaccagagaggagccttcttgctggtcaccctccctaacccctttgctaatgagtggtggtcctgcccccctggctggcaggcccacccttcttcagcaagctgctgcccagggaaatgtcactttattatcaatgctgcttaatgaagaaggactggacattaattactcctgtgaagatggccattctgccttgtattctgctgctaagaatggacatacagactgtgtgagattgctgctgagtgcagaagcccaagtcaatgctgctgataaaaatggcttcacacccttgtgtgctgcagctgctcagggacatttcgagtgtgtagaattattaatttcatatgatgctaacattaatcatgctgctgatggaggacagacacctctatacctggcctgtaaaaatggaaataaagaatgtattaaactcttgttggaagctggaaccaatcgaagtgtaaaaaccacagatggctggacaccagttcacgcagctgtggacactggtaatgtggacagcctcaagcttcttatgtaccatagaataccagctcatggaaattctttcaatgaggaggagtccgagtcaagtgtctttgacttggatggaggagaagagagtcctgaaggcatatccaagcctgttgttcctgcagacctcattaaccacgccaacagagaaggctggactgctgcccacattgctgcttccaaaggttttaagaactgcctagaaatcttgtgtaggcacggagggcttgagccagaaaggagagacaagtgcaatcggactgtgcatgatgttgccactgatgactgcaagcatttgctggagaatctgaatgctcttaaaatacccttaaggatttcagtgggtgagattgaaccaagcaactatggttctgatgacttggaatgtgaaaacacaatatgtgctttaaatatccgcaaacagacatcatgggatgatttttcaaaagcagtgagtcaagctctgacaaatcatttccaggcaatctcttctgatggatggtggagtctggaagacgtgacttgcaataacaccactgattccaacatcggcctcagtgcaagaagcatacgatccatcacgctaggaaatgtgccgtggtcagtgggtcagagcttcgcgcagtccccgtgggactttatgaggaagaataaggcagagcacatcactgtgcttttgtcaggtcctcaagaaggctgtctcagtagtgtgacttatgcctccatgatccctctccagatgatgcagaactacctcaggctggttgagcaatatcataatgtcattttccacggcccagaaggaagcttgcaagactacatagtacatcagcttgcactctgcctgaagcacagacaaatggctgcaggattctcctgtgaaatagtgagagctgaagtagatgctggtttttccaaggaacagctactagacctgttcattagtagcgcttgtctgatcccagtgaaacaatctcccagtaagaagaaaatcatcatcattttagaaaatttagaaaaatcttcactgtcggagttattgagggactttttggcacctcttgaaaatcgcagcactgaaagcccctgcactttccaaaaaggaaatggactgtccgaatgttattactttcatgagaactgctttctgatgggaaccatcgccaaggcctgtctccagggctccgacttgctggtgcagcagcatttccgctgggtgcagctgcggtgggatggcgagcccatgcaaggactgctgcagaggttcttacgaaggaaagttgtgaataagttcaaaggtcaggcgccctccccctgcgatcctgtgtgcaagattgtcgactgggctctgtccgtctggcgtcagcttaactcctgcctggcccgcttgggcacacctgaagcacttcttggaccaaaatatttcctgtcttgtcctgtagttcctgggcatgcccaagtgacagtgaagtggatgtctaagctgtggaatggcgtcatcgcacccagagttcaagaagcaatattgtcaagagcctctgtgaaaagacaacctggctttgggcagacaactgctaaaagacaccctagccaaggacagcaggctgtggtcaaagctgctctcagcatcttgctaaataaagctgtactgcatggctgtcccctccccagagcagagctagaccagcatacagctgatttcaaaggaggaagtttccctttatccatagtttccagttataacacttgtaacaagaagaaaggagagagtggtgcctggagaaaggtgaacaccagtcctcgcaggaagtctggccgcttctctttacccacctggaataagccagacctaagcactgaaggtatgaaaaataagactatatcacagctgaattgtaacaggaatgcttctctgtcaaaacaaaagtctttagagaatgatctatcactgacgttgaatttggatcagagactctctctgggttcagatgacgaagcagatcttgtcaaggaacttcagagcatgtgctccagcaagtctgagtctgatatcagcaagattgctgattccagggatgatttaaggatgtttgatagttctggaaacaaccctgtactttcagcaactattaataatctgagaatgccagtgtcacaaaaggaggtcagtcctctcagcagccatcaaactactgaatgcagcaacagtaaatcaaagactgagttgggtgtttcaagagttaaatcttttcttcctgttcctagaagtaaagtcacccagtgttcccagaacaccaaaagaagcagcagcagcagtaatacaaggcaaatagaaatcaacaacaactcaaaagaagtgaattggaacttacacaaaaatgaacacctagaaaaacctaacaaataggcctgcctacaatattctcattattaacttcctctatttcacacagaaaccaaggacaacaagatacaaatacctttaaattgataaaatgttttcactgtaatataaattatgagtgcgggaccactattcaatttttttttgtaaagaatgtatttataaccaacattttgttgcttttttttttaattctgtaggattgaacttcaataccaggaagttatgccaacttttcaagtagttttataatagaaaaattgtaatagttttaatcaagatgttcaggggtattaaaacagaactgtgtactgtatatctgtatatatgtatatatgtatgtatatttaaggaagtccagaaatcatactgcatacatgctacaaaaaagtagcaaaaaagtacaaagttggcttagataacttgtaccgttttaaatggagatcataattttatgttcacttgatggggaatgactagaatggggcaataacaaatcatttctaaacagttattttccattaaaagccatattaagtattttgcttgttaaattctagttttatgttttaaatctcttagtggttacattgccatttggtagcatcatgtatatatttatgcttataagtttgcattatgactcctgtaaaatatgaaattataatgcaataaaagtgttatctttcttacaaaagttttgtacctaagtggatatagataactgcataaatgaataaattcagaattaactccttcaatatttctagtagcacaactgataatattgatattttct

SEQ ID NO: 5069 - DNA, 5517 bp, Homo sapiens
  source 1..5517: mol_type = unassigned DNA; mol_type = unassigned DNA
gctagagcaggaagatggcgacggacggcgcgagctgcgagcccgacttgtcccgggccccggaggacgcggcgggggccgcggcggaggcggcgaaaaaagagtttgatgtggatactctcagtaaatccgagctgcggatgctcctcagcgtgatggaaggggagctggaggccagagaccttgtcatcgaggccctgcgggctcgcaggaaggaggtatttatccaggaacggtatgggagatttaatctaaatgacccgttcctggcactccagagagactatgaagcaggtgctggtgacaaagagaagaagccagtttgtaccaaccccctctccatccttgaagcagtcatggcccactgcaagaaaatgcaagaaaggatgtccgcacagctggctgctgctgagagcagacaaaagaagctggaaatggagaagcttcagctacaagcccttgagcaagagcacaagaagctggctgcccgccttgaggaagagcgtggcaagaacaagcaggtggtcctgatgctggtcaaagagtgcaagcagctctcaggcaaagtcatagaggaggcccagaagctcgaagacgtaatggccaaactggaagaggaaaagaaaaagacgaatgaattagaagaggaactctccgctgagaaacgaagaagcacagaaatggaagctcagatggaaaaacaactctctgagtttgacactgagcgggaacagcttcgtgccaagctgaaccgggaagaagcacacaccactgacctcaaagaggagatagacaagatgaggaaaatgattgagcaactgaaaaggggaagtgacagcaaaccaagcctctctcttccacggaagacaaaagataggcgtttggtttccatatctgtgggaacagaaggaactgtgacaaggtctgttgcatgccagacagacctagtgacagaaaatgctgaccacatgaaaaagttgcctttaaccatgcctgtaaaaccttccacagggagtcccctagtttctgcaaatgcaaaagggagcgtgtgcaccagtgccaccatggccagaccaggtattgacaggcaggcttcctatggtgacttgattggcgcttctgtacccgctttcccacctccaagtgcaaacaaaattgaggaaaatggaccaagcactggctcaacaccagatccaaccagtagcacacccccacttcccagtaacgctgcccctcccaccgctcaaacaccaggcatagctcctcagaactcgcaagctccacctatgcacagtttacattcaccatgtgccaacacctctttgcatccaggtctaaacccacgaatccaagcagctagatttagatttcagggcaatgctaacgacccagaccaaaatggaaatactacccaaagtcctccgtcaagagatgtctcgcctacaagtcgtgacaacctagtggccaaacaactagctcggaatactgtgacccaagcactgtcaagatttacaagccctcaagcaggtgctccctcaaggcctggagtgcccccaacaggggatgttggcacccaccctccagttggtcggaccagtttaaagactcatggtgtagcacgagttgacagaggaaatcctcctcctatccctccaaaaaagccagggctctcccaaactccttctccaccacacccccaactcaaggttattatagacagcagcagggcctcgaacacaggggccaaagttgataacaaaactgtggcttcgactccttccagtttgccacaagggaacagggtgatcaatgaggagaaccttcctaagtcatcctcccctcagctgccaccaaaaccatccatagatttaactgtggcacctgcaggctgtgccgtttcagccctggccacgtctcaggctggtcaccctccctaacccctttgctaatgagtggtggtcctgcccccctggctggcaggcccacccttcttcagcaagctgctgcccagggaaatgtcactttattatcaatgctgcttaatgaagaaggactggacattaattactcctgtgaagatggccattctgccttgtattctgctgctaagaatggacatacagactgtgtgagattgctgctgagtgcagaagcccaagtcaatgctgctgataaaaatggcttcacacccttgtgtgctgcagctgctcagggacatttcgagtgtgtagaattattaatttcatatgatgctaacattaatcatgctgctgatggaggacagacacctctatacctggcctgtaaaaatggaaataaagaatgtattaaactcttgttggaagctggaaccaatcgaagtgtaaaaaccacagatggctggacaccagttcacgcagctgtggacactggtaatgtggacagcctcaagcttcttatgtaccatagaataccagctcatggaaattctttcaatgaggaggagtccgagtcaagtgtctttgacttggatggaggagaagagagtcctgaaggcatatccaagcctgttgttcctgcagacctcattaaccacgccaacagagaaggctggactgctgcccacattgctgcttccaaaggttttaagaactgcctagaaatcttgtgtaggcacggagggcttgagccagaaaggagagacaagtgcaatcggactgtgcatgatgttgccactgatgactgcaagcatttgctggagaatctgaatgctcttaaaatacccttaaggatttcagtgggtgagattgaaccaagcaactatggttctgatgacttggaatgtgaaaacacaatatgtgctttaaatatccgcaaacagacatcatgggatgatttttcaaaagcagtgagtcaagctctgacaaatcatttccaggcaatctcttctgatggatggtggagtctggaagacgtgacttgcaataacaccactgattccaacatcggcctcagtgcaagaagcatacgatccatcacgctaggaaatgtgccgtggtcagtgggtcagagcttcgcgcagtccccgtgggactttatgaggaagaataaggcagagcacatcactgtgcttttgtcaggtcctcaagaaggctgtctcagtagtgtgacttatgcctccatgatccctctccagatgatgcagaactacctcaggctggttgagcaatatcataatgtcattttccacggcccagaaggaagcttgcaagactacatagtacatcagcttgcactctgcctgaagcacagacaaatggctgcaggattctcctgtgaaatagtgagagctgaagtagatgctggtttttccaaggaacagctactagacctgttcattagtagcgcttgtctgatcccagtgaaacaatctcccagtaagaagaaaatcatcatcattttagaaaatttagaaaaatcttcactgtcggagttattgagggactttttggcacctcttgaaaatcgcagcactgaaagcccctgcactttccaaaaaggaaatggactgtccgaatgttattactttcatgagaactgctttctgatgggaaccatcgccaaggcctgtctccagggctccgacttgctggtgcagcagcatttccgctgggtgcagctgcggtgggatggcgagcccatgcaaggactgctgcagaggttcttacgaaggaaagttgtgaataagttcaaaggtcaggcgccctccccctgcgatcctgtgtgcaagattgtcgactgggctctgtccgtctggcgtcagcttaactcctgcctggcccgcttgggcacacctgaagcacttcttggaccaaaatatttcctgtcttgtcctgtagttcctgggcatgcccaagtgacagtgaagtggatgtctaagctgtggaatggcgtcatcgcacccagagttcaagaagcaatattgtcaagagcctctgtgaaaagacaacctggctttgggcagacaactgctaaaagacaccctagccaaggacagcaggctgtggtcaaagctgctctcagcatcttgctaaataaagctgtactgcatggctgtcccctccccagagcagagctagaccagcatacagctgatttcaaaggaggaagtttccctttatccatagtttccagttataacacttgtaacaagaagaaaggagagagtggtgcctggagaaaggtgaacaccagtcctcgcaggaagtctggccgcttctctttacccacctggaataagccagacctaagcactgaaggtatgaaaaataagactatatcacagctgaattgtaacaggaatgcttctctgtcaaaacaaaagtctttagagaatgatctatcactgacgttgaatttggatcagagactctctctgggttcagatgacgaagcagatcttgtcaaggaacttcagagcatgtgctccagcaagtctgagtctgatatcagcaagattgctgattccagggatgatttaaggatgtttgatagttctggaaacaaccctgtactttcagcaactattaataatctgagaatgccagtgtcacaaaaggaggtcagtcctctcagcagccatcaaactactgaatgcagcaacagtaaatcaaagactgagttgggtgtttcaagagttaaatcttttcttcctgttcctagaagtaaagtcacccagtgttcccagaacaccaaaagaagcagcagcagcagtaatacaaggcaaatagaaatcaacaacaactcaaaagaagtgaattggaacttacacaaaaatgaacacctagaaaaacctaacaaataggcctgcctacaatattctcattattaacttcctctatttcacacagaaaccaaggacaacaagatacaaatacctttaaattgataaaatgttttcactgtaatataaattatgagtgcgggaccactattcaatttttttttgtaaagaatgtatttataaccaacattttgttgcttttttttttaattctgtaggattgaacttcaataccaggaagttatgccaacttttcaagtagttttataatagaaaaattgtaatagttttaatcaagatgttcaggggtattaaaacagaactgtgtactgtatatctgtatatatgtatatatgtatgtatatttaaggaagtccagaaatcatactgcatacatgctacaaaaaagtagcaaaaaagtacaaagttggcttagataacttgtaccgttttaaatggagatcataattttatgttcacttgatggggaatgactagaatggggcaataacaaatcatttctaaacagttattttccattaaaagccatattaagtattttgcttgttaaattctagttttatgttttaaatctcttagtggttacattgccatttggtagcatcatgtatatatttatgcttataagtttgcattatgactcctgtaaaatatgaaattataatgcaataaaa

SEQ ID NO: 5070 - DNA, 760 bp, Homo sapiens
  source 1..760: mol_type = unassigned DNA; mol_type = unassigned DNA
gtccgtctggcgtcagcttaactcctgcctggcccgcttgggcacacctgaagcacttcttggaccaaaatatttcctgtcttgtcctgtagttcctgggcatgcccaagtgacagtgaaagctagaccagcatacagctgatttcaaaggaggaagtttccctttatccatagtttccagttataacacttgtaacaagaagaaaggagagagtggtgcctggagaaaggtgaacaccagtcctcgcaggaagtctggccgcttctctttacccacctggaataagccagacctaagcactgaaggtatgaaaaataagactatatcacagctgaattgtaacaggaatgcttctctgtcaaaacaaaagtctttagagaatgatctatcactgacgttgaatttggatcagagactctctctgggttcagatgacgaagcagatcttgtcaaggaacttcagagcatgtgctccagcaagtctgagtctgatatcagcaagattgctgattccagggatgatttaaggatgtttgatagttctggaaacaaccctgtactttcagcaactattaataatctgagaatgccagtgtcacaaaaggaggtcagtcctctcagcagccatcaaactactgaatgcagcaacagtaaatcaaagactgagttgggtgtttcaagagttaaatcttttcttcctgttcctagaagtaaagtcacccagtgttcccagaacaccaaaagaagcagcagcagcag

SEQ ID NO: 5071 - DNA, 580 bp, Homo sapiens
  source 1..580: mol_type = unassigned DNA; mol_type = unassigned DNA
atgacttggaatgtgaaaacacaatatgtgctttaaatatccgcaaacagacatcatgggatgatttttcaaaagcagtgagtcaagctctgacaaatcatttccaggcaatctcttctgatggatggtggagtctggaagacgtgacttgcaataacaccactgattccaacatcggcctcagtgcaagaagcatacgatccatcacgctaggaaatgtgccgtggtcagtgggtcagagcttcgcgcagtccccgtgggactttatgaggaagaataaggcagagcacatcactgtgcttttgtcaggtcctcaagaaggctgtctcagtagtgtgacttatgcctccatgatccctctccagatgatgcagaactacctcaggctgcacagacaaatggctgcaggattctcctgtgaaatagtgagagctgaagtagatgctggtttttccaaggaacagctactagacctgttcattagtagcgcttgtctgatcccagtgaaacaatctcccagtaagaagaaaatcatcatcattttagaaaatttagaaaaatcttcactgtcggagttatt

SEQ ID NO: 5072 - DNA, 521 bp, Homo sapiens
  source 1..521: mol_type = unassigned DNA; mol_type = unassigned DNA
cctatatgtgttccgtacatgcctttgacaattaaagctctgaattccttagggttctcacagaagagagcatatgtttacccttgtgagaaaaaccactcataagcttcccttgacattttatttcattttttgaaactaggaaatgtgccgtggtcagtgggtcagagcttcgcgcagtccccgtgggactttatgaggaagaataaggcagagcacatcactgtgcttttgtcaggtcctcaagaaggctgtctcagtagtgtgacttatgcctccatgatccctctccagatgatgcagaactacctcaggctgatggggaaactgaacagagagaggtaaaatgctcaaagtcatgcatctagcaagtgatgaagccaggattgtgcaagtctctgatgtgtatgagatcaatctgaaactaatactactggtataaaacattaaacataattttgcttgctgccttaatttcgatgacctttttaaataaatgagttggaactatgacccttgac

SEQ ID NO: 5073 - DNA, 530 bp, Homo sapiens
  source 1..530: mol_type = unassigned DNA; mol_type = unassigned DNA
catgggatgatttttcaaaagcagtgagtcaagctctgacaaatcatttccaggcaatctcttctgatggatggtggagtctggaagacgtgacttgcaataacaccactgattccaacatcggcctcagtgcaagaagcatacgatccatcacgctaggaaatgtgccgtggtcagtgggtcagagcttcgcgcagtccccgtgggactttatgaggaagaataaggcagagcacatcactgtgcttttgtcaggtcctcaagaaggctgtctcagtagtgtgacttatgcctccatgatccctctccagatgatgcagaactacctcaggctgatggggaaactgaacagagagaggtaaaatgctcaaagtcatgcatctagcaagtgatgaagccaggattgtgcaagtctctgatgtgtatgagatcaatctgaaactaatactactggtataaaacattaaacataattttgcttgctgccttaatttcgatgacctttttaaataaatgagttggaactatga

SEQ ID NO: 5074 - DNA, 576 bp, Homo sapiens
  source 1..576: mol_type = unassigned DNA; mol_type = unassigned DNA
ctcttgtctttatagaactgcctagaaatcttgtgtaggcacggagggcttgagccagaaaggagagacaagtgcaatcggactgtgcatgatgttgccactgatgactgcaagcatttgctggagaatctgaatgctcttaaaatacccttaaggatttcagtgggtgagattgaaccaagcaactatggttctgatgacttggaatgtgaaaacacaatatgtgctttaaatatccgcaaacagacatcatgggatgatttttcaaaagcagtgagtcaagctctgacaaatcatttccaggcaatctcttctgatggatggtggagtctggaagacgtgacttgcaataacaccactgattccaacatcggcctcagtgcaagaagcatacgatccatcacgctaggtatcagcagtcctatgacggagagaaagtgaaatttctgggtttatttatgtttgtgggtttcataacctgattcttagttcattgattaagcacattcaaagcttacttgtggcagctgccggtgctgaaaaacttgagtattcacaatgtagccattatgtaat

SEQ ID NO: 5075 - DNA, 578 bp, Homo sapiens
  source 1..578: mol_type = unassigned DNA; mol_type = unassigned DNA
agatcgtaaacaaaacccaggacgccaggcagatttctgtgttaacaagaaaaaagagtttgatgtggatactctcagtaaatccgagctgcggatgctcctcagcgtgatggaaggggagctggaggccagagaccttgtcatcgaggccctgcgggctcgcaggaaggaggtatttatccaggaacggtatgggagatttaatctaaatgacccgttcctggcactccagagagactatgaagcaggtgctggtgacaaagagaagaagccagtttgtaccaaccccctctccatccttgaagcagtcatggcccactgcaagaaaatgcaagaaaggatgtccgcacagctggctgctgctgagagcagacaaaagaagctggaaatggagaagcttcagctacaagcccttgagcaagagcacaagaagctggctgcccgccttgaggaagagcgtggcaagaacaagcaggtggtcctgatgctggtcaaagagtgcaagcagctctcaggcaaagtcatagaggaggcccagaagctcgaagacgtaatggccaaactggaagaggaaaaga

SEQ ID NO: 5076 - DNA, 379 bp, Homo sapiens
  source 1..379: mol_type = unassigned DNA; mol_type = unassigned DNA
actcaccctcccacaggtcactcttgtgccatgcgcacatggcttactgcaggagcgctacgggaaggtgtgtggtgggaatcccatgcagagagaacagcaaggacaaagaccccgaggcaggaccatgtttaggaaactccgggcatccagcgaagctaagggagtaagcaggatcaaagtaggagacaagctggaaatggagaagcttcagctacaagcccttgagcaagagcacaagaagctggctgcccgccttgaggaagagcgtggcaagaacaagcaggtggtcctgatgctggtcaaagagtgcaagcagctctcaggcaaagtcatagaggaggcccagaagctcgaagacgtaatggccaaactggaa

SEQ ID NO: 5077 - DNA, 570 bp, Homo sapiens
  source 1..570: mol_type = unassigned DNA; mol_type = unassigned DNA
gctttctggagagggagaggagagatgtggaggaaggtacttggggtgagaggagctgagcctggcaatggaaggagaaacggggaggaggactgctaatttccacttgtaaaactgaaaaaagagtttgatgtggatactctcagtaaatccgagctgcggatgctcctcagcgtgatggaaggggagctggaggccagagaccttgtcatcgaggccctgcgggctcgcaggaaggaggtatttatccaggaacggtatgggagatttaatctaaatgacccgttcctggcactccagagagactatgaagcaggtgctggtgacaaagagaagaagccagtttgtaccaaccccctctccatccttgaagcagtcatggcccactgcaagaaaatgcaagaaaggatgtccgcacagctggctgctgctgagagcagacaaaagaagctggaaatggagaagcttcagctacaagcccttgagcaagagcacaagaagctggctgcccgccttgaggaagagcgtggcaagaacaagcaggtggtcctgatgctggtcaaagagtgc

SEQ ID NO: 5078 - DNA, 470 bp, Homo sapiens
  source 1..470: mol_type = unassigned DNA; mol_type = unassigned DNA
aaaaggagattgtatagaaagttaggagctgaggggctggtgccacgttctaaaagaaaacaggacagacaaatcgttttcatctgagaattgtttttggagaaacactagagtcaacgatagaataaatcagagccagaaaaaagagtttgatgtggatactctcagtaaatccgagctgcggatgctcctcagcgtgatggaaggggagctggaggccagagaccttgtcatcgaggccctgcgggctcgcaggaaggaggtatttatccaggaacggtatgggagatttaatctaaatgacccgttcctggcactccagagagactatgaagcaggtgctggtgacaaagagaagaagccagtttgtaccaaccccctctccatccttgaagcagtcatggcccactgcaagaaaatgcaagaaaggatgtccgcacagctggctgctgctgagagcagacaaaaga

SEQ ID NO: 5079 - DNA, 1274 bp, Homo sapiens
  source 1..1274: mol_type = unassigned DNA; mol_type = unassigned DNA
ataggaacagccgcggcggcccggctcgcgcgctgcttgcctgcctcggtctccgccgctccaggggcgggtggggtgggctgagccggagcccgggccgccgccgccgccgccggggagaggccgaacgcgcagccggcgcgggtccctgagagagcgcggccgccgggcggtcggtccccgtccgggtcgaagccaggggcgcgcggcgatgtgagccatgagcgcgacgtggacgctgtcgccggagcccctgccgccgtcgacggggcccccggtgggcgcgggcctggacgcggagcagcgcacggtgttcgccttcgtgctctgcctgctcgtggtgctggtgctgttgatggtgcgctgcgtgcgcatcctgctcgacccctacagccgcatgcccgcctcgtcctggaccgaccacaaggaggcgctcgagcgcgggcagttcgactacgcgttggtgtgaggggcgcggcgccccctagccggccctgcgccggggtctcagagggccggcccggcggggggcgccgcggggccaggactgcgctcaggatcccgccccggagcccccagcccgggggagagggggagggagttgggagaagcccagcccctccccctcgagacccctcccatgtcccttcctggcctggccggagccccacctcgtgcctttatccgccctgtcccttcctctctgcgcatctcacccgcccggctggcccccacccccgactctgaatcccgggcgggaggaggacccccgcaccgccccctccccagcgtgtaagtggctctgctattgtgcgtccctggaagtggggacccccttgtccctcctccctcccctgttgtctggccgtcgtcaaccccaccttgactgagtgttgagcccgtccttgggctctggtccctgcggggcaggctctcccgggcccacggggcggacgctgcataccaatttgccctgcaccgcctgtcccggagacggagcccgaaggcctgccatggcggctgtgtcgaggatgcgtggcgcctgccgtggcgggacagcgtgggcaggctcatttctgcccccaacccgggccccaggacaggtcagcgcgccctgccccggtgcccaccgctgccccccatccgccctcctgccacttgcccctgacccccctgccgtgcctcccgcagccctcccatgccgttccactcctccctgcctctgagccgaacatgataataaaagctattattgagcgcttactgcatgccaa

SEQ ID NO: 5080 - DNA, 1660 bp, Homo sapiens
  source 1..1660: mol_type = unassigned DNA; mol_type = unassigned DNA
agacacactgctaggatactgcctctactcgctgaagcagaatcctctgaagagttgctgaggcagaactgaaatcatggctcacctcaaagaagcagcagtattggccgttaatgatgcctcacacagaaagacgatgctcctttaactcggggttttaatgggaagtttctaagcctgaaacaacagctttagacctggggtgtgccatcagctgccttgcagctaccactgtctactgctttcacacagcgtggtcgggaagaatggaaactaaagaggcttgtaactacctgtaactgttccaccaggaaatggatcaagtgtttgttcagccagagccagtattaaaattagactctatttcctgagcacccacaaatggacctgacaaagggaagacacagatgtactgcgtgatgaggaaagcctatcaggattaaaatatggctataactcagcctctccagagtgcagccaccatgacctccgcagattgatgatggaagaaaagaaaaccaggatatcctgtgctctggcttccctggaccatggatggaggacagcccatcccctcatccctagtgccccttgggaacgaatcagcagattctagcatgtccctggagcagaaaatgacatttgtttttgtgattctgttgtttattttcttgggcattctcattgtccggtgcttccggattcttttggatccatatcgaagcatgccaacctctacctgggctgatggacttgaaggcctggagaaagggcagttcgaccatgcccttgcttaggagggatggtgtgggatctcctcctgaggagatgaagtgctttgtgtcttggtgaggattccctttatttagtgttctcaacaaatcaaatttaaacaatatttggtcccaggaccataatccattattccataaatatgcagttgggttaaagacatttgaggatgttggaaatggacacttatataactaatccaacataagaaggtttaaatttttatgtttgctcaatgaatgagtactcttaaaattgtgtgattgtgaaaccaagagcgttaatactgacatagatttgccatcaaacaaaacaccacctgatctgactaaagaataaaagactagaaaggatctcatatgaatctggtgacaaggccaggaagagatttccttgctctaattatgtctatatttgttttatttcatgggcacctatctgggtcctgagcagaatgaggaagattgtgctgaatggacccaaagtagtttcttgttttctcccaaagcagggagctttgggaagcaatggaaaagcttaaaagagatgattctgtccttggtaaatgtgagtgagaatagcgttttgtttttcaagtaaaacttaattcaaaggctacaaagttttaaaaactatttaccaagccaactacattatatgtattcatattaataacatgtgtagaggtagctatacattacttgaatttacactttacacaaatgatttaaaaaataggttgcaagtgcagcttaaagttttttttcaatgaaaagttaattgtttagaggagaagacttttatagtcttcagaggaatgtgtatttatgattgtatatagtcaccaaataaaacttttcaagaaaca

SEQ ID NO: 5081 - DNA, 552 bp, Homo sapiens
  source 1..552: mol_type = unassigned DNA; mol_type = unassigned DNA
aaaggttttctgaggggaagagtggtgagatctgggcttaaaaagatgaatcgagatgcagtgtgtaggaagcatgggcaagggatgaggaacgccactttgaaaattactaaaactaaagcaagtgactaagagtgtgaatgaccctggctgcaatgactacgcctgctgggcttctattaaaattagactctatttcctgagcacccacaaatggacctgacaaagggaagacacagatgtactgcgtgatgaggaaagcctatcaggattaaaatatggctgtgagtaactgtggtccttctttatacttaaaatagctgccatgtgttattatgaaggcttctgatggtggtatcaaaatcctttgaaataatagacttgcacagatttccctggtcatctaaaagaaagatgtcattattcagttaaaagcaaacttgcacattttctaagaatcatttttaccaaaaagggacattttactgcgagacagacatttaaaaatttacatgtcttgagatatttttgtattgtggtagcaaaatgatt

SEQ ID NO: 5082 - DNA, 1458 bp, Homo sapiens
  source 1..1458: mol_type = unassigned DNA; mol_type = unassigned DNA
ggcttaaaaagatgaatcgagatgcagtgtgtaggaagcatgggcaagggatgaggaacgccactttgaaaattactaaaactaaagcaagtgactaagagtgtgaatgaccctggctgcaatgactacgcctgctgggcttctattaaaattagactctatttcctgagcacccacaaatggacctgacaaagggaagacacagatgtactgcgtgatgaggaaagcctatcaggattaaaatatggctataactcagcctctccagagtgcagccaccatgacctccgcagattgatgatggaagaaaagaaaaccaggatatcctgtgctctggcttccctggaccatggatggaggacagcccatcccctcatccctagtgccccttgggaacgaatcagcagattctagcatgtccctggagcagaaaatgacatttgtttttgtgattctgttgtttattttcttgggcattctcattgtccggtgcttccggattcttttggatccatatcgaagcatgccaacctctacctgggctgatggacttgaaggcctggagaaagggcagttcgaccatgcccttgcttaggagggatggtgtgggatctcctcctgaggagatgaagtgctttgtgtcttggtgaggattccctttatttagtgttctcaacaaatcaaatttaaacaatatttggtcccaggaccataatccattattccataaatatgcagttgggttaaagacatttgaggatgttggaaatggacacttatataactaatccaacataagaaggtttaaatttttatgtttgctcaatgaatgagtactcttaaaattgtgtgattgtgaaaccaagagcgttaatactgacatagatttgccatcaaacaaaacaccacctgatctgactaaagaataaaagactagaaaggatctcatatgaatctggtgacaaggccaggaagagatttccttgctctaattatgtctatatttgttttatttcatgggcacctatctgggtcctgagcagaatgaggaagattgtgctgaatggacccaaagtagtttcttgttttctcccaaagcagggagctttgggaagcaatggaaaagcttaaaagagatgattctgtccttggtaaatgtgagtgagaatagcgttttgtttttcaagtaaaacttaattcaaaggctacaaagttttaaaaactatttaccaagccaactacattatatgtattcatattaataacatgtgtagaggtagctatacattacttgaatttacactttacacaaatgatttaaaaaataggttgcaagtgcagcttaaagttttttttcaatgaaaagttaattgtttagaggagaagacttttatagtcttcagaggaatgtgtatttatgattgtatatagtcaccaaataaaacttttcaagaaaca

SEQ ID NO: 5083 - DNA, 1208 bp, Homo sapiens
  source 1..1208: mol_type = unassigned DNA; mol_type = unassigned DNA
ataactcagcctctccagagtgcagccaccatgacctccgcagattgatgatggaagaaaagaaaaccaggatatcctgtgctctggcttccctggaccatggatggaggacagcccatcccctcatccctagtgccccttgggaacgaatcagcagattctagcatgtccctggagcagaaaatgacatttgtttttgtgattctgttgtttattttcttgggcattctcattgtccggtgcttccggattcttttggatccatatcgaagcatgccaacctctacctgggctgatggacttgaaggcctggagaaagggcagttcgaccatgcccttgcttaggagggatggtgtgggatctcctcctgaggagatgaagtgctttgtgtcttggtgaggattccctttatttagtgttctcaacaaatcaaatttaaacaatatttggtcccaggaccataatccattattccataaatatgcagttgggttaaagacatttgaggatgttggaaatggacacttatataactaatccaacataagaaggtttaaatttttatgtttgctcaatgaatgagtactcttaaaattgtgtgattgtgaaaccaagagcgttaatactgacatagatttgccatcaaacaaaacaccacctgatctgactaaagaataaaagactagaaaggatctcatatgaatctggtgacaaggccaggaagagatttccttgctctaattatgtctatatttgttttatttcatgggcacctatctgggtcctgagcagaatgaggaagattgtgctgaatggacccaaagtagtttcttgttttctcccaaagcagggagctttgggaagcaatggaaaagcttaaaagagatgattctgtccttggtaaatgtgagtgagaatagcgttttgtttttcaagtaaaacttaattcaaaggctacaaagttttaaaaactatttaccaagccaactacattatatgtattcatattaataacatgtgtagaggtagctatacattacttgaatttacactttacacaaatgatttaaaaaataggttgcaagtgcagcttaaagttttttttcaatgaaaagttaattgtttagaggagaagacttttatagtcttcagaggaatgtgtatttatgattgtatatagtcaccaaataaaacttttcaagaaaca

SEQ ID NO: 5084 - DNA, 5254 bp, Homo sapiens
  source 1..5254: mol_type = unassigned DNA; mol_type = unassigned DNA
gtcgccgccagcgtctgtgccgcgtcccttgctctgtgaaggacaggcctcgcgccaggaccccggtggacttctgaggtgccaggatggtgggagaactccgctacagggaattcagggtgcccctggggcccggcttacatgcctatcctgatgagctgatccgccagcgcgtgggccatgatgggcatcctgagtaccagatccgttggctcatcctgcggcgtggcgatgagggggacgggggctctggccaagtggactgcaaggctgagcacatcctgctgtggatgtccaaggatgagatctatgccaactgccacaagatgctgggcgaggatggccaggtcatcgggccctcccaggagtctgcaggggaggttggggccctggacaaatctgtgctggaggagatggaaaccgacgtgaagtccctcattcagagagcccttcggcagctggaggagtgtgtgggcactatccctcctgctcctctacttcacactgtccacgtgctcagcgcctatgccagcattgagcccctcactggagtattcaaggacccaagggtcctggacttgctcatgcacatgttgagtagtcctgattatcagattcgctggagtgcaggccggatgatacaagccctgtcctcccatgacgctgggacccggactcagatccttctgtcactgagccaacaagaagccattgagaaacacctggattttgacagccgctgtgctctgctagcactgtttgcacaggccacgctctctgaacaccccatgtctttcgagggcattcagctaccacaggtcccaggaagggtgctcttctccctggtgaagcggtatttgcatgtcacctcgctcctggatcagctgaacgacagtgctgcggagccaggagcccagaacacctctgctcctgaggagttgagtggggagaggggtcaactggagctggagttcagtatggccatgggcaccctgatctcggagctggtgcaagccatgcgctgggaccaggcctcagacagaccaaggagctcagcacggtcccccggttccatcttccagcctcagctggcagatgtgagcccagggctccccgctgcccaggctcagccctccttcaggaggtcaagacgttttcgccctcgttctgagttcgcaagtggcaatacctatgctttgtatgtgcgggacacactgcagccggggatgcgagtgcggatgctggatgattatgaggagatcagtgccggggatgagggcgagtttcggcagagcaacaacggtgtgcctcctgtgcaggtattttgggagtcaacaggccgcacctattgggtgcactggcacatgctggagatcttgggctttgaggaagacattgaggacatggttgaggctgatgagtaccaaggggcagtggccagtagagtcctgggtagagccctgcctgcctggcgctggaggcccatgacagaactctatgctgtgccttatgtgctgcctgaggatgaggacactgaggagtgtgaacacctgaccctggctgagtggtgggaactcctcttcttcatcaagaagctggatggacctgaccatcaggaggttctccagatcctccaggagaacctagatggggagattctggatgatgagatcctagctgaactggccgtgcccatagaattggcccaggacttgctgctgactctgccacagcgactcaatgacagtgccctcagggacctgatcaactgccatgtctacaagaagtatgggcctgaagccctagcagggaaccaagcctacccatcccttctagaagcccaagaagatgtcctcctgctagacgcgcaggcccaggctaaggactcagaagatgcagccaaagtggaagcaaaagaacccccatctcagagtcccaacactcccctgcagcgtctggtggagggttatggtccagctgggaaaatcctcctggatctagagcaagccctcagctcagaggggacccaggagaacaaggtcaagccactcctgctgcagctgcagcggcagccgcagcccttcctggcactgatgcagagcctggacactccggagactaacaggaccctgcacctgactgtgctgagaatcctgaagcagctggtggacttccccgaggcactgctgctcccctggcacgaggccgtggatgcctgcatggcctgcctgcggtccccaaacactgatcgagaggtgctccaggaactgattttcttcctgcaccgcctgacctcagtgagcagggactatgccgtggtgctgaatcagctgggagcaagagacgctatctccaaggccctggaaaagcacctgggaaagctggagctggctcaggagctgcgggacatggtgttcaagtgtgagaagcatgcccacctctaccgcaaactcatcaccaacatcctgggaggctgcatccagatggtgctgggccagatcgaagaccacagacgaacccaccaacccatcaacatccctttctttgatgtgttcctcagatacctgtgccagggctccagtgtggaagtgaaggaggacaagtgctgggagaaggtggaggtgtcctccaacccgcaccgggccagcaagctgacggaccacaaccccaagacctattgggagtccaacggcagcgccggctcccactacatcaccctgcacatgcgccggggcatcctcatcaggcaactgactctgcttgtggctagtgaggactcgagttacatgccggcccgagtggtggtgtgcgggggtgatagcactagctctcttcacacggaactcaactcggtgaatgtgatgccctctgccagccgggtgatcctcctggagaacctgacccgcttctggcccatcatccagatccgcataaagcgctgccagcagggtggcattgatacgcgcattcgggggttagagatcctaggccccaagcccacgttctggccagtgttccgggagcagctctgtcgtcacacacgcctcttctacatggttcgggcacaggcctggagccaggacatggcagaggaccgcaggagcctcctgcacctgagttctagactcaacggtgctctgcgccaggagcagaattttgctgaccgcttcctccctgatgacgaggctgcccaagctctgggcaagacctgctgggaggccctggtcagccccgtggtgcagaacatcacctcccctgatgaggatggcattagccccctgggttggctgctggaccagtacctggagtgtcaggaagctgtcttcaacccccagagccgcggcccagctttcttctcgcgggtgcgccgtctcactcacctgctggtgcatgtcgagccctgtgaggcaccccctcctgtggtggccactcctcggcccaaaggcagaaacagaagccacgactggagctccttggctacccggggccttccaagcagcatcatgagaaacctgacgcgctgttggcgggccgtggtggagaagcaggtgaacaattttctgacctcatcctggcgggatgatgactttgtgccacgctactgtgagcactttaatattctgcagaactcaagctctgaactgtttgggcctcgggcagccttcttgctggcgctgcaaaatggctgtgcgggagccttgctgaagctcccttttctcaaagctgcccacgtgagtgagcagttcgcccggcacattgaccagcagatccagggcagccggatcggtggagcccaggaaatggagaggctggcacagctgcagcaatgcctgcaagctgtcctgattttctccggcttggagatagccaccacttttgagcattattaccagcactacatggcggaccgtctcctgggcgtggtctcgagctggctggagggggccgtgctggagcagatcggtccctgcttccccaaccgcctcccccagcagatgttgcagagcctgagcacctctaaggagctgcagcgccagttccacgtctaccagctccagcagctggatcaggaactcctgaagctggaggatacagagaagaaaatacaggtgggccttggggccagtggcaaggagcacaagagcgagaaggaagaggaagctggggcagcagcagtggtggatgtggcggagggagaggaggaagaggaggagaatgaggacctctactatgaaggggcaatgccagaagtgtctgtgcttgtcctgtcccgacactcctggcctgttgcctcaatctgccacacactgaaccccagaacctgcctgccctcctacctgaggggcactttgaacagatactccaacttctacaacaagagtcagagccaccctgcccttgagcgaggctcacagaggcgactgcagtggacgtggctgggctgggctgagctgcagtttgggaaccagaccctgcatgtgtccaccgtgcagatgtggctactgctgtatctcaacgacctgaaggcggtctctgtggagagtctgctggcgttctcagggctctccgcagacatgctcaatcaggcgattgggcccctcacctcttcaagaggccccctggaccttcacgagcaaaaggatataccaggaggggtcctcaagattcgagatggcagcaaggaacccaggtcgagatgggacattgtgcggctcatcccacctcagacgtacctgcaagctgagggtgaagacggccagaacttggagaagagacggaatcttctgaactgcctcatcgtccgaatcctcaaggcccatggagatgaggggctgcacattgaccagcttgtctgtctggtgctggaggcttggcagaagggcccgtgtcctcccaggggtttggtcagcagccttggtaaggggtctgcatgcagcagcactgacgtcctctcctgcatcctacacctcctgggcaagggcacgctgagacgccatgacgaccggccccaggtgctgtcctatgcagtccctgtgactgtcatggagcctcacactgagtccctgaacccaggctcctcaggccccaacccacccctcaccttccataccctacagattcgctcccggggtgtgccctatgcctcctgcactgccacccagagcttctctaccttccggtagccctagacttggggtcaggggaaggtagagctggagcttttacagaaataaaacccaagagtttgattata

SEQ ID NO: 5085 - DNA, 749 bp, Homo sapiens
  source 1..749: mol_type = unassigned DNA; mol_type = unassigned DNA
cactgatcgagaggtaatacattcacatggttcacaaatcaaaacgctctaacaaggtgctccaggaactgattttcttcctgcaccgcctgacctcagtgagcagggactatgccgtggtgctgaatcagctgggagcaagagacgctatctccaaggccctggaaaagcacctgggaaagctggagctggctcaggagctgcgggacatggtgttcaagtgtgagaagcatgcccacctctaccgcaaactcatcaccaacatcctgggaggctgcatccagatggtgctgggccagatcgaagaccacagacgaacccaccaacccatcaacatccctttctttgatgtgttcctcagatacctgtgccagggctccagtgtggaagtgaaggaggacaagtgctgggagaaggtggaggtgtcctccaacccgcaccgggccagcaagctgacggaccacaaccccaagacctattgggagtccaacggcagcgccggctcccactacatcaccctgcacatgcgccggggcatcctcatcaggcaactgactctgcttgtggctagtgaggactcgagttacatgccggcccgagtggtggtgtgcgggggtgatagcactagctctcttcacacggaactcaactcggtgaatgtgatgccctctgccagccgggtgatcctcctggagaacctgacccgcttctggcccatcatccagatccgcataaagcgctgccagcag

SEQ ID NO: 5086 - DNA, 5504 bp, Homo sapiens
  source 1..5504: mol_type = unassigned DNA; mol_type = unassigned DNA
aggaggtgctgcgtcgccaaggtggcatcctcggctccgccccggcgctctcccagggcccctagctttccgctgggtcgggcggaaatgagccgtggcttttggctggcggagccgctggcagggaccgggccccaccctgccccagtggctgccgactcacgcgggtgcagctctgttccgcggaggcacgccccctcccgtctctccgtctcgaccccctcgcggggcccaggtgccaggatggtgggagaactccgctacagggaattcagggtgcccctggggcccggcttacatgcctatcctgatgagctgatccgccagcgcgtgggccatgatgggcatcctgagtaccagatccgttggctcatcctgcggcgtggcgatgagggggacgggggctctggccaagtggactgcaaggctgagcacatcctgctgtggatgtccaaggatgagatctatgccaactgccacaagatgctgggcgaggatggccaggtcatcgggccctcccaggagtctgcaggggaggttggggccctggacaaatctgtgctggaggagatggaaaccgacgtgaagtccctcattcagagagcccttcggcagctggaggagtgtgtgggcactatccctcctgctcctctacttcacactgtccacgtgctcagcgcctatgccagcattgagcccctcactggagtattcaaggacccaagggtcctggacttgctcatgcacatgttgagtagtcctgattatcagattcgctggagtgcaggccggatgatacaagccctgtcctcccatgacgctggtgaggggcagtgtggggaggaagggaaagcaggagaagggctgggtcggctcagggactcacaggacactgtggcaggagcctctgatctcatcaggacccggactcagatccttctgtcactgagccaacaagaagccattgagaaacacctggattttgacagccgctgtgctctgctagcactgtttgcacaggccacgctctctgaacaccccatgtctttcgagggcattcagctaccacaggtcccaggaagggtgctcttctccctggtgaagcggtatttgcatgtcacctcgctcctggatcagctgaacgacagtgctgcggagccaggagcccagaacacctctgctcctgaggagttgagtggggagaggggtcaactggagctggagttcagtatggccatgggcaccctgatctcggagctggtgcaagccatgcgctgggaccaggcctcagacagaccaaggagctcagcacggtcccccggttccatcttccagcctcagctggcagatgtgagcccagggctccccgctgcccaggctcagccctccttcaggaggtcaagacgttttcgccctcgttctgagttcgcaagtggcaatacctatgctttgtatgtgcgggacacactgcagccggggatgcgagtgcggatgctggatgattatgaggagatcagtgccggggatgagggcgagtttcggcagagcaacaacggtgtgcctcctgtgcaggtattttgggagtcaacaggccgcacctattgggtgcactggcacatgctggagatcttgggctttgaggaagacattgaggacatggttgaggctgatgagtaccaaggggcagtggccagtagagtcctgggtagagccctgcctgcctggcgctggaggcccatgacagaactctatgctgtgccttatgtgctgcctgaggatgaggacactgaggagtgtgaacacctgaccctggctgagtggtgggaactcctcttcttcatcaagaagctggatggacctgaccatcaggaggttctccagatcctccaggagaacctagatggggagattctggatgatgagatcctagctgaactggccgtgcccatagaattggcccaggacttgctgctgactctgccacagcgactcaatgacagtgccctcagggacctgatcaactgccatgtctacaagaagtatgggcctgaagccctagcagggaaccaagcctacccatcccttctagaagcccaagaagatgtcctcctgctagacgcgcaggcccaggctaaggactcagaagatgcagccaaagtggaagcaaaagaacccccatctcagagtcccaacactcccctgcagcgtctggtggagggttatggtccagctgggaaaatcctcctggatctagagcaagccctcagctcagaggggacccaggagaacaaggtcaagccactcctgctgcagctgcagcggcagccgcagcccttcctggcactgatgcagagcctggacactccggagactaacaggaccctgcacctgactgtgctgagaatcctgaagcagctggtggacttccccgaggcactgctgctcccctggcacgaggccgtggatgcctgcatggcctgcctgcggtccccaaacactgatcgagaggtgctccaggaactgattttcttcctgcaccgcctgacctcagtgagcagggactatgccgtggtgctgaatcagctgggagcaagagacgctatctccaaggccctggaaaagcacctgggaaagctggagctggctcaggagctgcgggacatggtgttcaagtgtgagaagcatgcccacctctaccgcaaactcatcaccaacatcctgggaggctgcatccagatggtgctgggccagatcgaagaccacagacgaacccaccaacccatcaacatccctttctttgatgtgttcctcagatacctgtgccagggctccagtgtggaagtgaaggaggacaagtgctgggagaaggtggaggtgtcctccaacccgcaccgggccagcaagctgacggaccacaaccccaagacctattgggagtccaacggcagcgccggctcccactacatcaccctgcacatgcgccggggcatcctcatcaggcaactgactctgcttgtggctagtgaggactcgagttacatgccggcccgagtggtggtgtgcgggggtgatagcactagctctcttcacacggaactcaactcggtgaatgtgatgccctctgccagccgggtgatcctcctggagaacctgacccgcttctggcccatcatccagatccgcataaagcgctgccagcagggtggcattgatacgcgcattcgggggttagagatcctaggccccaagcccacgttctggccagtgttccgggagcagctctgtcgtcacacacgcctcttctacatggttcgggcacaggcctggagccaggacatggcagaggaccgcaggagcctcctgcacctgagttctagactcaacggtgctctgcgccaggagcagaattttgctgaccgcttcctccctgatgacgaggctgcccaagctctgggcaagacctgctgggaggccctggtcagccccgtggtgcagaacatcacctcccctgatgaggatggcattagccccctgggttggctgctggaccagtacctggagtgtcaggaagctgtcttcaacccccagagccgcggcccagctttcttctcgcgggtgcgccgtctcactcacctgctggtgcatgtcgagccctgtgaggcaccccctcctgtggtggccactcctcggcccaaaggcagaaacagaagccacgactggagctccttggctacccggggccttccaagcagcatcatgagaaacctgacgcgctgttggcgggccgtggtggagaagcaggtgaacaattttctgacctcatcctggcgggatgatgactttgtgccacgctactgtgagcactttaatattctgcagaactcaagctctgaactgtttgggcctcgggcagccttcttgctggcgctgcaaaatggctgtgcgggagccttgctgaagctcccttttctcaaagctgcccacgtgagtgagcagttcgcccggcacattgaccagcagatccagggcagccggatcggtggagcccaggaaatggagaggctggcacagctgcagcaatgcctgcaagctgtcctgattttctccggcttggagatagccaccacttttgagcattattaccagcactacatggcggaccgtctcctgggcgtggtctcgagctggctggagggggccgtgctggagcagatcggtccctgcttccccaaccgcctcccccagcagatgttgcagagcctgagcacctctaaggagctgcagcgccagttccacgtctaccagctccagcagctggatcaggaactcctgaagctggaggatacagagaagaaaatacaggtgggccttggggccagtggcaaggagcacaagagcgagaaggaagaggaagctggggcagcagcagtggtggatgtggcggagggagaggaggaagaggaggagaatgaggacctctactatgaaggggcaatgccagaagtgtctgtgcttgtcctgtcccgacactcctggcctgttgcctcaatctgccacacactgaaccccagaacctgcctgccctcctacctgaggggcactttgaacagatactccaacttctacaacaagagtcagagccaccctgcccttgagcgaggctcacagaggcgactgcagtggacgtggctgggctgggctgagctgcagtttgggaaccagaccctgcatgtgtccaccgtgcagatgtggctactgctgtatctcaacgacctgaaggcggtctctgtggagagtctgctggcgttctcagggctctccgcagacatgctcaatcaggcgattgggcccctcacctcttcaagaggccccctggaccttcacgagcaaaaggatataccaggaggggtcctcaagattcgagatggcagcaaggaacccaggtcgagatgggacattgtgcggctcatcccacctcagacgtacctgcaagctgagggtgaagacggccagaacttggagaagagacggaatcttctgaactgcctcatcgtccgaatcctcaaggcccatggagatgaggggctgcacattgaccagcttgtctgtctggtgctggaggcttggcagaagggcccgtgtcctcccaggggtttggtcagcagccttggtaaggggtctgcatgcagcagcactgacgtcctctcctgcatcctacacctcctgggcaagggcacgctgagacgccatgacgaccggccccaggtgctgtcctatgcagtccctgtgactgtcatggagcctcacactgagtccctgaacccaggctcctcaggccccaacccacccctcaccttccataccctacagattcgctcccggggtgtgccctatgcctcctgcactgccacccagagcttctctaccttccggtagccctagacttggggtcaggggaaggtagagctggagcttttacagaaataaaacccaagagtttgatt

SEQ ID NO: 5087 - DNA, 3321 bp, Homo sapiens
  source 1..3321: mol_type = unassigned DNA; mol_type = unassigned DNA
attataaaaagccacagatctctggcggcggcaaggggacagcactgagctctgccgcctggctctagccgcctgcctggcccccgccgggactcttgcccaccctcagccatggctccgatatctctgtcgtggctgctccgcttggccaccttctgccatctgactgtcctgctggctggacagcaccacggtgtgacgaaatgcaacatcacgtgcagcaagatgacatcaaagatacctgtagctttgctcatccactatcaacagaaccaggcatcatgcggcaaacgcgcaatcatcttggagacgagacagcacaggctgttctgtgccgacccgaaggagcaatgggtcaaggacgcgatgcagcatctggaccgccaggctgctgccctaactcgaaatggcggcaccttcgagaagcagatcggcgaggtgaagcccaggaccacccctgccgccgggggaatggacgagtctgtggtcctggagcccgaagccacaggcgaaagcagtagcctggagccgactccttcttcccaggaagcacagagggccctggggacctccccagagctgccgacgggcgtgactggttcctcagggaccaggctccccccgacgccaaaggctcaggatggagggcctgtgggcacggagcttttccgagtgcctcccgtctccactgccgccacgtggcagagttctgctccccaccaacctgggcccagcctctgggctgaggcaaagacctctgaggccccgtccacccaggacccctccacccaggcctccactgcgtcctccccagccccagaggagaatgctccgtctgaaggccagcgtgtgtggggtcagggacagagccccaggccagagaactctctggagcgggaggagatgggtcccgtgccagcgcacacggatgccttccaggactgggggcctggcagcatggcccacgtctctgtggtccctgtctcctcagaagggacccccagcagggagccagtggcttcaggcagctggacccctaaggctgaggaacccatccatgccaccatggacccccagaggctgggcgtccttatcactcctgtccctgacgcccaggctgccacccggaggcaggcggtggggctgctggccttccttggcctcctcttctgcctgggggtggccatgttcacctaccagagcctccagggctgccctcgaaagatggcaggagagatggcggagggccttcgctacatcccccggagctgtggtagtaattcatatgtcctggtgcccgtgtgaactcctctggcctgtgtctagttgtttgattcagacagctgcctgggatccctcatcctcatacccacccccacccaagggcctggcctgagctgggatgattggaggggggaggtgggatcctccaggtgcacaagctccaagctcccaggcattccccaggaggccagccttgaccattctccacctgccagggacagagggggtggcctcccaactcaccccagccccaaaactctcctctgctgctggctggttagaggttccctttgacgccatcccagccccaatgaacaattatttattaaatgcccagccccttctgacccatgctgccctgtgagtactacagtcctcccatctcacacatgagcatcaggccaggccctctgcccactccctgcaacctgattgtgtctcttggtcctgctgcagttgccagtcaccccggccacctgcggtgctatctcccccagccccatcctctgtacagagcccacgcccccactggtgacatgtcttttcttgcatgaggctagtgtggtgtttcctggcactgcttccagtgaggctctgcccttggttaggcattgtgggaaggggagataagggtatctggtgactttcctctttggtctacactgtgctgagtctgaaggctgggttctgatcctagttccaccatcaagccaccaacatactcccatctgtgaaaggaaagagggaggtaaggaatacctgtccccctgacaacactcattgacctgaggcccttctctccagcccctggatgcagcctcacagtccttaccagcagagcaccttagacagtccctgccaatggactaacttgtctttggaccctgaggcccagagggcctgcaagggagtgagttgatagcacagaccctgccctgtgggcccccaaatggaaatgggcagagcagagaccatccctgaaggccccgcccaggcttagtcactgagacagcccgggctctgcctcccatcacccgctaagagggagggagggctccagacacatgtccaagaagcccaggaaaggctccaggagcagccacattcctgatgcttcttcagagactcctgcaggcagccaggccacaagacccttgtggtcccaccccacacacgccagattctttcctgaggctgggctcccttcccacctctctcactccttgaaaacactgttctctgccctccaagaccttctccttcacctttgtccccaccgcagacaggaccagggatttccatgatgttttccatgagtcccctgtttgtttctgaaagggacgctacccgggaagggggctgggacatgggaaaggggaagttgtaggcataaagtcaggggttcccttttttggctgctgaaggctcgagcatgcctggatggggctgcaccggctggcctggcccctcagggtccctggtggcagctcacctctcccttggattgtccccgacccttgccgtctacctgaggggcctcttatgggctgggttctacccaggtgctaggaacactccttcacagatgggtgcttggaggaaggaaacccagctctggtccatagagagcaagacgctgtgctgccctgcccacctggcctctgcactcccctgctgggtgtggcgcagcatattcaggaagctcagggcctggctcaggtggggtcactctggcagctcagagagggtgggagtgggcccaatgcactttgttctggctcttccaggctgggagagccttccaggggtgggacaccctgtgatggggccctgcctcctttgtgaggaagccgctggggccagttggtcccccttccatggactttgttagtttctccaagcaggacatggacaaggatgatctaggaagactttggaaagagtaggaagactttggaaagacttttccaaccctcatcaccaacgtctgtgccattttgtattttactaataaaatttaaaagtcttgtgaatcaa

SEQ ID NO: 5088 - DNA, 3313 bp, Homo sapiens
  source 1..3313: mol_type = unassigned DNA; mol_type = unassigned DNA
ctctggcggcggcaaggggacagcactgagctctgccgcctggctctagccgcctgcctggcccccgccgggactcttgcccaccctcagccatggctccgatatctctgtcgtggctgctccgcttggccaccttctgccatctgactgtcctgctggctggaacctctttgaactcaggacagcaccacggtgtgacgaaatgcaacatcacgtgcagcaagatgacatcaaagatacctgtagctttgctcatccactatcaacagaaccaggcatcatgcggcaaacgcgcaatcatcttggagacgagacagcacaggctgttctgtgccgacccgaaggagcaatgggtcaaggacgcgatgcagcatctggaccgccaggctgctgccctaactcgaaatggcggcaccttcgagaagcagatcggcgaggtgaagcccaggaccacccctgccgccgggggaatggacgagtctgtggtcctggagcccgaagccacaggcgaaagcagtagcctggagccgactccttcttcccaggaagcacagagggccctggggacctccccagagctgccgacgggcgtgactggttcctcagggaccaggctccccccgacgccaaaggctcaggatggagggcctgtgggcacggagcttttccgagtgcctcccgtctccactgccgccacgtggcagagttctgctccccaccaacctgggcccagcctctgggctgaggcaaagacctctgaggccccgtccacccaggacccctccacccaggcctccactgcgtcctccccagccccagaggagaatgctccgtctgaaggccagcgtgtgtggggtcagggacagagccccaggccagagaactctctggagcgggaggagatgggtcccgtgccagcgcacacggatgccttccaggactgggggcctggcagcatggcccacgtctctgtggtccctgtctcctcagaagggacccccagcagggagccagtggcttcaggcagctggacccctaaggctgaggaacccatccatgccaccatggacccccagaggctgggcgtccttatcactcctgtccctgacgcccaggctgccacccggaggcaggcggtggggctgctggccttccttggcctcctcttctgcctgggggtggccatgttcacctaccagagcctccagggctgccctcgaaagatggcaggagagatggcggagggccttcgctacatcccccggagctgtggtagtaattcatatgtcctggtgcccgtgtgaactcctctggcctgtgtctagttgtttgattcagacagctgcctgggatccctcatcctcatacccacccccacccaagggcctggcctgagctgggatgattggaggggggaggtgggatcctccaggtgcacaagctccaagctcccaggcattccccaggaggccagccttgaccattctccacctgccagggacagagggggtggcctcccaactcaccccagccccaaaactctcctctgctgctggctggttagaggttccctttgacgccatcccagccccaatgaacaattatttattaaatgcccagccccttctgacccatgctgccctgtgagtactacagtcctcccatctcacacatgagcatcaggccaggccctctgcccactccctgcaacctgattgtgtctcttggtcctgctgcagttgccagtcaccccggccacctgcggtgctatctcccccagccccatcctctgtacagagcccacgcccccactggtgacatgtcttttcttgcatgaggctagtgtggtgtttcctggcactgcttccagtgaggctctgcccttggttaggcattgtgggaaggggagataagggtatctggtgactttcctctttggtctacactgtgctgagtctgaaggctgggttctgatcctagttccaccatcaagccaccaacatactcccatctgtgaaaggaaagagggaggtaaggaatacctgtccccctgacaacactcattgacctgaggcccttctctccagcccctggatgcagcctcacagtccttaccagcagagcaccttagacagtccctgccaatggactaacttgtctttggaccctgaggcccagagggcctgcaagggagtgagttgatagcacagaccctgccctgtgggcccccaaatggaaatgggcagagcagagaccatccctgaaggccccgcccaggcttagtcactgagacagcccgggctctgcctcccatcacccgctaagagggagggagggctccagacacatgtccaagaagcccaggaaaggctccaggagcagccacattcctgatgcttcttcagagactcctgcaggcagccaggccacaagacccttgtggtcccaccccacacacgccagattctttcctgaggctgggctcccttcccacctctctcactccttgaaaacactgttctctgccctccaagaccttctccttcacctttgtccccaccgcagacaggaccagggatttccatgatgttttccatgagtcccctgtttgtttctgaaagggacgctacccgggaagggggctgggacatgggaaaggggaagttgtaggcataaagtcaggggttcccttttttggctgctgaaggctcgagcatgcctggatggggctgcaccggctggcctggcccctcagggtccctggtggcagctcacctctcccttggattgtccccgacccttgccgtctacctgaggggcctcttatgggctgggttctacccaggtgctaggaacactccttcacagatgggtgcttggaggaaggaaacccagctctggtccatagagagcaagacgctgtgctgccctgcccacctggcctctgcactcccctgctgggtgtggcgcagcatattcaggaagctcagggcctggctcaggtggggtcactctggcagctcagagagggtgggagtgggcccaatgcactttgttctggctcttccaggctgggagagccttccaggggtgggacaccctgtgatggggccctgcctcctttgtgaggaagccgctggggccagttggtcccccttccatggactttgttagtttctccaagcaggacatggacaaggatgatctaggaagactttggaaagagtaggaagactttggaaagacttttccaaccctcatcaccaacgtctgtgccattttgtattttactaataaaatttaaaagtcttgt

SEQ ID NO: 5089 - DNA, 563 bp, Homo sapiens
  source 1..563: mol_type = unassigned DNA; mol_type = unassigned DNA
gccgcctgcctggcccccgccgggactcttgcccaccctcagccatggctccgatatctctgtcgtggctgctccgcttggccaccttctgccatctgactgtcctgctggctgcttggagacgagacagcacaggctgttctgtgccgacccgaaggagcaatgggtcaaggacgcgatgcagcatctggaccgccaggctgctgccctaactcgaaatggcggcaccttcgagaagcagatcggcgaggtgaagcccaggaccacccctgccgccgggggaatggacgagtctgtggtcctggagcccgaagccacaggcgaaagcagtagcctggagccgactccttcttcccaggaagcacagagggccctggggacctccccagagctgccgacgggcgtgactggttcctcagggaccaggctccccccgacgccaaaggctcaggatggagggcctgtgggcacggagcttttccgagtgcctcccgtctccactgccgccacgtggcagagttctgctccccaccaacctgggcccagcctctgggctgaggcaa

SEQ ID NO: 5090 - DNA, 5796 bp, Homo sapiens
  source 1..5796: mol_type = unassigned DNA; mol_type = unassigned DNA
acaggctccccaggtcagttaaacaatcttcctggcagaaccaagaactgagccgggccaggaccattcagggaccgtggcagagggtggggactttggagacaggatgactctgtggctctttaaagccctggaggtgggcaatggcttttcccatcttggatttggggagcacagaatggaccttctttcctatccattgggcagcctcccttgcctcctcctgtctctggtcactcaggggcaccgtattttctggggcttcccaaagaagacacctgcaggccattttaggggactgccacctggctccactcaatagggcctggggaggctgcaggtgagtcagtctgaggttccattgcagaaggagggtggccagcccacacagtgacttttatatcctggttactcagagagaaaggacagccctgtgacctggggagcccctcctgcacacagcccccaaccccctgaagctactagtgcttctccttgatgactcaacccagacctgccggccctaaaccaccttcccacaaagcagggtgggccaaagctaagggggagcgatggagagaggaagcagcagactctacaaagtctctctgtgtgtgcaagcgtgcatgtgcctgtatttgggaaagtggtgtatgtttgcatggccacatatatgtaaatatttatgcatgagcagttcgtgttctggtggagcccagggatgccctgggggtttcccaggctctgaagggctagataagatcagcttgctctcttgactgccctggtctccagatgtttgcaaaaccctctggggtcttgcttttgctgcatataaccttgactcagatctgaaactcaagctcttccttgttttttatactcatcctccttgagctcaagctaagcagaagaaaatttgctggagattatagaggaagagaaaaggtggaaattcaatgtaaacaacttcaaatgtttatatcaaatagttgggtttatttgtcctgtcccggggtttctctctggttccacgtgacactcagctactgcctgccccttccgccccactctgcccccaccttattcataccgtccatctccaaccctcctccttactcttcttgctccaggaatttcaaatgcctcttccctcctaggcaggatgactcagtacctttcagcaactgctctcgggctcattctggctctcagcagcagaacaaaggatcatctattcagcagaccccaccttccttagaaagcagttgtacttatatattttttaaaaagtttattgctgggcatagtggcttacatctgtaatcccagctattccggaggttgaagtgggagaatcacttgcggtcggggttcaagaccagcctgggcaacatagcaagaccctgtctcttaaaaaaattagccaggcatggtagcaggcacctgtagtcccagctacttgggaggctgaggcaagagatctcttttttttttttcttttttttttgagacggagtcttgttctgtcacccaggctttagtgcagtggtatgatctcagctcactgcaacctctgcctcccggattcaagcaattctcctgtctcagcttcccgagtagctgggactaaaggtgcacaccatcatgccaggctaatttgtgtatttgtagtagagacaaggtttcaccatattgatcaggctggtctcaaactcctgacctcagatgatctatctgtctcggcctcccaaagtgctgggattacaggtgtgagccaccgcacccggccaggaggatttcttgagcccaggattttgaggttgccgtgagctaggattataccactgcactccagcctgggcaacagaacaagaccctatctcttaaaaaaaaatggcagcgggaagaaataaggcagaggtgaggggataggcaaggccacaggcccggtggggactagagcaggagaacctgctccatcacttgctggctgtgtgaccttagcaggtccctgtcactctcagattcatcccccctgctgcacaatggaccacttaattttaaaaattaactcgggcatggtggctcacgcctgtaatcccagcactttgggaggccaaggagggcagatcacctgaggtcgggagtctgagaccagcctgaccaacatggagaaaccccgtctctactaaaaatacaaaattagccaggagtcgtggcacatgcctgtaatcccagctattcgggagtctgaggcaggagaatcgcttgaatctgggaggccgaggttgcggtgagccgagatcatgccattgcactccagcctgggcaacaagagcaagactccaactcaaaaaaaaaaaaattaaactcttaatatgtgccaggcaaaaagaactctataaataagaattcacgtttcttattcttacaacaagactatgaggtagatgctatttttgttcctattttacaggtggggaaactgaggcatagagaagtttggcaggggagggaggctgagtcaaaggccttgaaggccagggtgtacaggggatcagttttggcttgggtggtgtggccgggacaatctggcacggggttgggaagccagatgcccacagacatccctgctgaccaggaacctctttgaactcaggacagcaccacggtgtgacgaaatgcaacatcacgtgcagcaagatgacatcaaagatacctgtagctttgctcatccactatcaacagaaccaggcatcatgcggcaaacgcgcaatcatcttggagacgagacagcacaggctgttctgtgccgacccgaaggagcaatgggtcaaggacgcgatgcagcatctggaccgccaggctgctgccctaactcgaaatggcggcaccttcgagaagcagatcggcgaggtgaagcccaggaccacccctgccgccgggggaatggacgagtctgtggtcctggagcccgaagccacaggcgaaagcagtagcctggagccgactccttcttcccaggaagcacagagggccctggggacctccccagagctgccgacgggcgtgactggttcctcagggaccaggctccccccgacgccaaaggctcaggatggagggcctgtgggcacggagcttttccgagtgcctcccgtctccactgccgccacgtggcagagttctgctccccaccaacctgggcccagcctctgggctgaggcaaagacctctgaggccccgtccacccaggacccctccacccaggcctccactgcgtcctccccagccccagaggagaatgctccgtctgaaggccagcgtgtgtggggtcagggacagagccccaggccagagaactctctggagcgggaggagatgggtcccgtgccagcgcacacggatgccttccaggactgggggcctggcagcatggcccacgtctctgtggtccctgtctcctcagaagggacccccagcagggagccagtggcttcaggcagctggacccctaaggctgaggaacccatccatgccaccatggacccccagaggctgggcgtccttatcactcctgtccctgacgcccaggctgccacccggaggcaggcggtggggctgctggccttccttggcctcctcttctgcctgggggtggccatgttcacctaccagagcctccagggctgccctcgaaagatggcaggagagatggcggagggccttcgctacatcccccggagctgtggtagtaattcatatgtcctggtgcccgtgtgaactcctctggcctgtgtctagttgtttgattcagacagctgcctgggatccctcatcctcatacccacccccacccaagggcctggcctgagctgggatgattggaggggggaggtgggatcctccaggtgcacaagctccaagctcccaggcattccccaggaggccagccttgaccattctccacctgccagggacagagggggtggcctcccaactcaccccagccccaaaactctcctctgctgctggctggttagaggttccctttgacgccatcccagccccaatgaacaattatttattaaatgcccagccccttctgacccatgctgccctgtgagtactacagtcctcccatctcacacatgagcatcaggccaggccctctgcccactccctgcaacctgattgtgtctcttggtcctgctgcagttgccagtcaccccggccacctgcggtgctatctcccccagccccatcctctgtacagagcccacgcccccactggtgacatgtcttttcttgcatgaggctagtgtggtgtttcctggcactgcttccagtgaggctctgcccttggttaggcattgtgggaaggggagataagggtatctggtgactttcctctttggtctacactgtgctgagtctgaaggctgggttctgatcctagttccaccatcaagccaccaacatactcccatctgtgaaaggaaagagggaggtaaggaatacctgtccccctgacaacactcattgacctgaggcccttctctccagcccctggatgcagcctcacagtccttaccagcagagcaccttagacagtccctgccaatggactaacttgtctttggaccctgaggcccagagggcctgcaagggagtgagttgatagcacagaccctgccctgtgggcccccaaatggaaatgggcagagcagagaccatccctgaaggccccgcccaggcttagtcactgagacagcccgggctctgcctcccatcacccgctaagagggagggagggctccagacacatgtccaagaagcccaggaaaggctccaggagcagccacattcctgatgcttcttcagagactcctgcaggcagccaggccacaagacccttgtggtcccaccccacacacgccagattctttcctgaggctgggctcccttcccacctctctcactccttgaaaacactgttctctgccctccaagaccttctccttcacctttgtccccaccgcagacaggaccagggatttccatgatgttttccatgagtcccctgtttgtttctgaaagggacgctacccgggaagggggctgggacatgggaaaggggaagttgtaggcataaagtcaggggttcccttttttggctgctgaaggctcgagcatgcctggatggggctgcaccggctggcctggcccctcagggtccctggtggcagctcacctctcccttggattgtccccgacccttgccgtctacctgaggggcctcttatgggctgggttctacccaggtgctaggaacactccttcacagatgggtgcttggaggaaggaaacccagctctggtccatagagagcaagacgctgtgctgccctgcccacctggcctctgcactcccctgctgggtgtggcgcagcatattcaggaagctcagggcctggctcaggtggggtcactctggcagctcagagagggtgggagtgggcccaatgcactttgttctggctcttccaggctgggagagccttccaggggtgggacaccctgtgatggggccctgcctcctttgtgaggaagccgctggggccagttggtcccccttccatggactttgttagtttctccaagcaggacatggacaaggatgatctaggaagactttggaaagagtaggaagactttggaaagacttttccaaccctcatcaccaacgtctgtgccattttgtattttactaataaaatttaaaagtcttgtg

SEQ ID NO: 5091 - DNA, 3106 bp, Homo sapiens
  source 1..3106: mol_type = unassigned DNA
aatactcgtctctggtaaagtctgagcaggacagggtggctgactggcagatccagaggttcccttggcagtccacgccaggccttcaccatggatcagttccctgaatcagtgacagaaaactttgagtacgatgatttggctgaggcctgttatattggggacatcgtggtctttgggactgtgttcctgtccatattctactccgtcatctttgccattggcctggtgggaaatttgttggtagtgtttgccctcaccaacagcaagaagcccaagagtgtcaccgacatttacctcctgaacctggccttgtctgatctgctgtttgtagccactttgcccttctggactcactatttgataaatgaaaagggcctccacaatgccatgtgcaaattcactaccgccttcttcttcatcggcttttttggaagcatattcttcatcaccgtcatcagcattgataggtacctggccatcgtcctggccgccaactccatgaacaaccggaccgtgcagcatggcgtcaccatcagcctaggcgtctgggcagcagccattttggtggcagcaccccagttcatgttcacaaagcagaaagaaaatgaatgccttggtgactaccccgaggtcctccaggaaatctggcccgtgctccgcaatgtggaaacaaattttcttggcttcctactccccctgctcattatgagttattgctacttcagaatcatccagacgctgttttcctgcaagaaccacaagaaagccaaagccattaaactgatccttctggtggtcatcgtgtttttcctcttctggacaccctacaacgttatgattttcctggagacgcttaagctctatgacttctttcccagttgtgacatgaggaaggatctgaggctggccctcagtgtgactgagacggttgcatttagccattgttgcctgaatcctctcatctatgcatttgctggggagaagttcagaagatacctttaccacctgtatgggaaatgcctggctgtcctgtgtgggcgctcagtccacgttgatttctcctcatctgaatcacaaaggagcaggcatggaagtgttctgagcagcaattttacttaccacacgagtgatggagatgcattgctccttctctgaagggaatcccaaagccttgtgtctacagagaacctggagttcctgaacctgatgctgactagtgaggaaagatttttgttgttatttcttacaggcacaaaatgatggacccaatgcacacaaaacaaccctagagtgttgttgagaattgtgctcaaaatttgaagaatgaacaaattgaactctttgaatgacaaagagtagacatttctcttactgcaaatgtcatcagaactttttggtttgcagatgacaaaaattcaactcagactagtttagttaaatgagggtggtgaatattgttcatattgtggcacaagcaaaagggtgtctgagccctcaaagtgaggggaaaccagggcctgagccaagctagaattccctctctctgactctcaaatcttttagtcattatagatcccccagactttacatgacacagctttatcaccagagagggactgacacccatgtttctctggccccaagggcaaaattcccagggaagtgctctgataggccaagtttgtatcaggtgcccatccctggaaggtgctgttatccatggggaagggatatataagatggaagcttccagtccaatctcatggagaagcagaaatacatatttccaagaagttggatgggtgggtactattctgattacacaaaacaaatgccacacatcacccttaccatgtgcctgatccagcctctcccctgattacaccagcctcgtcttcattaagccctcttccatcatgtccccaaacctgcaagggctccccactgcctactgcatcgagtcaaaactcaaatgcttggcttctcatacgtccaccatggggtcctaccaatagattccccattgcctcctccttcccaaaggactccacccatcctatcagcctgtctcttccatatgacctcatgcatctccacctgctcccaggccagtaagggaaatagaaaaaccctgcccccaaataagaagggatggattccaaccccaactccagtagcttgggacaaatcaagcttcagtttcctggtctgtagaagagggataaggtacctttcacatagagatcatcctttccagcatgaggaactagccaccaactcttgcaggtctcaacccttttgtctgcctcttagacttctgctttccacacctggcactgctgtgctgtgcccaagttgtggtgctgacaaagcttggaagagcctgcaggtgctgctgcgtggcatagcccagacacagaagaggctggttcttacgatggcacccagtgagcactcccaagtctacagagtgatagccttccgtaacccaactctcctggactgccttgaatatcccctcccagtcaccttgtggcaagcccctgcccatctgggaaaataccccatcattcatgctactgccaacctggggagccagggctatgggagcagcttttttttcccccctagaaacgtttggaacaatctaaaagtttaaagctcgaaaacaattgtaataatgctaaagaaaaagtcatccaatctaaccacatcaatattgtcattcctgtattcacccgtccagaccttgttcacactctcacatgtttagagttgcaatcgtaatgtacagatggttttataatctgatttgttttcctcttaacgttagaccacaaatagtgctcgctttctatgtagtttggtaattatcattttagaagactctaccagactgtgtattcattgaagtcagatgtggtaactgttaaattgctgtgtatctgatagctctttggcagtctatatgtttgtataatgaatgagagaataagtcatgttccttcaagatcatgtaccccaatttacttgccattactcaattgataaacatttaacttgtttccaatgtttagcaaatacatattttatagaacttcca

SEQ ID NO: 5092 - DNA, 699 bp, Homo sapiens
  source 1..699: mol_type = unassigned DNA
actttgaggagaagagctgtgtgtgccccagtgtggtccagtgagtactctgggctccctctcgtgggcagggaagctgagggccccatgagctctcccagcttcctgaaggctccccattaatgagagctgactgtgctgtgctttgctgactgcagggcctgctccctgccccccacctccaggttggggccttcaccatggatcagttccctgaatcagtgacagaaaactttgagtacgatgatttggctgaggcctgttatattggggacatcgtggtctttgggactgtgttcctgtccatattctactccgtcatctttgccattggcctggtgggaaatttgttggtagtgtttgccctcaccaacagcaagaagcccaagagtgtcaccgacatttacctcctgaacctggccttgtctgatctgctgtttgtagccactttgcccttctggactcactatttgataaatgaaaagggcctccacaatgccatgtgcaaattcactaccgccttcttcttcatcggcttttttggaagcatattcttcatcaccgtcatcagcattgataggtacctggccatcgtcctggccgccaactccatgaacaaccggaccgtgcagcatggcgtcaccatcagcctaggcgtctgggcagcagccattttggtggcagcaccccagttcatgt

SEQ ID NO: 5093 - DNA, 559 bp, Homo sapiens
  source 1..559: mol_type = unassigned DNA
gcttttgtcctgtggccttctggccaaaggcagggaaaggtggccaaacactgagaccaagaacaaagaaagaaaactgctggtggacttcttccaccatgagcaggccaccaagcccgcagcactgcactgcagcccccagctctgtcctggggttgggggaggtgaggaggggcaaggtggggagcacacagagcacccgctgtcctcggaacaccacagcgactagaggccttcaccatggatcagttccctgaatcagtgacagaaaactttgagtacgatgatttggctgaggcctgttatattggggacatcgtggtctttgggactgtgttcctgtccatattctactccgtcatctttgccattggcctggtgggaaatttgttggtagtgtttgccctcaccaacagcaagaagcccaagagtgtcaccgacatttacctcctgaacctggccttgtctgatctgctgtttgtagccactttgcccttctggactcactatttgataaatgaaaagggcctccacaatgccatgtgcaaattcactaccg

SEQ ID NO: 5094 - DNA, 3255 bp, Homo sapiens
  source 1..3255: mol_type = unassigned DNA
gcttttgtcctgtggccttctggccaaaggcagggaaaggtggccaaacactgagaccaagaacaaagaaagaaaactgctggtggacttcttccaccatgagcaggccaccaagcccgcagcactgcactgcagcccccagctctgtcctggggttgggggaggtgaggaggggcaaggtggggagcacacagagcacccgctgtcctcggaacaccacagcgactagaggccttcaccatggatcagttccctgaatcagtgacagaaaactttgagtacgatgatttggctgaggcctgttatattggggacatcgtggtctttgggactgtgttcctgtccatattctactccgtcatctttgccattggcctggtgggaaatttgttggtagtgtttgccctcaccaacagcaagaagcccaagagtgtcaccgacatttacctcctgaacctggccttgtctgatctgctgtttgtagccactttgcccttctggactcactatttgataaatgaaaagggcctccacaatgccatgtgcaaattcactaccgccttcttcttcatcggcttttttggaagcatattcttcatcaccgtcatcagcattgataggtacctggccatcgtcctggccgccaactccatgaacaaccggaccgtgcagcatggcgtcaccatcagcctaggcgtctgggcagcagccattttggtggcagcaccccagttcatgttcacaaagcagaaagaaaatgaatgccttggtgactaccccgaggtcctccaggaaatctggcccgtgctccgcaatgtggaaacaaattttcttggcttcctactccccctgctcattatgagttattgctacttcagaatcatccagacgctgttttcctgcaagaaccacaagaaagccaaagccattaaactgatccttctggtggtcatcgtgtttttcctcttctggacaccctacaacgttatgattttcctggagacgcttaagctctatgacttctttcccagttgtgacatgaggaaggatctgaggctggccctcagtgtgactgagacggttgcatttagccattgttgcctgaatcctctcatctatgcatttgctggggagaagttcagaagatacctttaccacctgtatgggaaatgcctggctgtcctgtgtgggcgctcagtccacgttgatttctcctcatctgaatcacaaaggagcaggcatggaagtgttctgagcagcaattttacttaccacacgagtgatggagatgcattgctccttctctgaagggaatcccaaagccttgtgtctacagagaacctggagttcctgaacctgatgctgactagtgaggaaagatttttgttgttatttcttacaggcacaaaatgatggacccaatgcacacaaaacaaccctagagtgttgttgagaattgtgctcaaaatttgaagaatgaacaaattgaactctttgaatgacaaagagtagacatttctcttactgcaaatgtcatcagaactttttggtttgcagatgacaaaaattcaactcagactagtttagttaaatgagggtggtgaatattgttcatattgtggcacaagcaaaagggtgtctgagccctcaaagtgaggggaaaccagggcctgagccaagctagaattccctctctctgactctcaaatcttttagtcattatagatcccccagactttacatgacacagctttatcaccagagagggactgacacccatgtttctctggccccaagggcaaaattcccagggaagtgctctgataggccaagtttgtatcaggtgcccatccctggaaggtgctgttatccatggggaagggatatataagatggaagcttccagtccaatctcatggagaagcagaaatacatatttccaagaagttggatgggtgggtactattctgattacacaaaacaaatgccacacatcacccttaccatgtgcctgatccagcctctcccctgattacaccagcctcgtcttcattaagccctcttccatcatgtccccaaacctgcaagggctccccactgcctactgcatcgagtcaaaactcaaatgcttggcttctcatacgtccaccatggggtcctaccaatagattccccattgcctcctccttcccaaaggactccacccatcctatcagcctgtctcttccatatgacctcatgcatctccacctgctcccaggccagtaagggaaatagaaaaaccctgcccccaaataagaagggatggattccaaccccaactccagtagcttgggacaaatcaagcttcagtttcctggtctgtagaagagggataaggtacctttcacatagagatcatcctttccagcatgaggaactagccaccaactcttgcaggtctcaacccttttgtctgcctcttagacttctgctttccacacctggcactgctgtgctgtgcccaagttgtggtgctgacaaagcttggaagagcctgcaggtgctgctgcgtggcatagcccagacacagaagaggctggttcttacgatggcacccagtgagcactcccaagtctacagagtgatagccttccgtaacccaactctcctggactgccttgaatatcccctcccagtcaccttgtggcaagcccctgcccatctgggaaaataccccatcattcatgctactgccaacctggggagccagggctatgggagcagcttttttttcccccctagaaacgtttggaacaatctaaaagtttaaagctcgaaaacaattgtaataatgctaaagaaaaagtcatccaatctaaccacatcaatattgtcattcctgtattcacccgtccagaccttgttcacactctcacatgtttagagttgcaatcgtaatgtacagatggttttataatctgatttgttttcctcttaacgttagaccacaaatagtgctcgctttctatgtagtttggtaattatcattttagaagactctaccagactgtgtattcattgaagtcagatgtggtaactgttaaattgctgtgtatctgatagctctttggcagtctatatgtttgtataatgaatgagagaataagtcatgttccttcaagatcatgtaccccaatttacttgccattactcaattgataaacatttaacttgtttccaatgtttagcaaatacatattttatagaacttcc

SEQ ID NO: 5095 - DNA, 3215 bp, Homo sapiens
  source 1..3215: mol_type = unassigned DNA
actttgaggagaagagctgtgtgtgccccagtgtggtccagtgagtactctgggctccctctcgtgggcagggaagctgagggccccatgagctctcccagcttcctgaaggctccccattaatgagagctgactgtgctgtgctttgctgactgcagggcctgctccctgccccccacctccaggttggggccttcaccatggatcagttccctgaatcagtgacagaaaactttgagtacgatgatttggctgaggcctgttatattggggacatcgtggtctttgggactgtgttcctgtccatattctactccgtcatctttgccattggcctggtgggaaatttgttggtagtgtttgccctcaccaacagcaagaagcccaagagtgtcaccgacatttacctcctgaacctggccttgtctgatctgctgtttgtagccactttgcccttctggactcactatttgataaatgaaaagggcctccacaatgccatgtgcaaattcactaccgccttcttcttcatcggcttttttggaagcatattcttcatcaccgtcatcagcattgataggtacctggccatcgtcctggccgccaactccatgaacaaccggaccgtgcagcatggcgtcaccatcagcctaggcgtctgggcagcagccattttggtggcagcaccccagttcatgttcacaaagcagaaagaaaatgaatgccttggtgactaccccgaggtcctccaggaaatctggcccgtgctccgcaatgtggaaacaaattttcttggcttcctactccccctgctcattatgagttattgctacttcagaatcatccagacgctgttttcctgcaagaaccacaagaaagccaaagccattaaactgatccttctggtggtcatcgtgtttttcctcttctggacaccctacaacgttatgattttcctggagacgcttaagctctatgacttctttcccagttgtgacatgaggaaggatctgaggctggccctcagtgtgactgagacggttgcatttagccattgttgcctgaatcctctcatctatgcatttgctggggagaagttcagaagatacctttaccacctgtatgggaaatgcctggctgtcctgtgtgggcgctcagtccacgttgatttctcctcatctgaatcacaaaggagcaggcatggaagtgttctgagcagcaattttacttaccacacgagtgatggagatgcattgctccttctctgaagggaatcccaaagccttgtgtctacagagaacctggagttcctgaacctgatgctgactagtgaggaaagatttttgttgttatttcttacaggcacaaaatgatggacccaatgcacacaaaacaaccctagagtgttgttgagaattgtgctcaaaatttgaagaatgaacaaattgaactctttgaatgacaaagagtagacatttctcttactgcaaatgtcatcagaactttttggtttgcagatgacaaaaattcaactcagactagtttagttaaatgagggtggtgaatattgttcatattgtggcacaagcaaaagggtgtctgagccctcaaagtgaggggaaaccagggcctgagccaagctagaattccctctctctgactctcaaatcttttagtcattatagatcccccagactttacatgacacagctttatcaccagagagggactgacacccatgtttctctggccccaagggcaaaattcccagggaagtgctctgataggccaagtttgtatcaggtgcccatccctggaaggtgctgttatccatggggaagggatatataagatggaagcttccagtccaatctcatggagaagcagaaatacatatttccaagaagttggatgggtgggtactattctgattacacaaaacaaatgccacacatcacccttaccatgtgcctgatccagcctctcccctgattacaccagcctcgtcttcattaagccctcttccatcatgtccccaaacctgcaagggctccccactgcctactgcatcgagtcaaaactcaaatgcttggcttctcatacgtccaccatggggtcctaccaatagattccccattgcctcctccttcccaaaggactccacccatcctatcagcctgtctcttccatatgacctcatgcatctccacctgctcccaggccagtaagggaaatagaaaaaccctgcccccaaataagaagggatggattccaaccccaactccagtagcttgggacaaatcaagcttcagtttcctggtctgtagaagagggataaggtacctttcacatagagatcatcctttccagcatgaggaactagccaccaactcttgcaggtctcaacccttttgtctgcctcttagacttctgctttccacacctggcactgctgtgctgtgcccaagttgtggtgctgacaaagcttggaagagcctgcaggtgctgctgcgtggcatagcccagacacagaagaggctggttcttacgatggcacccagtgagcactcccaagtctacagagtgatagccttccgtaacccaactctcctggactgccttgaatatcccctcccagtcaccttgtggcaagcccctgcccatctgggaaaataccccatcattcatgctactgccaacctggggagccagggctatgggagcagcttttttttcccccctagaaacgtttggaacaatctaaaagtttaaagctcgaaaacaattgtaataatgctaaagaaaaagtcatccaatctaaccacatcaatattgtcattcctgtattcacccgtccagaccttgttcacactctcacatgtttagagttgcaatcgtaatgtacagatggttttataatctgatttgttttcctcttaacgttagaccacaaatagtgctcgctttctatgtagtttggtaattatcattttagaagactctaccagactgtgtattcattgaagtcagatgtggtaactgttaaattgctgtgtatctgatagctctttggcagtctatatgtttgtataatgaatgagagaataagtcatgttccttcaagatcatgtaccccaatttacttgccattactcaattgataaacatttaacttgtttccaatgtttagcaaatacatattttatagaacttcc

SEQ ID NO: 5096 - DNA, 3151 bp, Homo sapiens
  source 1..3151: mol_type = unassigned DNA
ggggcgggccgtgcttaccaggccgtggacttaaaccaggatgagagaacccctggaggcgtttaagttggcagacttggatttcaggaagagctctctggcttctgggtggagaatggccagtggggccttcaccatggatcagttccctgaatcagtgacagaaaactttgagtacgatgatttggctgaggcctgttatattggggacatcgtggtctttgggactgtgttcctgtccatattctactccgtcatctttgccattggcctggtgggaaatttgttggtagtgtttgccctcaccaacagcaagaagcccaagagtgtcaccgacatttacctcctgaacctggccttgtctgatctgctgtttgtagccactttgcccttctggactcactatttgataaatgaaaagggcctccacaatgccatgtgcaaattcactaccgccttcttcttcatcggcttttttggaagcatattcttcatcaccgtcatcagcattgataggtacctggccatcgtcctggccgccaactccatgaacaaccggaccgtgcagcatggcgtcaccatcagcctaggcgtctgggcagcagccattttggtggcagcaccccagttcatgttcacaaagcagaaagaaaatgaatgccttggtgactaccccgaggtcctccaggaaatctggcccgtgctccgcaatgtggaaacaaattttcttggcttcctactccccctgctcattatgagttattgctacttcagaatcatccagacgctgttttcctgcaagaaccacaagaaagccaaagccattaaactgatccttctggtggtcatcgtgtttttcctcttctggacaccctacaacgttatgattttcctggagacgcttaagctctatgacttctttcccagttgtgacatgaggaaggatctgaggctggccctcagtgtgactgagacggttgcatttagccattgttgcctgaatcctctcatctatgcatttgctggggagaagttcagaagatacctttaccacctgtatgggaaatgcctggctgtcctgtgtgggcgctcagtccacgttgatttctcctcatctgaatcacaaaggagcaggcatggaagtgttctgagcagcaattttacttaccacacgagtgatggagatgcattgctccttctctgaagggaatcccaaagccttgtgtctacagagaacctggagttcctgaacctgatgctgactagtgaggaaagatttttgttgttatttcttacaggcacaaaatgatggacccaatgcacacaaaacaaccctagagtgttgttgagaattgtgctcaaaatttgaagaatgaacaaattgaactctttgaatgacaaagagtagacatttctcttactgcaaatgtcatcagaactttttggtttgcagatgacaaaaattcaactcagactagtttagttaaatgagggtggtgaatattgttcatattgtggcacaagcaaaagggtgtctgagccctcaaagtgaggggaaaccagggcctgagccaagctagaattccctctctctgactctcaaatcttttagtcattatagatcccccagactttacatgacacagctttatcaccagagagggactgacacccatgtttctctggccccaagggcaaaattcccagggaagtgctctgataggccaagtttgtatcaggtgcccatccctggaaggtgctgttatccatggggaagggatatataagatggaagcttccagtccaatctcatggagaagcagaaatacatatttccaagaagttggatgggtgggtactattctgattacacaaaacaaatgccacacatcacccttaccatgtgcctgatccagcctctcccctgattacaccagcctcgtcttcattaagccctcttccatcatgtccccaaacctgcaagggctccccactgcctactgcatcgagtcaaaactcaaatgcttggcttctcatacgtccaccatggggtcctaccaatagattccccattgcctcctccttcccaaaggactccacccatcctatcagcctgtctcttccatatgacctcatgcatctccacctgctcccaggccagtaagggaaatagaaaaaccctgcccccaaataagaagggatggattccaaccccaactccagtagcttgggacaaatcaagcttcagtttcctggtctgtagaagagggataaggtacctttcacatagagatcatcctttccagcatgaggaactagccaccaactcttgcaggtctcaacccttttgtctgcctcttagacttctgctttccacacctggcactgctgtgctgtgcccaagttgtggtgctgacaaagcttggaagagcctgcaggtgctgctgcgtggcatagcccagacacagaagaggctggttcttacgatggcacccagtgagcactcccaagtctacagagtgatagccttccgtaacccaactctcctggactgccttgaatatcccctcccagtcaccttgtggcaagcccctgcccatctgggaaaataccccatcattcatgctactgccaacctggggagccagggctatgggagcagcttttttttcccccctagaaacgtttggaacaatctaaaagtttaaagctcgaaaacaattgtaataatgctaaagaaaaagtcatccaatctaaccacatcaatattgtcattcctgtattcacccgtccagaccttgttcacactctcacatgtttagagttgcaatcgtaatgtacagatggttttataatctgatttgttttcctcttaacgttagaccacaaatagtgctcgctttctatgtagtttggtaattatcattttagaagactctaccagactgtgtattcattgaagtcagatgtggtaactgttaaattgctgtgtatctgatagctctttggcagtctatatgtttgtataatgaatgagagaataagtcatgttccttcaagatcatgtaccccaatttacttgccattactcaattgataaacatttaacttgtttccaatgtttagcaaatacatattttatagaacttcc

SEQ ID NO: 5097 - DNA, 3532 bp, Homo sapiens
  source 1..3532: mol_type = unassigned DNA
actttcactctccgtcagccgcattgcccgctcggcgtccggcccccgacccgcgctcgtccgcccgcccgcccgcccgcccgcgccatgaacgccaaggtcgtggtcgtgctggtcctcgtgctgaccgcgctctgcctcagcgacgggaagcccgtcagcctgagctacagatgcccatgccgattcttcgaaagccatgttgccagagccaacgtcaagcatctcaaaattctcaacactccaaactgtgcccttcagattgtagcccggctgaagaacaacaacagacaagtgtgcattgacccgaagctaaagtggattcaggagtacctggagaaagctttaaacaagaggttcaagatgtgagagggtcagacgcctgaggaacccttacagtaggagcccagctctgaaaccagtgttagggaagggcctgccacagcctcccctgccagggcagggccccaggcattgccaagggctttgttttgcacactttgccatattttcaccatttgattatgtagcaaaatacatgacatttatttttcatttagtttgattattcagtgtcactggcgacacgtagcagcttagactaaggccattattgtacttgccttattagagtgtctttccacggagccactcctctgactcagggctcctgggttttgtattctctgagctgtgcaggtggggagactgggctgagggagcctggccccatggtcagccctagggtggagagccaccaagagggacgcctgggggtgccaggaccagtcaacctgggcaaagcctagtgaaggcttctctctgtgggatgggatggtggagggccacatgggaggctcacccccttctccatccacatgggagccgggtctgcctcttctgggagggcagcagggctaccctgagctgaggcagcagtgtgaggccagggcagagtgagacccagccctcatcccgagcacctccacatcctccacgttctgctcatcattctctgtctcatccatcatcatgtgtgtccacgactgtctccatggccctgcaaaaggactctcaggaccaaagctttcatgtaaactgtgcaccaagcaggaaatgaaaatgtcttgtgttacctgaaaacactgtgcacatctgtgtcttgtttggaatattgtccattgtccaatcctatgtttttgttcaaagccagcgtcctcctctgtgaccaatgtcttgatgcatgcactgttccccctgtgcagccgctgagcgaggagatgctccttgggccctttgagtgcagtcctgatcagagccgtggtcctttggggtgaactaccttggttcccccactgatcacaaaaacatggtgggtccatgggcagagcccaagggaattcggtgtgcaccagggttgaccccagaggattgctgccccatcagtgctccctcacatgtcagtaccttcaaactagggccaagcccagcactgcttgaggaaaacaagcattcacaacttgtttttggtttttaaaacccagtccacaaaataaccaatcctggacatgaagattctttcccaattcacatctaacctcatcttcttcaccatttggcaatgccatcatctcctgccttcctcctgggccctctctgctctgcgtgtcacctgtgcttcgggcccttcccacaggacatttctctaagagaacaatgtgctatgtgaagagtaagtcaacctgcctgacatttggagtgttccccttccactgagggcagtcgatagagctgtattaagccacttaaaatgttcacttttgacaaaggcaagcacttgtgggtttttgttttgtttttcattcagtcttacgaatacttttgccctttgattaaagactccagttaaaaaaaattttaatgaagaaagtggaaaacaaggaagtcaaagcaaggaaactatgtaacatgtaggaagtaggaagtaaattatagtgatgtaatcttgaattgtaactgttcttgaatttaataatctgtagggtaattagtaacatgtgttaagtattttcataagtatttcaaattggagcttcatggcagaaggcaaacccatcaacaaaaattgtcccttaaacaaaaattaaaatcctcaatccagctatgttatattgaaaaaatagagcctgagggatctttactagttataaagatacagaactctttcaaaaccttttgaaattaacctctcactataccagtataattgagttttcagtggggcagtcattatccaggtaatccaagatattttaaaatctgtcacgtagaacttggatgtacctgcccccaatccatgaaccaagaccattgaattcttggttgaggaaacaaacatgaccctaaatcttgactacagtcaggaaaggaatcatttctatttctcctccatgggagaaaatagataagagtagaaactgcagggaaaattatttgcataacaattcctctactaacaatcagctccttcctggagactgcccagctaaagcaatatgcatttaaatacagtcttccatttgcaagggaaaagtctcttgtaatccgaatctctttttgctttcgaactgctagtcaagtgcgtccacgagctgtttactagggatccctcatctgtccctccgggacctggtgctgcctctacctgacactcccttgggctccctgtaacctcttcagaggccctcgctgccagctctgtatcaggacccagaggaaggggccagaggctcgttgactggctgtgtgttgggattgagtctgtgccacgtgtttgtgctgtggtgtgtccccctctgtccaggcactgagataccagcgaggaggctccagagggcactctgcttgttattagagattacctcctgagaaaaaaggttccgcttggagcagaggggctgaatagcagaaggttgcacctcccccaaccttagatgttctaagtctttccattggatctcattggacccttccatggtgtgatcgtctgactggtgttatcaccgtgggctccctgactgggagttgatcgcctttcccaggtgctacacccttttccagctggatgagaatttgagtgctctgatccctctacagagcttccctgactcattctgaaggagccccattcctgggaaatattccctagaaacttccaaatcccctaagcagaccactgataaaaccatgtagaaaatttgttattttgcaacctcgctggactctcagtctctgagcagtgaatgattcagtgttaaatgtgatgaatactgtattttgtattgtttcaattgcatctcccagataatgtgaaaatggtccaggagaaggccaattcctatacgcagcgtgctttaaaaaataaataagaaacaactctttgagaaacaacaatttctactttgaagtcataccaatgaaaaaatgtatatgcacttataattttcctaataaagttctgtactcaaatgta

SEQ ID NO: 5098 - DNA, 665 bp, Homo sapiens
  source 1..665: mol_type = unassigned DNA
actttcactctccgtcagccgcattgcccgctcggcgtccggcccccgacccgcgctcgtccgcccgcccgcccgcccgcccgcgccatgaacgccaaggtcgtggtcgtgctggtcctcgtgctgaccgcgctctgcctcagcgacgggaagcccgtcagcctgagctacagatgcccatgccgattcttcgaaagccattattgtacttgccttattagagtgtctttccacggagccactcctctgactcagggctcctgggttttgtattctctgagctgtgcaggtggggagactgggctgagggagcctggccccatggtcagccctagggtggagagccaccaagagggacgcctgggggtgccaggaccagtcaacctgggcaaagcctagtgaaggcttctctctgtgggatgggatggtggagggccacatgggaggctcacccccttctccatccacatgggagccgggtctgcctcttctgggagggcagcagggctaccctgagctgaggcagcagtgtgaggccagggcagagtgagacccagccctcatcccgagcacctccacatcctccacgttctgctcatcattctctgtctcatccatcatcatgtgtgtccacgactgtctccatggccctgcaaaaggactct

SEQ ID NO: 5099 - DNA, 470 bp, Homo sapiens
  source 1..470: mol_type = unassigned DNA
cccgcgctcgtccgcccgcccgcccgcccgcccgcgccatgaacgccaaggtcgtggtcgtgctggtcctcgtgctgaccgcgctctgcctcagcgacgggaagcccgtcagcctgagctacagatgcccatgccgattcttcgaaagccatgttgccagagccaacgtcaagcatctcaaaattctcaacactccaaactgtgcccttcagattgtagcccggctgaagaacaacaacagacaagtgtgcattgacccgaagctaaagtggattcaggagtacctggagaaagctttaaacaaggggcgcagagaagaaaaagtggggaaaaaagaaaagataggaaaaaagaagcgacagaagaagagaaaggctgcccagaaaaggaaaaactagttatctgccacctcgagatggaccacagttcacttgctctcggcgctttgtaaatttgctcgatcctcctcc

SEQ ID NO: 5100 - DNA, 1857 bp, Homo sapiens
  source 1..1857: mol_type = unassigned DNA
actttcactctccgtcagccgcattgcccgctcggcgtccggcccccgacccgcgctcgtccgcccgcccgcccgcccgcccgcgccatgaacgccaaggtcgtggtcgtgctggtcctcgtgctgaccgcgctctgcctcagcgacgggaagcccgtcagcctgagctacagatgcccatgccgattcttcgaaagccatgttgccagagccaacgtcaagcatctcaaaattctcaacactccaaactgtgcccttcagattgtagcccggctgaagaacaacaacagacaagtgtgcattgacccgaagctaaagtggattcaggagtacctggagaaagctttaaacaagtaagcacaacagccaaaaaggactttccgctagacccactcgaggaaaactaaaaccttgtgagagatgaaagggcaaagacgtgggggagggggccttaaccatgaggaccaggtgtgtgtgtggggtgggcacattgatctgggatcgggcctgaggtttgccagcatttagaccctgcatttatagcatacggtatgatattgcagcttatattcatccatgccctgtacctgtgcacgttggaacttttattactggggtttttctaagaaagaaattgtattatcaacagcattttcaagcagttagttccttcatgatcatcacaatcatcatcattctcattctcattttttaaatcaacgagtacttcaagatctgaatttggcttgtttggagcatctcctctgctcccctggggagtctgggcacagtcaggtggtggcttaacagggagctggaaaaagtgtcctttcttcagacactgaggctcccgcagcagcgcccctcccaagaggaaggcctctgtggcactcagataccgactggggctgggcgccgccactgccttcacctcctctttcaacctcagtgattggctctgtgggctccatgtagaagccactattactgggactgtgctcagagacccctctcccagctattcctactctctccccgactccgagagcatgcttaatcttgcttctgcttctcatttctgtagcctgatcagcgccgcaccagccgggaagagggtgattgctggggctcgtgccctgcatccctctcctcccagggcctgccccacagctcgggccctctgtgagatccgtctttggcctcctccagaatggagctggccctctcctggggatgtgtaatggtccccctgcttacccgcaaaagacaagtctttacagaatcaaatgcaattttaaatctgagagctcgctttgagtgactgggttttgtgattgcctctgaagcctatgtatgccatggaggcactaacaaactctgaggtttccgaaatcagaagcgaaaaaatcagtgaataaaccatcatcttgccactaccccctcctgaagccacagcagggtttcaggttccaatcagaactgttggcaaggtgacatttccatgcataaatgcgatccacagaaggtcctggtggtatttgtaactttttgcaaggcatttttttatatatatttttgtgcacatttttttttacgtttctttagaaaacaaatgtatttcaaaatatatttatagtcgaacaattcatatatttgaagtggagccatatgaatgtcagtagtttatacttctctattatctcaaactactggcaatttgtaaagaaatatatatgatatataaatgtgattgcagcttttcaatgttagccacagtgtattttttcacttgtactaaaattgtatcaaatgtgacattatatgcactagcaataaaatgctaattgtttcatggta

SEQ ID NO: 5101 - DNA, 1052 bp, Homo sapiens
  source 1..1052: mol_type = unassigned DNA
ccccgacccgcgctcgtccgcccgcccgcccgcccgcccgcgccatgaacgccaaggtcgtggtcgtgctggtcctcgtgctgaccgcgctctgcctcagcgacgggaagcccgtcagcctgagctacagatgcccatgccgattcttcgaaagccatgttgccagagccaacgtcaagcatctcaaaattctcaacactccaaactgtgcccttcagattgtagcccggctgaagaacaacaacagacaagtgtgcattgacccgaagctaaagtggattcaggagtacctggagaaagctttaaacaacctgatcagcgccgcaccagccgggaagagggtgattgctggggctcgtgccctgcatccctctcctcccagggcctgccccacagctcgggccctctgtgagatccgtctttggcctcctccagaatggagctggccctctcctggggatgtgtaatggtccccctgcttacccgcaaaagacaagtctttacagaatcaaatgcaattttaaatctgagagctcgctttgagtgactgggttttgtgattgcctctgaagcctatgtatgccatggaggcactaacaaactctgaggtttccgaaatcagaagcgaaaaaatcagtgaataaaccatcatcttgccactaccccctcctgaagccacagcagggtttcaggttccaatcagaactgttggcaaggtgacatttccatgcataaatgcgatccacagaaggtcctggtggtatttgtaactttttgcaaggcatttttttatatatatttttgtgcacatttttttttacgtttctttagaaaacaaatgtatttcaaaatatatttatagtcgaacaattcatatatttgaagtggagccatatgaatgtcagtagtttatacttctctattatctcaaactactggcaatttgtaaagaaatatatatgatatataaatgtgattgcagcttttcaatgttagccacagtgtattttttcacttgtactaaaattgtatcaaatgtgacattatatgca

SEQ ID NO: 5102 - DNA, 803 bp, Homo sapiens
  source 1..803: mol_type = unassigned DNA
atctaacggccaaagtggttttggaaaaaaaatgcacagaagacacctactcccaccagcggagttccggagccctcgcagcctcctgttgaccgctcccgcctaatgcagccgctgaccgcccactccccgacggccaggactccccagggacagggacgtgtccccagggcaggcccctggatggacgcggcgactgaccccacttcgctggacgctgtgctgggaaggacacagagaggtggctggggcagcctgcggtcacaaagcgaggcccaaaggggcgctctcctcacccccacgtctcctgggtgccgacctgcaccctcccttcgccaccggactggggccatctgggatgtctcgggggtatccggagggctaagcaccgccgagggacggctccgtgggaagagttttctggacccagaaggcagacgccagtagtactgtcctaggagtcggaggtcggggtgggggagttctcagctctttgggtcgcacggagcttttcttggggaagcccgtcagcctgagctacagatgcccatgccgattcttcgaaagccatgttgccagagccaacgtcaagcatctcaaaattctcaacactccaaactgtgcccttcagattgtagcccggctgaagaacaacaacagacaagtgtgcattgacccgaagctaaagtggattcaggagtacctggagaaagctttaaacaagtaagcacaacagccaaaaaggactttccgctagacccactcgaggaaaactaaaaccttgtgagagatgaaagggcaaa

SEQ ID NO: 5103 - DNA, 596 bp, Homo sapiens
  source 1..596: mol_type = unassigned DNA
attgcccgctcggcgtccggcccccgacccgcgctcgtccgcccgcccgcccgcccgcccgcgccatgaacgccaaggtcgtggtcgtgctggtcctcgtgctgaccgcgctctgcctcagcgacgggaagcccgtcagcctgagctacagatgcccatgccgattcttcgaaagccatgttgccagagccaacgtcaagcatctcaaaattctcaacactccaaactgtgcccttcagattgtgtaagtcttgaaattgaacatcatctaacgaacatagttgcatctaacgaacatagtaacatctaacccgagtcttattaaaggtgtagaggtgacaagccaagtgtccaaccttgaacttggcataattagtggcagctattcttatcatgaggacctttagtatgccaccaggcattaattttaaaagccgctcttggcctgggcaccctgctgtgctcgtagtagttctctcttctttccaaacctgtgttcttcagcacagcacagctggatgctggagaaactatgggcttcaccaaggttttggctgaagcctagtaaattagccagcccttagctaataacagtg

SEQ ID NO: 5104 - DNA, 404 bp, Homo sapiens
  source 1..404: mol_type = unassigned DNA
gccgcactttcactctccgtcagccgcattgcccgctcggcgtccggcccccgacccgcgctcgtccgcccgcccgcccgcccgcccgcgccatgaacgccaaggtcgtggtcgtgctggtcctcgtgctgaccgcgctctgcctcagcgacgggaagcccgtcagcctgagctacagatgcccatgccgattcttcgaaagccattattgtacttgccttattagagtgtctttccacggagccactcctctgactcagggctcctgggttttgtattctctgagctgtgcaggtggggagactgggctgagggagcctggccccatggtcagccctagggtggagagccaccaagagggacgcctgggggtgccaggaccagtcaacctgggcaaagcctag

SEQ ID NO: 5105 - DNA, 1760 bp, Homo sapiens
  source 1..1760: mol_type = unassigned DNA
gcatattaatgagctcgctcgctgcgagggcaggagcggatttaaaagaggccagggcgggcggagggaggctgtggagagagcgcggagacaagcgcagagcgcagcgcacggccacagacagccctgggcatccaccgacggcgcagccggagccagcagagccggaaggcgcgccccgggcagagaaagccgagcagagctgggtggcgtctccgggccgccgctccgacgggccagcgccctccccatgtccctgctcccacgccgcgcccctccggtcagcatgaggctcctggcggccgcgctgctcctgctgctgctggcgctgtacaccgcgcgtgtggacgggtccaaatgcaagtgctcccggaagggacccaagatccgctacagcgacgtgaagaagctggaaatgaagccaaagtacccgcactgcgaggagaagatggttatcatcaccaccaagagcgtgtccaggtaccgaggtcaggagcactgcctgcaccccaagctgcagagcaccaagcgcttcatcaagtggtacaacgcctggaacgagaagcgcagggtctacgaagaatagggtgaaaaacctcagaagggaaaactccaaaccagttgggagacttgtgcaaaggactttgcagattaaaaaaaaaaaaaaaaaaaaaaaaaaaaaaaaaaaaaaaaaaagcctttctttctcacaggcataagacacaaattatatattgttatgaagcactttttaccaacggtcagtttttacattttatagctgcgtgcgaaaggcttccagatgggagacccatctctcttgtgctccagacttcatcacaggctgctttttatcaaaaaggggaaaactcatgcctttcctttttaaaaaatgcttttttgtatttgtccatacgtcactatacatctgagctttataagcgcccgggaggaacaatgagcttggtggacacatttcattgcagtgttgctccattcctagcttgggaagcttccgcttagaggtcctggcgcctcggcacagctgccacgggctctcctgggcttatggccggtcacagcctcagtgtgactccacagtggcccctgtagccgggcaagcaggagcaggtctctctgcatctgttctctgaggaactcaagtttggttgccagaaaaatgtgcttcattcccccctggttaatttttacacaccctaggaaacatttccaagatcctgtgatggcgagacaaatgatccttaaagaaggtgtggggtctttcccaacctgaggatttctgaaaggttcacaggttcaatatttaatgcttcagaagcatgtgaggttcccaacactgtcagcaaaaaccttaggagaaaacttaaaaatatatgaatacatgcgcaatacacagctacagacacacattctgttgacaagggaaaaccttcaaagcatgtttctttccctcaccacaacagaacatgcagtactaaagcaatatatttgtgattccccatgtaattcttcaatgttaaacagtgcagtcctctttcgaaagctaagatgaccatgcgccctttcctctgtacatatacccttaagaacgccccctccacacactgccccccagtatatgccgcattgtactgctgtgttatatgctatgtacatgtcagaaaccattagcattgcatgcaggtttcatattctttctaagatggaaagtaataaaatatatttgaaatgtaccaaaa

SEQ ID NO: 5106 - DNA, 1971 bp, Homo sapiens
  source 1..1971: mol_type = unassigned DNA
aatgtgtgcgcgctgtggtatgggtgtgcaagtgtgcgaaggcggcgtgttgtgtgagcgagagggtagcggatgtgtgtgtgcgtgtgcgcgcgtggctccgggtgtgcgccgctgcgatagcgggtcctttcccggggcgggcgacgggcgggctgggaaggtctcctcccctcaccacattgagaaatctcagtgagtcaccgagtggttctgcatattaatgagctcgctcgctgcgagggcaggagcggatttaaaagaggccagggcgggcggagggaggctgtggagagagcgcggagacaagcgcagagcgcagcgcacggccacagacagccctgggcatccaccgacggcgcagccggagccagcagagccggaaggcgcgccccgggcagagaaagccgagcagagctgggtggcgtctccgggccgccgctccgacgggccagcgccctccccatgtccctgctcccacgccgcgcccctccggtcagcatgaggctcctggcggccgcgctgctcctgctgctgctggcgctgtacaccgcgcgtgtggacgggtccaaatgcaagtgctcccggaagggacccaagatccgctacagcgacgtgaagaagctggaaatgaagccaaagtacccgcactgcgaggagaagatggttatcatcaccaccaagagcgtgtccaggtaccgaggtcaggagcactgcctgcaccccaagctgcagagcaccaagcgcttcatcaagtggtacaacgcctggaacgagaagcgcagggtctacgaagaatagggtgaaaaacctcagaagggaaaactccaaaccagttgggagacttgtgcaaaggactttgcagattaaaaaaaaaaaaaaaaaaaaaaaaaaaaaaaaaaaaaaaaaaagcctttctttctcacaggcataagacacaaattatatattgttatgaagcactttttaccaacggtcagtttttacattttatagctgcgtgcgaaaggcttccagatgggagacccatctctcttgtgctccagacttcatcacaggctgctttttatcaaaaaggggaaaactcatgcctttcctttttaaaaaatgcttttttgtatttgtccatacgtcactatacatctgagctttataagcgcccgggaggaacaatgagcttggtggacacatttcattgcagtgttgctccattcctagcttgggaagcttccgcttagaggtcctggcgcctcggcacagctgccacgggctctcctgggcttatggccggtcacagcctcagtgtgactccacagtggcccctgtagccgggcaagcaggagcaggtctctctgcatctgttctctgaggaactcaagtttggttgccagaaaaatgtgcttcattcccccctggttaatttttacacaccctaggaaacatttccaagatcctgtgatggcgagacaaatgatccttaaagaaggtgtggggtctttcccaacctgaggatttctgaaaggttcacaggttcaatatttaatgcttcagaagcatgtgaggttcccaacactgtcagcaaaaaccttaggagaaaacttaaaaatatatgaatacatgcgcaatacacagctacagacacacattctgttgacaagggaaaaccttcaaagcatgtttctttccctcaccacaacagaacatgcagtactaaagcaatatatttgtgattccccatgtaattcttcaatgttaaacagtgcagtcctctttcgaaagctaagatgaccatgcgccctttcctctgtacatatacccttaagaacgccccctccacacactgccccccagtatatgccgcattgtactgctgtgttatatgctatgtacatgtcagaaaccattagcattgcatgcaggtttcatattctttctaagatggaaagtaataaaatatatttgaaatgtacc

SEQ ID NO: 5107 - DNA, 2538 bp, Homo sapiens
  source 1..2538: mol_type = unassigned DNA
ccatgagttcagggaatttccccagcatcccaaagcttgagtttcctgtcagtggggagagatgagtgtagataaaaggagtgcagaaggcacgaggaagccacagtgctccggatcctccaatcttcgctcctccaatctccgctcctccacccagttcaggaacccgcgaccgctcgcagcgctctcttgaccactatgagcctcctgtccagccgcgcggcccgtgtccccggtccttcgagctccttgtgcgcgctgttggtgctgctgctgctgctgacgcagccagggcccatcgccagcgctggtcctgccgctgctgtgttgagagagctgcgttgcgtttgtttacagaccacgcaaggagttcatcccaaaatgatcagtaatctgcaagtgttcgccataggcccacagtgctccaaggtggaagtggtagcctccctgaagaacgggaaggaaatttgtcttgatccagaagccccttttctaaagaaagtcatccagaaaattttggacggtggaaacaaggaaaactgattaagagaaatgagcacgcatggaaaagtttcccagtcttcagcagagaagttttctggaggtctctgaacccagggaagacaagaaggaaagattttgttgttgtttgtttatttgtttttccagtagttagctttcttcctggattcctcactttgaagagtgtgaggaaaacctatgtttgccgcttaagctttcagctcagctaatgaagtgtttagcatagtacctctgctatttgctgttattttatctgctatgctattgaagttttggcaattgactatagtgtgagccaggaatcactggctgttaatctttcaaagtgtcttgaattgtaggtgactattatatttccaagaaatattccttaagatattaactgagaaggctgtggatttaatgtggaaatgatgtttcataagaattctgttgatggaaatacactgttatcttcacttttataagaaataggaaatattttaatgtttcttggggaatatgttagagaatttccttactcttgattgtgggatactatttaattatttcactttagaaagctgagtgtttcacaccttatctatgtagaatatatttccttattcagaatttctaaaagtttaagttctatgagggctaatatcttatcttcctataattttagacattctttatctttttagtatggcaaactgccatcatttacttttaaactttgattttatatgctatttattaagtattttattaggagtaccataattctggtagctaaatatatattttagatagatgaagaagctagaaaacaggcaaattcctgactgctagtttatatagaaatgtattcttttagtttttaaagtaaaggcaaacttaacaatgacttgtactctgaaagttttggaaacgtattcaaacaatttgaatataaatttatcatttagttataaaaatatatagcgacatcctcgaggccctagcatttctccttggataggggaccagagagagcttggaatgttaaaaacaaaacaaaacaaaaaaaaacaaggagaagttgtccaagggatgtcaattttttatccctctgtatgggttagattttccaaaatcataatttgaagaaggccagcatttatggtagaatatataattatatataaggtggccacgctggggcaagttccctccccactcacagctttggcccctttcacagagtagaacctgggttagaggattgcagaagacgagcgggagcggggagggcagggaagatgcctgtcgggtttttagcacagttcatttcactgggattttgaagcatttctgtctgaatgtaaagcctgttctagtcctggtgggacacactggggttgggggtgggggaagatgcggtaatgaaaccggttagtcagtgttgtcttaatatccttgataatgctgtaaagtttatttttacaaatatttctgtttaagctatttcacctttgtttggaaatccttcccttttaaagagaaaatgtgacacttgtgaaaaggcttgtaggaaagctcctccctttttttctttaaacctttaaatgacaaacctaggtaattaatggttgtgaatttctatttttgctttgtttttaatgaacatttgtctttcagaataggattctgtgataatatttaaatggcaaaaacaaaacataattttgtgcaattaacaaagctactgcaagaaaaataaaacatttcttggtaaaaacgtatgtatttatatattatatatttatatataatatatattatatatttagcattgctgagctttttagatgcctattgtgtatcttttaaaggttttgaccattttgttatgagtaattacatatatattacattcactatattaaaattgtacttttttactatgtgtctcattggttcatagtctttattttgtcctttgaataaacattaaaagatttctaaacttca

SEQ ID NO: 5108 - DNA, 1895 bp, Homo sapiens
  source 1..1895: mol_type = unassigned DNA
ttttttttcttccctctagtgggcggggcagaggagttagccaagatgtgactttgaaaccctcagcgtctcagtgcccttttgttctaaacaaagaattttgtaattggttctaccaaagaaggatataatgaagtcactatgggaaaagatggggaggagagttgtaggattctacattaattctcttgtgcccttagcccactacttcagaatttcctgaagaaagcaagcctgaattggttttttaaattgctttaaaaattttttttaactgggttaatgcttgctgaattggaagtgaatgtccattcctttgcctcttttgcagatatacacttcagataactacaccgaggaaatgggctcaggggactatgactccatgaaggaaccctgtttccgtgaagaaaatgctaatttcaataaaatcttcctgcccaccatctactccatcatcttcttaactggcattgtgggcaatggattggtcatcctggtcatgggttaccagaagaaactgagaagcatgacggacaagtacaggctgcacctgtcagtggccgacctcctctttgtcatcacgcttcccttctgggcagttgatgccgtggcaaactggtactttgggaacttcctatgcaaggcagtccatgtcatctacacagtcaacctctacagcagtgtcctcatcctggccttcatcagtctggaccgctacctggccatcgtccacgccaccaacagtcagaggccaaggaagctgttggctgaaaaggtggtctatgttggcgtctggatccctgccctcctgctgactattcccgacttcatctttgccaacgtcagtgaggcagatgacagatatatctgtgaccgcttctaccccaatgacttgtgggtggttgtgttccagtttcagcacatcatggttggccttatcctgcctggtattgtcatcctgtcctgctattgcattatcatctccaagctgtcacactccaagggccaccagaagcgcaaggccctcaagaccacagtcatcctcatcctggctttcttcgcctgttggctgccttactacattgggatcagcatcgactccttcatcctcctggaaatcatcaagcaagggtgtgagtttgagaacactgtgcacaagtggatttccatcaccgaggccctagctttcttccactgttgtctgaaccccatcctctatgctttccttggagccaaatttaaaacctctgcccagcacgcactcacctctgtgagcagagggtccagcctcaagatcctctccaaaggaaagcgaggtggacattcatctgtttccactgagtctgagtcttcaagttttcactccagctaacacagatgtaaaagacttttttttatacgataaataacttttttttaagttacacatttttcagatataaaagactgaccaatattgtacagtttttattgcttgttggatttttgtcttgtgtttctttagtttttgtgaagtttaattgacttatttatataaattttttttgtttcatattgatgtgtgtctaggcaggacctgtggccaagttcttagttgctgtatgtctcgtggtaggactgtagaaaagggaactgaacattccagagcgtgtagtgaatcacgtaaagctagaaatgatccccagctgtttatgcatagataatctctccattcccgtggaacgtttttcctgttcttaagacgtgattttgctgtagaagatggcacttataaccaaagcccaaagtggtatagaaatgctggtttttcagttttcaggagtgggttgatttcagcacctacagtgtacagtcttgtattaagttgttaataaaagtacatgttaaactta

SEQ ID NO: 5109 - DNA, 1682 bp, Homo sapiens
  source 1..1682: mol_type = unassigned DNA
cgcggccagaaacttcagtttgttggctgcggcagcaggtagcaaagtgacgccgagggcctgagtgctccagtagccaccgcatctggagaaccagcggttaccatggaggggatcagtatatacacttcagataactacaccgaggaaatgggctcaggggactatgactccatgaaggaaccctgtttccgtgaagaaaatgctaatttcaataaaatcttcctgcccaccatctactccatcatcttcttaactggcattgtgggcaatggattggtcatcctggtcatgggttaccagaagaaactgagaagcatgacggacaagtacaggctgcacctgtcagtggccgacctcctctttgtcatcacgcttcccttctgggcagttgatgccgtggcaaactggtactttgggaacttcctatgcaaggcagtccatgtcatctacacagtcaacctctacagcagtgtcctcatcctggccttcatcagtctggaccgctacctggccatcgtccacgccaccaacagtcagaggccaaggaagctgttggctgaaaaggtggtctatgttggcgtctggatccctgccctcctgctgactattcccgacttcatctttgccaacgtcagtgaggcagatgacagatatatctgtgaccgcttctaccccaatgacttgtgggtggttgtgttccagtttcagcacatcatggttggccttatcctgcctggtattgtcatcctgtcctgctattgcattatcatctccaagctgtcacactccaagggccaccagaagcgcaaggccctcaagaccacagtcatcctcatcctggctttcttcgcctgttggctgccttactacattgggatcagcatcgactccttcatcctcctggaaatcatcaagcaagggtgtgagtttgagaacactgtgcacaagtggatttccatcaccgaggccctagctttcttccactgttgtctgaaccccatcctctatgctttccttggagccaaatttaaaacctctgcccagcacgcactcacctctgtgagcagagggtccagcctcaagatcctctccaaaggaaagcgaggtggacattcatctgtttccactgagtctgagtcttcaagttttcactccagctaacacagatgtaaaagacttttttttatacgataaataacttttttttaagttacacatttttcagatataaaagactgaccaatattgtacagtttttattgcttgttggatttttgtcttgtgtttctttagtttttgtgaagtttaattgacttatttatataaattttttttgtttcatattgatgtgtgtctaggcaggacctgtggccaagttcttagttgctgtatgtctcgtggtaggactgtagaaaagggaactgaacattccagagcgtgtagtgaatcacgtaaagctagaaatgatccccagctgtttatgcatagataatctctccattcccgtggaacgtttttcctgttcttaagacgtgattttgctgtagaagatggcacttataaccaaagcccaaagtggtatagaaatgctggtttttcagttttcaggagtgggttgatttcagcacctacagtgtacagtcttgtattaagttgttaataaaagtacatgttaaact

SEQ ID NO: 5110 - DNA, 1485 bp, Homo sapiens
  source 1..1485: mol_type = unassigned DNA
attctgtgcacaagtgcagagaaggcgtgcgcgctgcctcgggactcagaccaccggtctcttccttggggaagcggggatgtcttggagcgagttacattgtctgaatttagaggcggagggcggcgtgcctgggctgagttcccaggaggagattgcgcccgctttaacttcggggttaagcgcctggtgactgttcttgacactggatatacacttcagataactacaccgaggaaatgggctcaggggactatgactccatgaaggaaccctgtttccgtgaagaaaatgctaatttcaataaaatcttcctgcccaccatctactccatcatcttcttaactggcattgtgggcaatggattggtcatcctggtcatgggttaccagaagaaactgagaagcatgacggacaagtacaggctgcacctgtcagtggccgacctcctctttgtcatcacgcttcccttctgggcagttgatgccgtggcaaactggtactttgggaacttcctatgcaaggcagtccatgtcatctacacagtcaacctctacagcagtgtcctcatcctggccttcatcagtctggaccgctacctggccatcgtccacgccaccaacagtcagaggccaaggaagctgttggctgaaaaggtggtctatgttggcgtctggatccctgccctcctgctgactattcccgacttcatctttgccaacgtcagtgaggcagatgacagatatatctgtgaccgcttctaccccaatgacttgtgggtggttgtgttccagtttcagcacatcatggttggccttatcctgcctggtattgtcatcctgtcctgctattgcattatcatctccaagctgtcacactccaagggccaccagaagcgcaaggccctcaagaccacagtcatcctcatcctggctttcttcgcctgttggctgccttactacattgggatcagcatcgactccttcatcctcctggaaatcatcaagcaagggtgtgagtttgagaacactgtgcacaagtggatttccatcaccgaggccctagctttcttccactgttgtctgaaccccatcctctatgctttccttggagccaaatttaaaacctctgcccagcacgcactcacctctgtgagcagagggtccagcctcaagatcctctccaaaggaaagcgaggtggacattcatctgtttccactgagtctgagtcttcaagttttcactccagctaacacagatgtaaaagacttttttttatacgataaataacttttttttaagttacacatttttcagatataaaagactgaccaatattgtacagtttttattgcttgttggatttttgtcttgtgtttctttagtttttgtgaagtttaattgacttatttatataaattttttttgtttcatattgatgtgtgtctaggcaggacctgtggccaagttcttagttgctgtatg

SEQ ID NO: 5111 - DNA, 4655 bp, Homo sapiens
  source 1..4655: mol_type = unassigned DNA
ctctttggccaagccctgcctctgtacagcctcgagtggacagccagaggctgcagctggagcccagagcccaagatggagccccagctggggcctgaggctgccgccctccgccctggctggctggccctgctgctgtgggtctcagccctgagctgttctttctccttgccagcttcttccctttcttctctggtgccccaagtcagaaccagctacaattttggaaggactttcctcggtcttgataaatgcaatgcctgcatcgggacatctatttgcaagaagttctttaaagaagaaataagatctgacaactggctggcttcccaccttggactgcctcccgattccttgctttcttatcctgcaaattactcagatgattccaaaatctggcgccctgtggagatctttagactggtcagcaaatatcaaaacgagatctcagacaggagaatctgtgcctctgcatcagccccaaagacctgcagcattgagcgtgtcctgcggaaaacagagaggttccagaaatggctgcaggccaagcgcctcacgccggacctggtgcagggcctggccagcccgctcctgcgctgcccttcgcagcgactcctggatcgcgtggtcaggcgctatgcagaggtggccgacgccggcagcatcttcatggaccacttcaccgaccgtgacaagctgcgcctgctctacacgctggctgtcaactcgcaccccatcctcctacagatcttccctggggctgagggatggccgctgcccaagtacctgggctcctgtggcagattcctcgtcagcaccagcaccagaccgctgcaggaattctatgatgcacccccagatcaggcagccgaccttgcctaccagctcctgggtgtcctggagtctttgaggagcaacgatttgaactatttcttctacttcacccacattgatgcaggcatgttcggcgtctttaacaacgggcatctgttcatccgggatgccagtgcagtgggcgtcatcgacaagcaggaaggcagccaagaagccaacagggcaggagagaataaagacatttttagctgcctggtttccggctgccaggcccagctgccctcctgcgaaagcatctctgagaagcagagcctggtgctggtgtgtcagaagttgctgcctcgacttctccaggggaggttcccctccccagtgcaagacgacatagactccatccttgttcagtgtggggacagcatccgcccagacccagaagtccttggggccgccagccagctgaaagacatcttgaggcccctgagaacgtgtgactccagatttgcctatcgttacccagattgcaaatataacgataagttctgaagggctggtgtctagctggccttggggacaacacgcttggctctccattctcccagtcgggttgctgcaaggtagaaagaagcagctcttttttaaagatgagaagaaaggcacactcatttcttagggactgagaggggagttgtgagataccacgtggctgtctctgctggctgggacgtcctggcaaagcccgcggtgggcatcagaagacctgggtgtggacgctcactcaatgtctttgagcctcagtttcctctgttctccaccagactctcctgagggtgaaagaagacacagatggagccaccactgagcatatatcccaagcatgggtcttgggacacatgctcaccacctccatcccaggtggttacaaagtgtgttctggaaaagcacagaggcggggagcatgagaaagagctgctcaggtcaggaggctggagtggagggaaggcaggggaaggacaggctccctgccactaccactttagactcggacaagaggggcccccttcctgctccctatggccctgcgtcactccccacaccatcgcgggatgaggagactgcaggccaaggggacatgcctgccaccacctagagcctggtacctgaggctccatacacctgcgcatggggcttctcgtggtgtgggaagaagccaggggtaagaagataaaggggggccggcgggggaccaatgtgttagcccaagtcttccaagaatatgtgtcaagatagagtgaatggaacaaagatttgttaggggaaatgattgtgtgtaaggaaagaaggagggagccggagaagattgggaggaccagtaagtcgagctgcaagctgagccccggtgaaggagagaatgtctggcaggagcttgctaagctcaaaatcaaagaaaggttcagcaaggctgtcagggtgtcctcaagacaaaggcagccatcagaagagccccgtgtctcccacaaatagaccccgttagcatccctgctgcactcagtggttggcggaaacagcaaagatagatttcagagcacagcagcaggggtccctggtcagccccgctccctagagcaggagatcttgagtgggagaacattcttgttgtagccacagctgaggccctggaccagctctctccacaccgcatgctccgagttgggactctaaggagtctaggaattttcattcaaacttggccttacaggtcactcatcagaaaaatacttttttcaaggtcaaccaatagaacatactttattcaacagtttgttagtttgctttttaaatatttagccacatggtatgtaggcttccatgtacactcttgccctggcccctgaaacataagcagggggctcttctgtacatttgcccagcttccctgccagcctttaaccccaggaacctctcagtctacctcctcttttctgcctctgaatccctacctttaaagtcagaacaggccaggcccggtggctcacgcctgtaatcccagcactttgggaggctgaggtgggtggatcacttgacatcagtagttcaagaccagcctggccaacatggtgaaaccccatccttactaaaaatacaaaaattagccaggtgtggtggcgggcacctgtaatcccagctactcaggaggctgaggcaggagaatcacttgaacccaggaggcagagtttgcagtcagccaagatcacgccactgtactccagcctggatgacacagcgagactccgtctcaaaataaataaataaaaataaagtcagaacacctggcttaataggcctcactgtgcagatgaggaaactgaggcccagggaggaagagcgatctgtggagatatttctagaacccctgcaagctgagccccagtgaaggagagaaggtccagtaggagcttgctaagctcaaaatcgaagaaaggttcagcaagactgtcagggtgacctcaaagcaatggcagccatcagaggagccccattgctattaggaggctcctattgccctccccttcagcctctgactttcacctgtgctacccaattctggttccttcactcccattcaaaaatggaccccagaaaagccttattttgtggagtacctagttcccttttgggtttgtctcttgactgctacgggcattgccccagggcaaccatgacagtgaagatgactggccaagcttgtggactggccagcaagcttgggctgcctgagacgctttgaaatggctgccttctgagttggtcttgagggtgaagactgaccacccttctcacctgcacagtcacagtccctctcctgctggcctgactgcagctgtcctcccagctggccacctgaccagagaccaggagagaggccacagcctccagaccctccagagtcccacggaggaagaaggcttaccagagagaccctctgatgcatgagccaggccccagcccttctccctgcatccaggtgtgtttccaccgcaaaatgcctccacacaatgagcgactttggccctgcgtgggtcagcatgtggtctgaggtaaccctcaaatgcctccaccacacatctgtccacctgcacgggttcaaggtaagcacttgcccccttctctcctccagaccagtcgcctgaaattctgagcaacattccttcaagactatcatgtaacccttggtgatgctgagtccagacaggaaatgcagacttgggacccacctgtatcagcagaaagaggccttgtgccccgtttgtccgagtcccagaacggagcaaatgagaaaaccggcgagctgtcccccgaggagctgtagggagattggtttttagtataaattacaataaaattttgtgtatgtgtacagctgtgttcacatccacagtgtaagctgtgatatggtttggatgtttgtcccctccaaatctcatgttgaaatgtgatccccagcattggaggtggggcctgatgggaggtgattgggtgatgggggaagttgcctcatgaatgacttggtgccctcctggaagtgatgagtgagttctcgctgagctcactcaagatgtggttgtttaaaagagtgtggcacgtccctcccccaactctccctctcactcccgctctcaccatgtgacacacctgctcccccttcgccttccaccatgattggaagcttcctgaagcccttaccagaagcagatgccagccccacacttcctgtaccacctgcagaaccataaaccaaaataaagctcttttctttatcaatt

SEQ ID NO: 5112 - DNA, 2352 bp, Homo sapiens
  source 1..2352: mol_type = unassigned DNA
aaaatctggcgccctgtggagatctttagactggtcagcaaatatcaaaacgagatctcagacaggagaatctgtgcctctgcatcagcagccgaccttgcctaccagctcctgggtgtcctggagtctttgaggagcaacgatttgaactatttcttctacttcacccacattgatgcaggcatgttcggcgtctttaacaacgggcatctgttcatccgggatgccagtgcagtgggcgtcatcgacaagcaggaaggcagccaagaagccaacagggcaggagagaataaagacatttttagctgcctggtttccggctgccaggcccagctgccctcctgcgaaagcatctctgagaagcagagcctggtgctggtgtgtcagaagttgctgcctcgacttctccaggggaggttcccctccccagtgcaagacgacatagactccatccttgttcagtgtggggacagcatccgcccagacccagaagtccttggggccgccagccagctgaaagacatcttgaggcccctgagaacgtgtgactccagatttgcctatcgttacccagattgcaaatataacgataagttctgaagggctggtgtctagctggccttggggacaacacgcttggctctccattctcccagtcgggttgctgcaaggtagaaagaagcagctcttttttaaagatgagaagaaaggcacactcatttcttagggactgagaggggagttgtgagataccacgtggctgtctctgctggctgggacgtcctggcaaagcccgcggtgggcatcagaagacctgggtgtggacgctcactcaatgtctttgagcctcagtttcctctgttctccaccagactctcctgagggtgaaagaagacacagatggagccaccactgagcatatatcccaagcatgggtcttgggacacatgctcaccacctccatcccaggtggttacaaagtgtgttctggaaaagcacagaggcggggagcatgagaaagagctgctcaggtcaggaggctggagtggagggaaggcaggggaaggacaggctccctgccactaccactttagactcggacaagaggggcccccttcctgctccctatggccctgcgtcactccccacaccatcgcgggatgaggagactgcaggccaaggggacatgcctgccaccacctagagcctggtacctgaggctccatacacctgcgcatggggcttctcgtggtgtgggaagaagccaggggtaagaagataaaggggggccggcgggggaccaatgtgttagcccaagtcttccaagaatatgtgtcaagatagagtgaatggaacaaagatttgttaggggaaatgattgtgtgtaaggaaagaaggagggagccggagaagattgggaggaccagtaagtcgagctgcaagctgagccccggtgaaggagagaatgtctggcaggagcttgctaagctcaaaatcaaagaaaggttcagcaaggctgtcagggtgtcctcaagacaaaggcagccatcagaagagccccgtgtctcccacaaatagaccccgttagcatccctgctgcactcagtggttggcggaaacagcaaagatagatttcagagcacagcagcaggggtccctggtcagccccgctccctagagcaggagatcttgagtgggagaacattcttgttgtagccacagctgaggccctggaccagctctctccacaccgcatgctccgagttgggactctaaggagtctaggaattttcattcaaacttggccttacaggtcactcatcagaaaaatacttttttcaaggtcaaccaatagaacatactttattcaacagtttgttagtttgctttttaaatatttagccacatggtatgtaggcttccatgtacactcttgccctggcccctgaaacataagcagggggctcttctgtacatttgcccagcttccctgccagcctttaaccccaggaacctctcagtctacctcctcttttctgcctctgaatccctacctttaaagtcagaacaggccaggcccggtggctcacgcctgtaatcccagcactttgggaggctgaggtgggtggatcacttgacatcagtagttcaagaccagcctggccaacatggtgaaaccccatccttactaaaaatacaaaaattagccaggtgtggtggcgggcacctgtaatcccagctactcaggaggctgaggcaggagaatcacttgaacccaggaggcagagtttgcagtcagccaagatcacgccactgtactccagcctggatgacacagcgagactccgtctc

SEQ ID NO: 5113 - DNA, 2513 bp, Homo sapiens
  source 1..2513: mol_type = unassigned DNA
ctctttggccaagccctgcctctgtacagcctcgagtggacagccagaggctgcagctggagcccagagcccaagatggagccccagctggggcctgaggctgccgccctccgccctggctggctggccctgctgctgtgggtctcagccctgagctgttctttctccttgccagcttcttccctttcttctctggtgccccaagtcagaaccagctacaattttggaaggactttcctcggtcttgataaatgcaatgcctgcatcgggacatctatttgcaagaagttctttaaagaagaaataagatctgacaactggctggcttcccaccttggactgcctcccgattccttgctttcttatcctgcaaattactcagatgattccaaaatctggcgccctgtggagatctttagactggtcagcaaatatcaaaacgagatctcagacaggagaatctgtgcctctgcatcagccccaaagacctgcagcattgagcgtgtcctgcggaaaacagagaggttccagaaatggctgcaggccaagcgcctcacgccggacctggtgcaggactgtcaccagggccagagagaactaaagttcctgtgtatgctgagataacaccagtgaaaaagcctggcatggagcccagcactgagaacttccagaaagtgttagccttctcccaactgtgttataccaaccacattttcaaatagtaatcattaaagaggcttctgcatcaaaccttcacatgcagctcccatgccaccctccagaattcaccaacacacaggcccaccagcaacaggctacctttgcacaatattctctgatgacaactccaaagccccggctctttccaccacactgtggtcccctagatggggctgttgctgagcccaccccaatccagatgtgatccccctgtgatctacttctggcaagattctcagtctggacaggtcttccctatgagatagaacctgataaggagctagggcaattctgacaacattaccaaaggcccacataacttctaaattttggtctggtctgaaggaaaacctgttcttgccctagtgatggatgaactctcttatctctggcttctagagggaaaaaaaagcatacctcttttactttttaagtacctccatcagagtcatgaaatcacctgtcaagactatctatcttttatgtttccattctggtaagaactctttaaatgaggacactgctgattgctggtgatgttttttgagcaaacactcgggggtatggatgaaagccaatcgcaggtcaaatgactccttggggaagctacttctcctctattcagatttcactaaaatcttccaagatgaaagcaaatctagatttcggtcttcattgctgtccatttttgtaatgaacgagtgtttttcctttagctagtgtatcaggcagggttctaccagagaaacagaaccagtaggagatacatatacatgtccagatttatttcaaagaattgatttacatgattgtggggattggcaagtccaaaatccatatggtaggcctgcaatctgtaaacctttgggcaggagctgatgctgtagtttgcagatagaattccttgttccttaaaaaaatctgtttttgttcttaagggctttgaatgattggatcaggcccacccagattacctagataatctcttttacttaaagtaaactgattgtaggtgctaatcacatctatgaaatgccttcacagcaacacctagattagcattcaattgaataactggggaatacagcctagccaagttgacacataaaattaaccatcacagcaacatgcctgctaaattttatcgaccgtcttcagactgttaaggattgtggtagagaactgtgacagccactctcagcatcaccctgaaccaaaggcccctatcaagtaacaatatagccaagcaaaattccagtcaatagagacattgactggttggctggcttcccaagggatagcaccagacaagaaatgcaaggatgaggaaaccaggcacgggagagagaggggcaacagaggtccagggtttggttatctttttatttttcactgggaggtggtaagttagccctgttgcccatgtatgcagatgggagaagtgatttagaaactccaaagcaattggtaatccccaaaatgggtgtatctggtttgaaatgaaaccttattttattggaaatggttggtttcccaattctgtttgccattggccaatataattgtgggtttgcacatggccagcacatgccaaacagaagtagacaaaggtctcactctgtaagtgggaccttggggaggagctgcctccatcataaagggaggggttagtaaaaatggtctcttaagcctgttcctgctacagttatagaggttgctcagaaccttctcagcaaatatagcagttatctattgttgtgtattaaaccatttcaacacatagtggcttaaaa

SEQ ID NO: 5114 - DNA, 244 bp, Homo sapiens
  source 1..244: mol_type = unassigned DNA
ggagaatctgtgcctctgcatcagccccaaagacctgcagcattgagcgtgtcctgcggaaaacagagaggttccagaaatggctgcaggccaagcgcctcacgccggacctggtgcagtgacgattcgagaaagttcctagctgcgacctctggcctgaagatctgacaggatgacccttgccagtccacccctctgccagggctcaactcacctgcatcattctctgacagctctttgccag

SEQ ID NO: 5115 - DNA, 5565 bp, Homo sapiens
  source 1..5565: mol_type = unassigned DNA
gcacacagcgactggagacggacggagagcaacgcgctgggagaggagagaccaccgacaacagacccgcgctctcacacatacactcacactcgactctttcctctccccccacctcctcctccttccacccccaccactaacaccatctcctcctccttctctctgcaacaagaaaaaaaagccatttacagttgtaacagttggaggataatgcaaaggaagacgctgcctgggaattcaccgtctgtggaaatgagccccagagaggaataaagcagccctcaccttgctctccccacccgaacccactttccccacccgcctcggcccccaccccaacaccaccatcactcccttccctcccccccacctttcccccttttccacccaggtgtcggaccaggcggtccccacttccaccctgcaccccttcttccccccctgcaccatgaacaccaatgtctgcgtggagcccgggccgagcccggaggccccgggcttgcccaaggaaagccacttgcccgagggggctctgaacagccttgtggattacaactcggaaatggagcgctaccgctcctttgccacctccttctacaagaccaacgggggcgccttcccacaggcggccaagatcgcgcgcatcaccacccccatcttccccagcagcgccgccgccgccgcggccgccgcgcgcatcggcatgtccccctggaactgcgacaacgcggccaccgccgccgccgccaccgccatgctctggggcagcggcgggggcgggggcggcggcggggggggtggcggcggcggcggcggcggcggaggcgggggcgggggtggtgggggcggcaggaaatcctcctccgccgccgcctcctcctccgcctcctcctcctcggcgatcctccccgccggcggtggcggcggcggcggcggcggcggcagcaggaccagcatgcaccaccgaaacgactcccagaggctggggaaagctggctgcccgccagagccgtcgttgcaaatggcaaatactaatttcctctccaccttatcccctgaacactgcagacctttggcgggggaatgcatgaacaagctcaaatgcggcgctgctgaagcagagataatgaatctccccgagcgcgtggggactttttccgctatcccggctttagggggcatctcattacctccaggggtcatcgtcatgacagcccttcactcccccgcagcagcctcagcagccgtcacagacagtgcgtttcaaattgccaatctggcagactgcccgcagaatcattcctcctcctcctcgtcctcctcagggggagctggcggagccaacccagccaagaagaagaggaaaaggtgtggggtctgcgtgccctgcaagaggctcatcaactgtggcgtctgcagcagttgcaggaaccgcaaaacgggacaccagatctgcaaatttagaaaatgtgaagagctaaagaaaaaacctggcacttcactagagagaacacctgttcccagcgctgaagcattccgatggttcttttaaagcagtagtatatcttattttcaaggcatttggaaatgaagggcaaactaatgtcttgttttaagaaactgcttagtccaccactgaagaaaatatccagaaattattttcattttatgtatagggctttcttcaaaaaaaaaaaaaaagaggaaaagaaaagaaaaagacataaaaataatgtgagagcttggagaattggccagtctatttactttcaatacgctgattctttctttgatgtaatttagctatagtagtgaagttgttgtctattttgaaagtggctgtaaaaaataagtttgggtaaacccctgctgtaaaatcatgtatctttgcaaagtacatatctatacttcattttcaaatatatgtgtttcagtactgtaaactgtacagatagcagcttgtattttgtgtgtttagacacaaggagacaatcatgtctgagcatctatggagattaacagtttgtacacaacagtatggttctgcaagttaaatctggagcaataaattttagctttaactattttttgccagtggtttagaagcagcaacagcactggcaccattttgccatgcatctttccatagagacttgatgccaagttttacaagactaaaagattatgatgcatccaccaattaccttcagttttattgttataagaggggaagatgttatgaaagtttcaattaatcttttgagcactatattagagtagtggttatgcacttgcattgcttacaaacgagctgtacagaagggtatacctcccaaatacttagtgtagttgacttgtcttgggttgcactgtaaggcagagtactcagagtagttggaaaatgcagaatcagttgtataatttttttttataaaaacggtgttttttaggctaaagaataaagtatcatatcttaggaggggaaaatttataactgacattttttccccagcccaatatgggctgtatacgttttattgtttcttaatttttttcttattttttctgtaggaaaaaatcttaataaaaactaccccaatgttttaacttcatgtatgatattaaatgggtagttttaacacttgaatatgttgagggcttctgccttgaggcagggcttgatatatttttaatttacaaagaattaaacatattcataaaagtgaggcattttatctctttttattttcttttctcatagccacccagttggactagtggtcttcccctggtccttcagtaaaatgctccattgctgccatttccattgttgttacttgatgctttcattcctgagaaggcagggctacagtctctggaatttcataaatgcatgacatacccctccccccacaacctacacacaaaggatctaatgcttcatagaacctgtgctaccttttcatgttggagttggttttcttatcacagtcagggttcttaaggccgtcccatcaggacaaatatttaccttccattttatttctgtttgtcccaattataaagactattttcagtttcaggagtagaacagggtttagcaaaaatatgtagagtatcaaagttacctactgcaactttttgttctttgtccactagccaggtgatttaacccactaaatccattagcttgctgaaaaatgttagcaaagtaaatcacgagaagaaagataatttgagaagagaaatggtatggtacaatgaaagaagctgtaaagattaggaaagactagtaagtgaatatttttaaaaatttagttgtagatttcaatgggatacgataggacagaaaagattttttaaaaagcagaaagagtgtttcatggtgaaagtactgggggagggtggacaaagcatgcacacatgccaatttgaaaatcaagtgtgacttacctcacgtagagtatgaatacatggtccacagttatggtcaacaagcgttttcaagaaaaactcatgatgtgttacacccatccatatttagagatgagaattaaatgattacaagctaaaatgtgctgtatactgtattaattttgagatagctttctacttgatgtatatttctttgagggtttctatctagttagaatttcagcttctgctgtgggaccaatgagagctgtatgagtttttttttttttttccttttccattattttattttttgttttttgtttaccaatttgctaattaattacaagtaagtgaaaacttactttcacacttgaatgataagcttgccttgctctttggaaaatgatgattgttattacagaagtgaaacaaacttctattcaggctacagtaggcatacaataacctaaagatctcatagaagtatactgagagtctaaaatacattctagtagtgcatgtcttggtgtgcttttgtttgtttgctttctaaaagaactaatgaatctgtatattgtaaactgtggtgttttacatgtcaattcatttttttaatgaaagaaaatttgttgattactgaaatgagaaagtgtagcttttcattaattctcttatgttttttattcttgatattgttcttttataccacccactttttaatgtttttggttaaactccatttatataatgtaggatgcatataaagttctcattggtgatgttgaagaaagagatgactcttctggcctttctctagttttcttcctcatatgtccctgtactgagaacttctaaagcttatcattataaacctaaggcagtgatttgaaagtttacatttttcatgattttcaaataccaatgaaatgtaacttttaaatattcctcactgtgtgttttatattcactgtcaagaaaattcagaatgtagattgtgtggacagctatacacaacttaataattatatatcagataaactgaataaaaaactttgtaagagtggtctacgcacacaggatcttgtcctccctaggcgtggatagagagatgccataatctgccagcatttggggagatcatggtaaatacttgaggcgttgatacatagtgcagtgagccaatttccttttcagttgtcactcagcaccataacatcacgaagaacatcattaatgcaaacctctcactaagccttcagaccaaagtggctttctgatggactctgcctgtctgtctacaagtggagtcagattcaaagtagaaatgtatccatccttgggaaagaaaataggaagtcttcccccactgtaggagtatataaaaatgtctcctggttgcttaattcccaacactcaatttccttcttctaaacacatttataaggagcaagagatggtgcacttattatgaattaatattaagcaatcactaaaagaaaggaatattctcttcctttcaatcagaaaccctgatatgtaagttgtgcaattaatgctaaagcatataaagtctttaagctgataagtatctgtaatcaaataatgaaaaaaggaaagcagttaaatgaacacactattcagggtcaaatatgttcagcaaaaagccgtagcgggtctttgatcatggttagattcacagtgatatcaaacagttggttctcatgtaacagctaaatgtttcagtttttttttttttattaaatttggcatttcacactgagatctgtattcctagtgaataaaagacagctactatattaggagggattccattttcacaattgcaaaacagatatttcaggaacatgggccacaaaatgtactcctttcacagtgttctcctcttctgaactgtgcagttatctattaaattttctaatagatatttgtgtaaggtgtatgtatgcttgtgcaattatttaaaaaacggttttggaaaacagtgtatttattaaagaaaattacttatggggcatgtacaaaactgtaaaaaaaaaaaaaaagtaaaaaaaatcacattcaatttgcccagtaaagttgtttttgtgaaatttctgtgttgttgaataaaggactttagtactc

SEQ ID NO: 5116 - DNA, 3130 bp, Homo sapiens
  source 1..3130: mol_type = unassigned DNA
ctccctcgcacacagcgactggagacggacggagagcaacgcgctgggagaggagagaccaccgacaacagacccgcgctctcacacatacactcacactcgactctttcctctccccccacctcctcctccttccacccccaccactaacaccatctcctcctccttctctctgcaacaagaaaaaaaagccatttacagggggtgatgtgcaactaattaaaggcagactggcagcgtctgcaaattctaaggctccccaaataaaaagagactgagaacacctgttcccagcgctgaagcattccgatggttcttttaaagcagtagtatatcttattttcaaggcatttggaaatgaagggcaaactaatgtcttgttttaagaaactgcttagtccaccactgaagaaaatatccagaaattattttcattttatgtatagggctttcttcaaaaaaaaaaaaaaagaggaaaagaaaagaaaaagacataaaaataatgtgagagcttggagaattggccagtctatttactttcaatacgctgattctttctttgatgtaatttagctatagtagtgaagttgttgtctattttgaaagtggctgtaaaaaataagtttgggtaaacccctgctgtaaaatcatgtatctttgcaaagtacatatctatacttcattttcaaatatatgtgtttcagtactgtaaactgtacagatagcagcttgtattttgtgtgtttagacacaaggagacaatcatgtctgagcatctatggagattaacagtttgtacacaacagtatggttctgcaagttaaatctggagcaataaattttagctttaactattttttgccagtggtttagaagcagcaacagcactggcaccattttgccatgcatctttccatagagacttgatgccaagttttacaagactaaaagattatgatgcatccaccaattaccttcagttttattgttataagaggggaagatgttatgaaagtttcaattaatcttttgagcactatattagagtagtggttatgcacttgcattgcttacaaacgagctgtacagaagggtatacctcccaaatacttagtgtagttgacttgtcttgggttgcactgtaaggcagagtactcagagtagttggaaaatgcagaatcagttgtataatttttttttataaaaacggtgttttttaggctaaagaataaagtatcatatcttaggaggggaaaatttataactgacattttttccccagcccaatatgggctgtatacgttttattgtttcttaatttttttcttattttttctgtaggaaaaaatcttaataaaaactaccccaatgttttaacttcatgtatgatattaaatgggtagttttaacacttgaatatgttgagggcttctgccttgaggcagggcttgatatatttttaatttacaaagaattaaacatattcataaaagtgaggcattttatctctttttattttcttttctcatagccacccagttggactagtggtcttcccctggtccttcagtaaaatgctccattgctgccatttccattgttgttacttgatgctttcattcctgagaaggcagggctacagtctctggaatttcataaatgcatgacatacccctccccccacaacctacacacaaaggatctaatgcttcatagaacctgtgctaccttttcatgttggagttggttttcttatcacagtcagggttcttaaggccgtcccatcaggacaaatatttaccttccattttatttctgtttgtcccaattataaagactattttcagtttcaggagtagaacagggtttagcaaaaatatgtagagtatcaaagttacctactgcaactttttgttctttgtccactagccaggtgatttaacccactaaatccattagcttgctgaaaaatgttagcaaagtaaatcacgagaagaaagataatttgagaagagaaatggtatggtacaatgaaagaagctgtaaagattaggaaagactagtaagtgaatatttttaaaaatttagttgtagatttcaatgggatacgataggacagaaaagattttttaaaaagcagaaagagtgtttcatggtgaaagtactgggggagggtggacaaagcatgcacacatgccaatttgaaaatcaagtgtgacttacctcacgtagagtatgaatacatggtccacagttatggtcaacaagcgttttcaagaaaaactcatgatgtgttacacccatccatatttagagatgagaattaaatgattacaagctaaaatgtgctgtatactgtattaattttgagatagctttctacttgatgtatatttctttgagggtttctatctagttagaatttcagcttctgctgtgggaccaatgagagctgtatgagtttttttttttttttccttttccattattttattttttgttttttgtttaccaatttgctaattaattacaagtaagtgaaaacttactttcacacttgaatgataagcttgccttgctctttggaaaatgatgattgttattacagaagtgaaacaaacttctattcaggctacagtaggcatacaataacctaaagatctcatagaagtatactgagagtctaaaatacattctagtagtgcatgtcttggtgtgcttttgtttgtttgctttctaaaagaactaatgaatctgtatattgtaaactgtggtgttttacatgtcaattcatttttttaatgaaagaaaatttgttgattactgaaatgagaaagtgtagcttttcattaattctcttatgttttttattcttgatattgttcttttataccacccactttttaatgtttttggttaaactccatttatataatgtaggatgcatataaagttctcattggtgatgttgaagaaagagatgactcttctggcctttctctagttttcttcctcatatgtccctgtactgagaacttctaaagcttatcattataaacctaaggcagtgatttgaaagtttacatttttcatgattttcaaataccaatgaaatgtaacttttaaatat

SEQ ID NO: 5117 - DNA, 363 bp, Homo sapiens
  source 1..363: mol_type = unassigned DNA
taggcttcttgacctcaaggatcttaatataaggaagaaataatttttaaaagaggcttccctgcttaccttctcacttctcctgcaataaactgtccatattcttacatctggggatgcatactggtctcaatgtatgcatagtaaaatcacgatgcacagtaatatcaaagaacacctgttcccagcgctgaagcattccgatggttcttttaaagcagtagtatatcttattttcaaggcatttggaaatgaagggcaaactaatgtcttgttttaagaaactgcttagtccaccactgaagaaaatatccagaaattattttcattttatgtatagggctttcttcaaaaaaaaaaaaa

SEQ ID NO: 5118 - DNA, 3283 bp, Homo sapiens
  source 1..3283: mol_type = unassigned DNA
gcgccccgcccctgagccggccgcccagcccccagtggggttcccggcgcggggaatgtcccgggtggagctggctgagtcgcgcgctctgctccacccgacggggctgtgtgtgctgggcctggctcgcggcgaaccgagatggcagagcagtcggacgaggccgtgaagtactacaccctagaggagattcagaagcacaaccacagcaagagcacctggctgatcctgcaccacaaggtgtacgatttgaccaaatttctggaagagcatcctggtggggaagaagttttaagggaacaagctggaggtgacgctactgagaactttgaggatgtcgggcactctacagatgccagggaaatgtccaaaacattcatcattggggagctccatccagatgacagaccaaagttaaacaagcctccggaaactcttatcactactattgattctagttccagttggtggaccaactgggtgatccctgccatctctgcagtggccgtcgccttgatgtatcgcctatacatggcagaggactgaacacctcctcagaagtcagcgcaggaagagcctgctttggacacgggagaaaagaagccattgctaactacttcaactgacagaaaccttcacttgaaaacaatgattttaatatatctctttctttttcttccgacattagaaacaaaacaaaaagaactgtcctttctgcgctcaaatttttcgagtgtgcctttttattcatctactttattttgatgtttccttaatgtgtaatttacttattataagcatgatcttttaaaaatatatttggcttttaaagtatgcaccgtgtttgcctgtttggtgtataattgtctttaatgtttagaatctggttatttagaggattccttcaatgtgttactcatccagacccacagaggccatatgactggaggtgcgggaaataggtttgagtgtctcctttcacatcgtcacatctcattgagtaaccatgtattgtatgcttccgatatagtttctttttttcaaggaaattaagaaaggccagaaattatagtttaaggatttctaataattgtcctacttgaaatagatcttaaaaagaaagtagcggctgggcatcgtggctcacacctgtaagcccagcactttgggaggctgaggtgggtggatcacttgaggtcaggagttcaagaccagcctgaccaacatggtgaaaccctgtctctactaaaaatacaaaattagcagggcgtagtggcgcatgcctgtaatcccggctacttgggaggctgaggcaggagaattgcttgaacccaggaggcagaggttgtagtgagctgagatcgcgccgttgaactccagctgggcaacaagagtgaaactctgtctcaaaaaaaaaagaaagtagcctacagggcctataagagagacttcttatcttcactgattgaaaaacatcagcaacttaaaaacacatgaaccatgagagggcatcgcaactgtccattctctcagcttacacgtatcattgcaaaggcactcacagcttcataggttctaaagttttaagaattcctcattcagagagtagaattgtttgtaaactcttctaaggaaaggctggttttctaatttgtaaggagattgtgggacattggaatctgatctttgaagaaatttagcggctagtgtcaagctctgaagagttctggtgtggctctgtctcctcctgggggctctaaggggctgattcagtcatcttacttcccatttattattctctgccttatgtgttattcttttaaatgtggaaacttgaaagctgaatttgttagaacccagtacatgtgtcattggctgtgactgcatttgcactggcatgagctgacaaaccacgaggttcttcagaagtgaccgcgtgcagtggaaaggaattgtgttgttcttacagagtacaacctttataatcaaataggatgcaccgcctttgccttctttagtcactgaaagttgacaagtagtttctatttcaaaataaattacaacacttgttaagggacctatgtaaatatttcaatatttttggttgtgatttttagctataaagcttcacattttagtagtttttaaaacattgctcctaaatcaactatgaagtgaatcgaagtgggtcagtcgtaccttagatgacattaaagggttaacttgtaaatcatttttaagatgttgagtaatagcatctgtatatcgttaagaaacataacagttgaactttgacatttttatcagtgactcagcaatttgctgctgtggctggcaatgtttcttcatgtgttttgggaacaacatgtggagtaaaggagagtttacttcctaattttaacatttacagtttgtgcagccagactctcaaggaaagatatttgacacttttttctctattgctttcccttcagagaggtgagagacttcagaggctgccctttcttttcatctgctgcttgtgaaaggaaaacatcttgggcccccagaatcactaaggaaaactcaagctggaaactgcttagggccaacctgcctcccattctactcagtcaagcctctgctcactgagagagaggcatatctgattgcttcctttggaaaggctaatcagaaactcagaagaatgcaaccctttgtgtctcacctctctgtgacctggaagctccctcctgctttgagtcttcctgcctttgcttcaaggtgtcccgcctttccaaacagaaccaatgtacttcttacatatattgatcaatgtctcatgtctccctaaaatgcataaaaccaagctgtgccctgaccaccttgggtacatgtcattaggacctcctgatgctttgtcacgggcatgtcctcaaccttggcaaagtaaactttcttttttttttttttttgtttttgagacagagtctcactctgtcgcccaggctggagtgcagtggtatgatcttggctcactgcaacctccgactcccaggttcaagtgattctcctgccccagcctcctgagtagctgggactacaggcgtatgccaccatgcctagctaatttttttgtatttttagtagagacgggatttcaccatgttagccaggctggtcttgaactcctgacctcaggcaatccacccgcctcaggctcgcaaagtgctggaattacaggcatgagccactgtgccgggcctattccttgactttcttaataaagttgttttcactttgc

SEQ ID NO: 5119 - DNA, 1173 bp, Homo sapiens
  source 1..1173: mol_type = unassigned DNA
tgagttgggaggtttgtttgattttgtttttggtggtaggagatatgtactttgagggagtaagcttcattcatctgacaagtttatttgccccgatattttcatcccatacttcacaaaggcaaagtgtcttagggtcatcagggaggcctgccgttacacatgcctgatcccatccttgtttccagctgtgggtcaggtttcaggccctgactgtggcacttctgcttcacctgcccactgggcttccccctggccagcctttaaacacactgtatttttgacagcttcagcctgaagttgaaatagtttatgactctaaaactgggagactgcagggcttaactgaagatatcatacacgtaagagatacatgcacaatctcaaatggaatttgagaggacagaagggaagaatcagtcttcagctcctccctgaattacgtgtcgcaatctgagtctaataaatgtgtgtgcacatcagcatgtacagagagctgtcatgggtgctgttcgaaactttggaactctagatagaaaatatctcttggcacttaatctgctactaatttttgctgttaaatcagatggatcaaactttgtgtttaatagctaaatgttgaatctgaaatggtaattactgaattataattttaaaaagtctcaaagtcagcattttggaagtggtactttcatagatttttaaattccataatgtgccttatcttttcattgcaggatgacagaccaaagttaaacaagcctccggaaactcttatcactactattgattctagttccagttggtggaccaactgggtgatccctgccatctctgcagtggccgtcgccttgatgtatcgcctatacatggcagaggactgaacacctcctcagaagtcagcgcaggaagagcctgctttggacacgggagaaaagaagccattgctaactacttcaactgacagaaaccttcacttgaaaacaatgattttaatatatctctttctttttcttccgacattagaaacaaaacaaaaagaactgtcctttctgcgctcaaatttttcgagtgtgcctttttattcatctactttattttgatgtttccttaatgtgtaatttacttattataagcatgatcttttaaaaatatatttggcttttaaagtat

SEQ ID NO: 5120 - DNA, 718 bp, Homo sapiens
  source 1..718: mol_type = unassigned DNA
ggctcggtgttaattaaccttttccagtcacgccttggcagccaggtgccgtgcttgactcctgagaccgcggtgtgtggctggagcaagaacacagaggccaggcagagcagcggacgttctgcgtgggactcgcccctaacagctttggaagcatcctggtggggaagaagttttaagggaacaagctggaggtgacgctactgagaactttgaggatgtcgggcactctacagatgccagggaaatgtccaaaacattcatcattggggagctccatccagatgacagaccaaagttaaacaagcctccggaaactcttatcactactattgattctagttccagttggtggaccaactgggtgatccctgccatctctgcagtggccgtcgccttgatgtatcgcctatacatggcagaggactgaacacctcctcagaagtcagcgcaggaagagcctgctttggacacgggagaaaagaagccattgctaactacttcaactgacagaaaccttcacttgaaaacaatgattttaatatatctctttctttttcttccgacattagaaacaaaacaaaaagaactgtcctttctgcgctcaaatttttcgagtgtgcctttttattcatctactttattttgatgtttccttaatgtgtaatttacttattataagcatgatcttttaaaaatatatttggcttttaaagta

SEQ ID NO: 5121 - DNA, 776 bp, Homo sapiens
  source 1..776: mol_type = unassigned DNA
gcgcgctctgctccacccgacggggctgtgtgtgctgggcctggctcgcggcgaaccgagatggcagagcagtcggacgaggccgtgaagtactacaccctagaggagattcagaagcacaaccacagcaagagcacctggctgatcctgcaccacaaggtgtacgatttgaccaaatttctggaagagcatcctggtggggaagaagttttaagggaacaagctggaggtgacgctactgagaactttgaggatgtcgggcactctacagatgccagggaaatgtccaaaacattcatcattggggagctccatccagatgacagaccaaagttaaacaagcctccggaaccttaaaggcggtgtttcaaggaaactcttatcactactattgattctagttccagttggtggaccaactgggtgatccctgccatctctgcagtggccgtcgccttgatgtatcgcctatacatggcagaggactgaacacctcctcagaagtcagcgcaggaagagcctgctttggacacgggagaaaagaagccattgctaactacttcaactgacagaaaccttcacttgaaaacaatgattttaatatatctctttctttttcttccgacattagaaacaaaacaaaaagaactgtcctttctgcgctcaaatttttcgagtgtgcctttttattcatctactttattttgatgtttccttaatgtgtaatttacttattataagcatgatcttttaaaaatatatttggcttttaaagt

SEQ ID NO: 5122 - DNA, 5913 bp, Homo sapiens
  source 1..5913: mol_type = unassigned DNA
cccgggtggagctggctgagtcgcgcgctctgctccacccgacggggctgtgtgtgctgggcctggctcgcggcgaaccgagatggcagagcagtcggacgaggccgtgaagtactacaccctagaggagattcagaagcacaaccacagcaagagcacctggctgatcctgcaccacaaggtgtacgatttgaccaaatttctggaagagcatcctggtggggaagaagttttaagggaacaagctggaggtgacgctactgagaactttgaggatgtcgggcactctacagatgccagggaaatgtccaaaacattcatcattggggagctccatccagatgacagaccaaagttaaacaagcctccggtaagtgtgaccatctcaagtatctctggatgttctcgttgtatttaatacttgtcaaactgaaggcagagggtttttatttacctgactgatgccagcacaggtctttctagataaatgaatatgtaacctactggctcagcaagtattttttatttacggaaacctgtcagtatgatttgttaggatggcgtgtgtgtaatttttttaaggctgtcagtaaactacttttttcatcataattatcaatatataccatttgaagagctactttttatggtagcacgtgcttctgatctaaaagatttgacacaagccttattttcagagaacttaaaatctgaatggatagtggttttattacttaaatctttaagggtgtgtctcatgtcttcttcatctttaagtctcttgggcatagtaggtgttcaataaatacttgtcagatgaatttaatgaaattaaataatacccttttgacttacttttccttgggaaaggaaaataactctggcaatactagttttatgttctgattcactagcctttctctctgaactgaccatctcacttatatttgaagataaatgtagggtgagaatggaagagcacagcctaagttcctgaaaagtacaagtaggcaaaatagtttctagtgtctaattaaaggactacaggggaaagttttgcttaaatcaaatgacaaaaaagaaagtataatttttcgttttggtgtaaattcttggtttcattagagaaagtgcaacagcaagaccccactgagcttgtgtcgagaactggtgagctgattttttgagctgttgctgccaagacatcatctttaatctacaaaaggatcaaagcagttaatccaataatataagcataaaggccacatttacctcaacatccctgatagtacaataaaagtcttgtgtaatactatttagtacaaagcaattttttttatattctctccttattcaagaaagacttaagttcaatgtgaatgatatgagtacttccaggagataaaaagttgacttcagaatttcaatggcctctgtgacaattgcttagaatccttgctgtgagttcatttgactttagcatcttttttgaggctactttttggacagctgaaattctgtgttgcataaagtttttcctttttctctgaagtctcttaagggaagaatatatattttttttatcatgtgttcagcatgttaatcattttggtataagtcatttagctatagcaaaacaaaggtttaagattcattagatgaacttagatgaccgcagggccagccgtctcgctaaccataaagactacaagcagaaaacacttgtaggtgtaagattgtacatgtgtctcctgccataactactttcagtttaaaggacaaagactttcttccttatttgcttttagaacacgtgtattacagcctatactctgttggattaattgcccattactatttattgttcttattttctattttaaagtggcagttactttgatactgagaatattttgggaacagagcaagtttatgtggtaaattctgggactttagcttttagtatcaaagaaagctttcctgacaacattgaggcacagccctttgtgcgttaagacatggcttacttcattccagcattagcagttgatacttgatcagcttgttagatgtagaaggtctcactgaagtttgagaatcacactaactttttaaagtagatttttgtttgtttgtttttgagacggaattttgctcttgtcacccaggctggagtgcaatggcgtgatctcggctcactgcaacatccacctgctgggttcaagcaattctcctgcctcagcctcccgagtagctgggattacaggtgcctgccaccatgcccagctaatttttgtatttttagtagagatggggtttcaccattgttggccaggcttgtcttgaactcctgacctcaggcattcgcctgcttcagcctcccaaaatgccgagattacaggtgtgagccacggcacccagcctaaagtagatgtttttactctcttcagagattttacagattaactaacttctgagtattttttaaacaactcttctttattgtgactttgcttcagtgagagcagaaccggaagaatgtgggacaagaacttgctggcctttttgagaggccataagcagatgaaatgaaaggaaatacatgagcatttttctggatgtatctttcttgtgcttttggtttagtggaagtaaagagtgtccttagggatttcttttgtcatgtgtctgtataaccatcggccgatctccaggttgaagaatgtacactgtggtctaaagttttgagatgttgcctgcttaaaatatctagttgaatagtgaaataaaatgcagtaaagattattagcttgaacctgccctaaggaaagcatagtgttaagttaccaaattaagatatttgtagacttagaaatcatgcattttaatctaacataaatgtttctatcacatttgcttacatagagaatattagtcgtagcaataccccttcttggttatagttttgaaagcattcttgtagaagttatttggtcctcacagtgtctccatgttagacctgccaagggaggtaggtacattgcagctgggaagtgttaagcacccggctcacagacgtgctccagaaccatctagcacccatctcaggctggtcagttgcagtcccttaagcttctcctctaggttctgggcttgccgtgttagacatcactctgtcagtattttaagggagataggcttcccactaaagtttacgttagatgaacttataaatgagatgactctgattcacaaaagcttgttgggctttgcatgcttttcataatttatggagcttactgtaatttacactgattcacatgacttttataagtcattatgcatgacatacttattttacttttttgagacggggtctcactctgttgcccaggctgcaatgcagcggcatggatctggactcactgcaccatccacctcccggggtcaagcaatcctcccacctcagcctcccgagtagctggaccataggcacacagcactgtgcccagctaatttttgtatttttctgtagagacagggtttcaccatgttgcccagactggtctcgaactgctggactcaagcaacccgccaatctcggcctcccaaagtgctgggattacaggcctgagccaccatgcccagactttgacacactgatttaattgttaacctctttttactgaagttgaacctcgaagtcatggagtgaacaggtggcagagccaatcataaaaaccatattctttctccttgttcattgctgacattctttgatagtcacgtccctaaacccaagtgaggccctcagagcactgaccactaaagaccaattacttttccatcaaagtgcaaagtggtaattcaaacttcctttaactgtcaagcatcctgggctacagagccaagaagataatcaacaatcaaaaggtgatacgattatttcaagttcccctctttagagttcatggctgttgctgatgatgctggtgccagagtagtgttttaaccttagcgctctcccatggtaaccacaaaggcagcaggagggcaggtgggaggttccagagttgtcagcacgttggtgaaatgcctgccctcattttaacgacgccgtggatgtttgtgtttgccttccgttggctgtttcaaacttaactttctagtttgacaatcatattttaccttcagtgattcttttgtttcagaactgattgtgtcctctaatagctaactaatatttttgtatattttgattatttctagtaatttttgttaattttattcatatatacacaatttggaaaatcctcttgctgtagttatgaatactttttatagatgctaagattttaaaattgctggaatagataataaatttgcaattttatttttaaatgacttaccttttttcccctactgtgtcaggaaccttaaaggcggtgtttcaaggttggtgggtctcataactgctttgcttgcttttccctgaaaggggtctgtcttttcacgggagtttctctaacgtgctttgcagagtgatgcttgccttactgcaggccgctgattgttttgctaatgctttttatctttgctttgggaaactgcagatctgaagctgtcttatttatggcaacttctgtttgaggccctaatgcttatgttggtgtggaacatcaaaagaatgcttcttaacccattttcaagccccaaaaagttgatatttcactagaccttagcttttcagctgttggagaagtatgcgtttttccagaaccattgtccattcactttagtgctactcaaaagagctgctcccagaaagctctggaggataaaaacagggcttccttatctggggatttgctgttaggctgacagtgaccagctggtgacaagtgtgacgccgggcacagcagtcctgtgaggctggtctggtgtcttgctggttccgtctggtcagaattaaagcagccccccgggaaagttggcctagaatgtagaacttaaaatggcagtcctcttttttctttttggttcacatatatttaatgtaatttaggtacacttttttacatctgtcagatttgaatgaaataactgatgtttttattgaacattgtgttcatgcttttgaagaattaaactgctttttctaaaggtgacgtgggattgtgtgtatgtgaacatgaatgtctgttttcagtttctgcattatttagatgcctagcgtgtgcaagatattttatgtagcatattaattttgaatgtttttaaattattgaggttatgtccttaagtaaatataatgattaaaatgttttactctggaagaaaacaaagttaggcattttagtgaaaagaagtttataattttccctttcgacatcttctgaagaatgcattgcataaaatattgtgttcttattttcaaacaggattttagtcaatgaaataagttcagcattcccttgaacttactttactttttcctctcgtgtttcaggaaactcttatcactactattgattctagttccagttggtggaccaactgggtgatccctgccatctctgcagtggccgtcgccttgatgtatcgcctatacatggcagaggactgaacacctcctcagaagtcagcgcaggaagagcctgctttggacacgggagaaaagaagccattgctaactacttcaactgacagaaaccttcacttgaaaacaatgattttaatatatctctttctttttcttccgacattagaaacaaaacaaaaagaactgtcctttctgcgctcaaatttttcgagtgtgcctttttattcatctactttattttgatgtttccttaatgtgtaatttacttattataagcatgatcttttaaaaatatatttggcttttaaagt

SEQ ID NO: 5123 - DNA, 619 bp, Homo sapiens
  source 1..619: mol_type = unassigned DNA
ccggcgcggggaatgtcccgggtggagctggctgagtcgcgcgctctgctccacccgacggggctgtgtgtgctgggcctggctcgcggcgaaccgagatggcagagcagtcggacgaggccgtgaagtactacaccctagaggagattcagaagcacaaccacagcaagagcacctggctgatcctgcaccacaaggtgtacgatttgaccaaatttctggaagagcatcctggtggggaagaagttttaagggaacaagctggaggtgacgctactgagaactttgaggatgtcgggcactctacagatgccagggaaatgtccaaaacattcatcattggggagctccatccagaaactcttatcactactattgattctagttccagttggtggaccaactgggtgatccctgccatctctgcagtggccgtcgccttgatgtatcgcctatacatggcagaggactgaacacctcctcagaagtcagcgcaggaagagcctgctttggacacgggagaaaagaagccattgctaactacttcaactgacagaaaccttcacttgaaaacaatgattttaatatatctctttctttttcttccgacattagaaac

SEQ ID NO: 5124 - DNA, 305 bp, Homo sapiens
  source 1..305: mol_type = unassigned DNA
ggtgctgttcgaaactttggaactctagatagaaaatatctcttggcacttaatctgctactaatttttgctgttaaatcagatggatcaaactttgtgtttaatagctaaatgttgaatctgaaatggatgacagaccaaagttaaacaagcctccggaaactcttatcactactattgattctagttccagttggtggaccaactgggtgatccctgccatctctgcagtggccgtcgccttgatgtatcgcctatacatggcagaggactgaacacctcctcagaagtcagcgcaggaagag

SEQ ID NO: 5125 - DNA, 4098 bp, Homo sapiens
  source 1..4098: mol_type = unassigned DNA
gtagccgccagctcggccgcacgtcagggcgcgggagcgcggagcgagtttggttgcacttacaccggtacttaagcgcggaccggcgtgtccttggacttagagagtggggacgtccggcttcggagcgggagtgttcgttgtgccagcgactaaaaagagaattaaatatgggtgatgttgagaaaggcaagaagatttttattatgaagtgttcccagtgccacaccgttgaaaagggaggcaagcacaagactgggccaaatctccatggtctctttgggcggaagacaggtcaggcccctggatactcttacacagccgccaataagaacaaaggcatcatctggggagaggatacactgatggagtatttggagaatcccaagaagtacatccctggaacaaaaatgatctttgtcggcattaagaagaaggaagaaagggcagacttaatagcttatctcaaaaaagctactaatgagtaataattggccactgccttatttattacaaaacagaaatgtctcatgacttttttatgtgtaccatcctttaatagatctcatacaccagaattcagatcatgaatgactgacagaatattttgttgggcagtcctgatttaaaactaagactggcttgtggttaaatgaatatgttcagtttttgaattttaatagtaactccaattcagtaaatggtatcactgtttaccccttttaaagatatgattagacttcgttagtaatgttcaacttttcacaaagatggtgagtgccatcttaaaacttactggagattggttttatatttagatttatataactggttatgtgaatatatttaaatactggggaaattgcttcactgtcttagaaccaagcaagattcacctgtgttttgtgttcatgttcatttgcctcttaaaggcaagggttgaagataaataaggtagcaatgtctatagttttggccttaactatgccaatctaattataattccctgtatttaaaatggtttcttttacttattgaaaggcattttagtgtggtttatgtgtaatattaaagattattcaacacctctcacatcttacagatctataaggtcacatgcttttaaaatagtagcaagttaaacttcactcttgaattctttacaatctaagtcaaactaagttataatttaggattgtctttaaacagccattcagaaacaaaactgtagaactgtgtatttgattgggaatggtgcttttgccaacttaaaaggattaaagtaacggagatatacacaaattttaaaattatgtgtgatcacaagactaaagataattaaaaagaaaaccacagatcatgactttttgactgtgcttgatttcatgactgatgcacaaattttaatgattaaaaagtgcaggagccctaaatgtcagtgcagcagccctaaatgtcagtgcagcagtgttaaccagtcatggtgctagattgtttacttggttttctaggactgcctcaactagaataacacttcactaattgactcttagtttctttgctcagattgagaactgcagcatttatgccagacatggacagaggaatgcctgtggtcatagttttgtgatgtgtaacagtgtataattacatactgaattatttcatgcatagtctgtgccatacacatttagagtagtccttggagattttatggagatggtgagcacaaggtaagtcataaagaataatgagaaaataaatctatgctggtgcagctgagaactgtatctttgtgggacagtgagaagactgagaagatgtgaatccatggtctcaaaggtgatagggacgattagataggtgttttaaggcctgaaagcaatttataacatatgagtcttatttttatttatagaaatgtggaaagcttgctgtaattcatatttgaagtcctagtctgagttctggtggggaatttaaaaatgcatcctggaaatcctttaaagatttcagactttgaaaggccttgtagcagaggacttggtgactgtataaagttagtggtattcagggacagtgtagcaagtagcttacaaggggacaattctggactaatgagaaagacctgaagtgaaggctagagagttgattttttttttttttggcatcctggaaatgatacaggaaacatattaagatagatacagaaatgtgttcaaccttccatcttggctagttgtggcgtttagtttgttttttgagacatggtcacgctgtgtcgccaaggctggagtgcagtggtgcgatctcggctggctgcaacctctatttcccaggctcaagcgattctctcacttcagcttcccaagtagctgggactacaggtgttcgccaccatgcccagctaatttttttgtagagatggagttttgccatgtggtcccaggctggtctcaaactcctgagctcaagcaatccgtccacttgccttggctccccaaagtgctgggattacaggcgtgagccaccaggccctgcctggttttcaaattcagaaatcttattatttaacccagaagtaatcagcccagtagtaacttaggtttaattttttttcaggtttaaaatttttctcatttattttttctgagacggagtttcgcccttttcgcccaggctgagtacagtggtgcaatctcactgcaacctccgccttccagttgcaagtgattctcctgcctcagcctcctgagtagctgggattacaggcacccgccaccacgcctggctaatttttgtatttttagtggagatggtgtttcaccatgttggccagactggtcttggactcctgacctcgtgatccacccaccttggcctcccaaagttctaggattacaggtgtgagccaccacgtccggccaatttttctcatttctatgcctcctatattaaggtctgtgttggcacagatgagtaactgccatgttctaggtcagttatacccaagcacttctggtggtttaaaatgtgattctgtaacttttttatttttatttttttgagataatttcactcttgttgcccaggctggagtgcaatggcgtgatcgctgctcaccgcaacctccgccttccaggttcaagcgattctcctgactcagcctctcaagtagctgggattacaagcatgcgccaccatgcccagcttattttgtgtttttagtagagacagggtttctccatgctggacaggctggtcttgaactcccgacgtcaggtgatctacctgcctcggcctcccaaagtgctgggattacaggcgtgagccaccacgcctggccaattatgtaattttttaaaaaggacatttctatcagggatatataccttcagaaataaggaaataggggaaaaaaagagcactataaaccacatgttttcatttctagtgcttcgctgtaagtggctaggttggtagaatcaaaaacaagggccagatgtatttaaggggtattcagatgccacctacatgcttattttgtctagaacagtgctgtctaatagaactttctgtgacgatggatattttgtagacttttgctgtccagtgtggtagccactaaccacatgtggctgttaagcccttgaaatatagctagtgtgactagaaagtattttattttaaatttacataggcacaagtggctagtggctactgtattgacattctgggtctaggactagaaccagtggtctgtaacaaaagtactttctctttactctattaaatctagaattagccgggcatggtcgctcatgcctgtaatcccagcactttgggaggccaaggcaggcagatcacttgaggtcaggcgtttgagaccagcctggtcaacatggcgaaaccctgtctctacaaaaaacataaaaattagccaggtgtggtggtgggcacctgtaatctcagctacttgggaggctgaggcacaagaatcacttgaacttgggaggtggaggttgcagtgagccaagattgtgccactgcactcaagcctgggtgacgagtgaaactgtctccaaaaaaaaaaaaaaa

SEQ ID NO: 5126 - DNA, 974 bp, Homo sapiens
  source 1..974: mol_type = unassigned DNA
acgtccggcttcggagcgggagtgttcgttgtgccagcgactaaaaagaggtgagagcgggtcgcggaggccgcacctggttagaggcagagctgtgggaggcgcgcacttgcgagcgaccgaaacccaagcggggagcattcgagtggagcccgcgctgggtgggagggcggggagtgaagaccctggactgtggtcagaccgagctgggcgagtaacggcttgaggtgcggcggagccctaactagggacagaattaaatatgggtgatgttgagaaaggcaagaagatttttattatgaagtgttcccagtgccacaccgttgaaaagggaggcaagcacaagactgggccaaatctccatggtctctttgggcggaagacaggtcaggcccctggatactcttacacagccgccaataagaacaaaggcatcatctggggagaggatacactgatggagtatttggagaatcccaagaagtacatccctggaacaaaaatgatctttgtcggcattaagaagaaggaagaaagggcagacttaatagcttatctcaaaaaagctactaatgagtaataattggccactgccttatttattacaaaacagaaatgtctcatgacttttttatgtgtaccatcctttaatagatctcatacaccagaattcagatcatgaatgactgacagaatattttgttgggcagtcctgatttaaaactaagactggcttgtggttaaatgaatatgttcagtttttgaattttaatagtaactccaattcagtaaatggtatcactgtttaccccttttaaagatatgattagacttcgttagtaatgttcaacttttcacaaagatggtgagtgccatcttaaaacttactggagattggttttatatttagatttatataactggttatgtgaatatatttaaatactggggaaattgcttcactgtcttagaac

SEQ ID NO: 5127 - DNA, 799 bp, Homo sapiens
  source 1..799: mol_type = unassigned DNA
agagagtggggacgtccggcttcggagcgggagtgttcgttgtgccagcgactaaaaagagagggcaaaagctgttgctcttctaataaggggccagttcttttcgtgggcacatgtttcttccgtcagtcgttctgacatcctagaaggagtttcatcaatcaccttgaaaccgacctggacgggtgacctcgtggtcgccccaggagatcacagaattaaatatgggtgatgttgagaaaggcaagaagatttttattatgaagtgttcccagtgccacaccgttgaaaagggaggcaagcacaagactgggccaaatctccatggtctctttgggcggaagacaggtcaggcccctggatactcttacacagccgccaataagaacaaaggcatcatctggggagaggatacactgatggagtatttggagaatcccaagaagtacatccctggaacaaaaatgatctttgtcggcattaagaagaaggaagaaagggcagacttaatagcttatctcaaaaaagctactaatgagtaataattggccactgccttatttattacaaaacagaaatgtctcatgacttttttatgtgtaccatcctttaatagatctcatacaccagaattcagatcatgaatgactgacagaatattttgttgggcagtcctgatttaaaactaagactggcttgtggttaaatgaatatgttcagtttttgaattttaatagtaactccaattcagtaaatggtatcactgtttaccccttttaaagatatgattagacttcgt

SEQ ID NO: 5128 - DNA, 498 bp, Homo sapiens
  source 1..498: mol_type = unassigned DNA
agagagtggggacgtccggcttcggagcgggagtgttcgttgtgccagcgactaaaaagaggggccagttcttttcgtgggcacatgtttcttccgtcagtcgttctgacatcctagaaggagtttcatcaatcaccttgaaaccgacctggacgggtgacctcgtggtcgccccaggagatcacagaattaaatatgggtgatgttgagaaaggcaagaagatttttattatgaagtgttcccagtgccacaccgttgaaaagggaggcaagcacaagactgggccaaatctccatggtctctttgggcggaagacaggtcaggcccctggatactcttacacagccgccaataagaacaaaggcatcatctggggagaggatacactgatggagtatttggagaatcccaagaagtacatccctggaacaaaaatgatctttgtcggcattaagaagaaggaagaaagggcagacttaatagcttatctcaaaaaa

SEQ ID NO: 5129 - DNA, 4210 bp, Homo sapiens
  source 1..4210: mol_type = unassigned DNA
agcggggccggggcggggccgagcgcggcgcagcggagcggggcagagcatcctgcgccccggcgcggggccctgcggtagcctcaggcccctcccctggacccgccgcagagccagtgcagaatacagaaactgcagccatgaccacgcacgtcaccctggaagatgccctgtccaacgtggacctgcttgaagagcttcccctccccgaccagcagccatgcatcgagcctccaccttcctccatcatgtaccaggctaactttgacacaaactttgaggacaggaatgcatttgtcacgggcattgcaaggtacattgagcaggctacagtccactccagcatgaatgagatgctggaggaaggacatgagtatgcggtcatgctgtacacctggcgcagctgttcccgggccattccccaggtgaaatgcaacgagcagcccaaccgagtagagatctatgagaagacagtagaggtgctggagccggaggtcaccaagctcatgaagttcatgtattttcagcgcaaggccatcgagcggttctgcagcgaggtgaagcggctgtgccatgccgagcgcaggaaggactttgtctctgaggcctacctcctgacccttggcaagttcatcaacatgtttgctgtcctggatgagctaaagaacatgaagtgcagcgtcaagaatgaccactctgcctacaagagggcagcacagttcctgcggaagatggcagatccccagtctatccaggagtcgcagaacctttccatgttcctggccaaccacaacaggatcacccagtgtctccaccagcaacttgaagtgatcccaggctatgaggagctgctggctgacattgtcaacatctgtgtggattactacgagaacaagatgtacctgactcccagtgagaaacatatgctcctcaaggtgatgggctttggcctctacctaatggatggaaatgtcagtaacatttacaaactggatgccaagaagagaattaatcttagcaaaattgataaattctttaagcagctgcaggtggtgccccttttcggcgacatgcagatagagctggccagatacattaagaccagtgctcactatgaagagaacaagtccaagtggacgtgcacccagagcagcatcagcccccagtacaatatctgcgagcagatggttcagatccgggatgaccacatccgcttcatctccgagctcgctcgctacagcaacagtgaggtggtgacgggctcagggctggacagccagaagtcagacgaggagtatcgcgagctcttcgacctagccctgcggggtctgcagcttctatccaagtggagcgcccacgtcatggaggtgtactcttggaagctggttcatcccacagacaagttctgcaacaaggactgtcctggcaccgcggaggaatatgagagagccacacgctacaattacaccagtgaggaaaaatttgccttcgttgaggtgatcgccatgatcaaaggcctgcaggtgctcatgggcaggatggagagcgtcttcaaccaggccatcaggaacaccatctacgcggcattgcaggacttcgcccaggtgacgctgcgtgagcccctgcggcaggcggtacggaagaagaagaatgtcctcatcagcgtcctacaggcaattcgaaagaccatctgtgactgggagggagggcgagagccccctaatgacccatgcttgagaggggagaaggaccccaaaggtggatttgatatcaaggtgccccggcgtgctgtggggccatccagcacacaggcctgccagtggtccccgagggctttgtttcaccccactggtggcacacagggccgaagaggctgccgatccctgctgtacatggtgcggaccatgcttgaatcactcattgcagacaaaagcggctccaagaagaccctgaggagcagcctggatggacccattgtcctcgccatagaggactttcacaaacagtccttcttcttcacacatctgctcaacatcagtgaagccctgcagcagtgttgtgacctctcccagctctggttccgagaattcttcctggagttaaccatgggccgacgaatccagttccccatcgagatgtccatgccctggattctaacggaccatatcctggaaaccaaagaaccttccatgatggagtatgtcctctaccctctggatctgtacaacgacagcgcctactatgctctgaccaagtttaaaaagcagttcctgtacgatgagatagaagctgaggtgaacctgtgttttgatcagtttgtctacaagctggcagaccagatctttgcttactacaaagccatggctggcagtgtcctgttggataaacgttttcgagctgagtgtaagaattatggcgtcatcattccgtatccaccgtccaatcgctatgaaacactgctgaagcagagacacgtccagctgttgggtagatcaattgacttgaacagactcattacccagcgcatctctgccgccatgtataaatccttggaccaagctatcagccgctttgagagtgaggacctgacctccattgtggagctggagtggctgctggagattaaccggctcacgcatcggctgctctgtaagcatatgacgctggacagcttcgatgccatgttccgagaggccaatcacaatgtgtccgccccctatggccgtatcaccctgcatgtcttctgggaactgaactttgactttctccccaactactgctacaatgggtccactaaccgttttgtgcggactgccattcctttcacccaagaaccacaacgagacaaacctgccaacgtccagccttattacctctatggatccaagcctctcaacattgcctacagccacatctacagctcctacaggaatttcgtggggccacctcatttcaagactatctgcagactcctgggttatcagggcatcgctgtggtcatggaggaactgctaaagattgtgaagagcttgctccaaggaaccattctccagtatgtgaaaacactgatagaggtgatgcccaagatatgccgcttgccccgacatgagtatggctccccagggatcctggagttcttccaccaccagctgaaggacatcattgagtacgcagagctcaaaacagacgtgttccagagcctgagggaagtgggcaatgccatcctcttctgcctcctcatagagcaagctctgtctcaggaggaggtctgcgatttgctccatgccgcacccttccaaaacatcttgcctagagtctacatcaaagagggggagcgcctggaggtccggatgaaacgtctggaagccaagtatgccccgctccacctggtccctctgatcgagcggctggggacccctcagcaaatcgccattgctcgcgagggtgacctcctgaccaaggagcggctgtgctgtggcctgtccatgttcgaggtcatcctgacccgcattcggagctacctgcaggaccccatctggcggggcccaccgcccaccaatggcgtcatgcacgtcgatgagtgtgtggagttccaccggctgtggagcgccatgcagttcgtgtactgcatccctgtgggaaccaacgagttcacagctgagcagtgtttcggcgatggcttgaactgggctggttgctccatcattgtcctgctgggccagcagcgtcgctttgacctgttcgacttctgttaccacctgctaaaagtgcagaggcaggacgggaaggatgaaatcattaagaatgtgcccctgaagaagatggccgaccggatcaggaagtatcagatcttgaacaatgaggtttttgccatcctgaacaaatacatgaagtccgtggagacagacagttccactgtggagcatgtgcgctgcttccagccacccatccaccagtccttggccaccacttgctaagcagaagatcctgcagacccttatctggaggaggaagagaagcaggagagagaaagccacagccagcctgccataggatccaactggacaacgtgtgggatggacctggaaacaagcacctccccaaacacatcaccactccctagggcggggcctgtgcatgctctcccatgacatctccatgctggtttctccatagcataaatgaaaaaaaaaaaaaaaaagtaaacagg

SEQ ID NO: 5130 - DNA, 4124 bp, Homo sapiens
  source 1..4124: mol_type = unassigned DNA
cggggccggggcggggccgagcgcggcgcagcggagcggggcagagcatcctgcgccccggcgcggggccctgcggtagcctcaggcccctcccctggacccgccgcagagccagtgcagaatacagaaactgcagccatgaccacgcacgtcaccctggaagatgccctgtccaacgtggacctgcttgaagagcttcccctccccgaccagcagccatgcatcgagcctccaccttcctccatcatgtaccaggctaactttgacacaaactttgaggacaggaatgcatttgtcacgggcattgcaaggtacattgagcaggctacagtccactccagcatgaatgagatgctggaggaaggacatgagtatgcggtcatgctgtacacctggcgcagctgttcccgggccattccccaggtgaaatgcaacgagcagcccaaccgagtagagatctatgagaagacagtagaggtgctggagccggaggtcaccaagctcatgaagttcatgtattttcagcgcaaggccatcgagcggttctgcagcgaggtgaagcggctgtgccatgccgagcgcaggaaggactttgtctctgaggcctacctcctgacccttggcaagttcatcaacatgtttgctgtcctggatgagctaaagaacatgaagtgcagcgtcaagaatgaccactctgcctacaagagggcagcacagttcctgcggaagatggcagatccccagtctatccaggagtcgcagaacctttccatgttcctggccaaccacaacaggatcacccagtgtctccaccagcaacttgaagtgatcccaggctatgaggagctgctggctgacattgtcaacatctgtgtggattactacgagaacaagatgtacctgactcccagtgagaaacatatgctcctcaaggtgatgggctttggcctctacctaatggatggaaatgtcagtaacatttacaaactggatgccaagaagagaattaatcttagcaaaattgataaattctttaagcagctgcaggtggtgccccttttcggcgacatgcagatagagctggccagatacattaagaccagtgctcactatgaagagaacaagtccaagtggacgtgcacccagagcagcatcagcccccagtacaatatctgcgagcagatggttcagatccgggatgaccacatccgcttcatctccgagctcgctcgctacagcaacagtgaggtggtgacgggctcagggctggacagccagaagtcagacgaggagtatcgcgagctcttcgacctagccctgcggggtctgcagcttctatccaagtggagcgcccacgtcatggaggtgtactcttggaagctggttcatcccacagacaagttctgcaacaaggactgtcctggcaccgcggaggaatatgagagagccacacgctacaattacaccagtgaggaaaaatttgccttcgttgaggtgatcgccatgatcaaaggcctgcaggtgctcatgggcaggatggagagcgtcttcaaccaggccatcaggaacaccatctacgcggcattgcaggacttcgcccaggtgacgctgcgtgagcccctgcggcaggcggtacggaagaagaagaatgtcctcatcagcgtcctacaggcaattcgaaagaccatctgtgactgggagggagggcgagagccccctaatgacccatgcttgagaggggagaaggaccccaaaggtggatttgatatcaaggtgccccggcgtgctgtggggccatccagcacacagctgtacatggtgcggaccatgcttgaatcactcattgcagacaaaagcggctccaagaagaccctgaggagcagcctggatggacccattgtcctcgccatagaggactttcacaaacagtccttcttcttcacacatctgctcaacatcagtgaagccctgcagcagtgttgtgacctctcccagctctggttccgagaattcttcctggagttaaccatgggccgacgaatccagttccccatcgagatgtccatgccctggattctaacggaccatatcctggaaaccaaagaaccttccatgatggagtatgtcctctaccctctggatctgtacaacgacagcgcctactatgctctgaccaagtttaaaaagcagttcctgtacgatgagatagaagctgaggtgaacctgtgttttgatcagtttgtctacaagctggcagaccagatctttgcttactacaaagccatggctggcagtgtcctgttggataaacgttttcgagctgagtgtaagaattatggcgtcatcattccgtatccaccgtccaatcgctatgaaacactgctgaagcagagacacgtccagctgttgggtagatcaattgacttgaacagactcattacccagcgcatctctgccgccatgtataaatccttggaccaagctatcagccgctttgagagtgaggacctgacctccattgtggagctggagtggctgctggagattaaccggctcacgcatcggctgctctgtaagcatatgacgctggacagcttcgatgccatgttccgagaggccaatcacaatgtgtccgccccctatggccgtatcaccctgcatgtcttctgggaactgaactttgactttctccccaactactgctacaatgggtccactaaccgttttgtgcggactgccattcctttcacccaagaaccacaacgagacaaacctgccaacgtccagccttattacctctatggatccaagcctctcaacattgcctacagccacatctacagctcctacaggaatttcgtggggccacctcatttcaagactatctgcagactcctgggttatcagggcatcgctgtggtcatggaggaactgctaaagattgtgaagagcttgctccaaggaaccattctccagtatgtgaaaacactgatagaggtgatgcccaagatatgccgcttgccccgacatgagtatggctccccagggatcctggagttcttccaccaccagctgaaggacatcattgagtacgcagagctcaaaacagacgtgttccagagcctgagggaagtgggcaatgccatcctcttctgcctcctcatagagcaagctctgtctcaggaggaggtctgcgatttgctccatgccgcacccttccaaaacatcttgcctagagtctacatcaaagagggggagcgcctggaggtccggatgaaacgtctggaagccaagtatgccccgctccacctggtccctctgatcgagcggctggggacccctcagcaaatcgccattgctcgcgagggtgacctcctgaccaaggagcggctgtgctgtggcctgtccatgttcgaggtcatcctgacccgcattcggagctacctgcaggaccccatctggcggggcccaccgcccaccaatggcgtcatgcacgtcgatgagtgtgtggagttccaccggctgtggagcgccatgcagttcgtgtactgcatccctgtgggaaccaacgagttcacagctgagcagtgtttcggcgatggcttgaactgggctggttgctccatcattgtcctgctgggccagcagcgtcgctttgacctgttcgacttctgttaccacctgctaaaagtgcagaggcaggacgggaaggatgaaatcattaagaatgtgcccctgaagaagatggccgaccggatcaggaagtatcagatcttgaacaatgaggtttttgccatcctgaacaaatacatgaagtccgtggagacagacagttccactgtggagcatgtgcgctgcttccagccacccatccaccagtccttggccaccacttgctaagcagaagatcctgcagacccttatctggaggaggaagagaagcaggagagagaaagccacagccagcctgccataggatccaactggacaacgtgtgggatggacctggaaacaagcacctccccaaacacatcaccactccctagggcggggcctgtgcatgctctcccatgacatctccatgctggtttctccatagcataaatgaaaaaaaaaaaaaaaaa

SEQ ID NO: 5131 - DNA, 3477 bp, Homo sapiens
  source 1..3477: mol_type = unassigned DNA
agagcatcctgcgccccggcgcggggccctgcggtagcctcaggcccctcccctggacccgccgcagagccagtgcagaatacagaaactgcagccatgaccacgcacgtcaccctggaagatgccctgtccaacgtggacctgcttgaagagcttcccctccccgaccagcagccatgcatcgagcctccaccttcctccatcatgtaccaggctaactttgacacaaactttgaggacaggaatgcatttgtcacgggcattgcaaggtacattgagcaggctacagtccactccagcatggtgatgggctttggcctctacctaatggatggaaatgtcagtaacatttacaaactggatgccaagaagagaattaatcttagcaaaattgataaattctttaagcagctgcaggtggtgccccttttcggcgacatgcagatagagctggccagatacattaagaccagtgctcactatgaagagaacaagtccaagtggacgtgcacccagagcagcatcagcccccagtacaatatctgcgagcagatggttcagatccgggatgaccacatccgcttcatctccgagctcgctcgctacagcaacagtgaggtggtgacgggctcagggctggacagccagaagtcagacgaggagtatcgcgagctcttcgacctagccctgcggggtctgcagcttctatccaagtggagcgcccacgtcatggaggtgtactcttggaagctggttcatcccacagacaagttctgcaacaaggactgtcctggcaccgcggaggaatatgagagagccacacgctacaattacaccagtgaggaaaaatttgccttcgttgaggtgatcgccatgatcaaaggcctgcaggtgctcatgggcaggatggagagcgtcttcaaccaggccatcaggaacaccatctacgcggcattgcaggacttcgcccaggtgacgctgcgtgagcccctgcggcaggcggtacggaagaagaagaatgtcctcatcagcgtcctacaggcaattcgaaagaccatctgtgactgggagggagggcgagagccccctaatgacccatgcttgagaggggagaaggaccccaaaggtggatttgatatcaaggtgccccggcgtgctgtggggccatccagcacacagctgtacatggtgcggaccatgcttgaatcactcattgcagacaaaagcggctccaagaagaccctgaggagcagcctggatggacccattgtcctcgccatagaggactttcacaaacagtccttcttcttcacacatctgctcaacatcagtgaagccctgcagcagtgttgtgacctctcccagctctggttccgagaattcttcctggagttaaccatgggccgacgaatccagttccccatcgagatgtccatgccctggattctaacggaccatatcctggaaaccaaagaaccttccatgatggagtatgtcctctaccctctggatctgtacaacgacagcgcctactatgctctgaccaagtttaaaaagcagttcctgtacgatgagatagaagctgaggtgaacctgtgttttgatcagtttgtctacaagctggcagaccagatctttgcttactacaaagccatggctggcagtgtcctgttggataaacgttttcgagctgagtgtaagaattatggcgtcatcattccgtatccaccgtccaatcgctatgaaacactgctgaagcagagacacgtccagctgttgggtagatcaattgacttgaacagactcattacccagcgcatctctgccgccatgtataaatccttggaccaagctatcagccgctttgagagtgaggacctgacctccattgtggagctggagtggctgctggagattaaccggctcacgcatcggctgctctgtaagcatatgacgctggacagcttcgatgccatgttccgagaggccaatcacaatgtgtccgccccctatggccgtatcaccctgcatgtcttctgggaactgaactttgactttctccccaactactgctacaatgggtccactaaccgttttgtgcggactgccattcctttcacccaagaaccacaacgagacaaacctgccaacgtccagccttattacctctatggatccaagcctctcaacattgcctacagccacatctacagctcctacaggaatttcgtggggccacctcatttcaagactatctgcagactcctgggttatcagggcatcgctgtggtcatggaggaactgctaaagattgtgaagagcttgctccaaggaaccattctccagtatgtgaaaacactgatagaggtgatgcccaagatatgccgcttgccccgacatgagtatggctccccagggatcctggagttcttccaccaccagctgaaggacatcattgagtacgcagagctcaaaacagacgtgttccagagcctgagggaagtgggcaatgccatcctcttctgcctcctcatagagcaagctctgtctcaggaggaggtctgcgatttgctccatgccgcacccttccaaaacatcttgcctagagtctacatcaaagagggggagcgcctggaggtccggatgaaacgtctggaagccaagtatgccccgctccacctggtccctctgatcgagcggctggggacccctcagcaaatcgccattgctcgcgagggtgacctcctgaccaaggagcggctgtgctgtggcctgtccatgttcgaggtcatcctgacccgcattcggagctacctgcaggaccccatctggcggggcccaccgcccaccaatggcgtcatgcacgtcgatgagtgtgtggagttccaccggctgtggagcgccatgcagttcgtgtactgcatccctgtgggaaccaacgagttcacagctgagcagtgtttcggcgatggcttgaactgggctggttgctccatcattgtcctgctgggccagcagcgtcgctttgacctgttcgacttctgttaccacctgctaaaagtgcagaggcaggacgggaaggatgaaatcattaagaatgtgcccctgaagaagatggccgaccggatcaggaagtatcagatcttgaacaatgaggtttttgccatcctgaacaaatacatgaagtccgtggagacagacagttccactgtggagcatgtgcgctgcttccagccacccatccaccagtccttggccaccacttgctaagcagaagatcctgcagacccttatctggaggaggaagagaagcaggagagagaaagccacagccagcctgccataggatccaactggacaacgtgtgggatggacctggaaacaagcacctccccaaacacatcaccactccctagggcggggcctgtgcatgctctcccatgacatctccatgctggtttctccatagcataaatg

SEQ ID NO: 5132 - DNA, 3673 bp, Homo sapiens
  source 1..3673: mol_type = unassigned DNA
agagcatcctgcgccccggcgcggggccctgcggtagcctcaggcccctcccctggacccgccgcagagccagtgcagaatacagaaactgcagccatgaccacgcacgtcaccctggaagatgccctgtccaacgtggacctgcttgaagagcttcccctccccgaccagcagccatgcatcgagcctccaccttcctccatcatgtaccaggctaactttgacacaaactttgaggacaggaatgcatttgtcacgggcattgcaaggtacattgagcaggctacagtccactccagcatgaatgagatgctggaggaaggacatgagtatgcggtcatgctgtacacctggcgcagctgttcccgggccattccccaggtgaaatgcaacgagcagcccaaccgagtagagatctatgagaagacagtagaggtgctggagccggaggtcaccaagctcatgaagttcatgtattttcaggtgatgggctttggcctctacctaatggatggaaatgtcagtaacatttacaaactggatgccaagaagagaattaatcttagcaaaattgataaattctttaagcagctgcaggtggtgccccttttcggcgacatgcagatagagctggccagatacattaagaccagtgctcactatgaagagaacaagtccaagtggacgtgcacccagagcagcatcagcccccagtacaatatctgcgagcagatggttcagatccgggatgaccacatccgcttcatctccgagctcgctcgctacagcaacagtgaggtggtgacgggctcagggctggacagccagaagtcagacgaggagtatcgcgagctcttcgacctagccctgcggggtctgcagcttctatccaagtggagcgcccacgtcatggaggtgtactcttggaagctggttcatcccacagacaagttctgcaacaaggactgtcctggcaccgcggaggaatatgagagagccacacgctacaattacaccagtgaggaaaaatttgccttcgttgaggtgatcgccatgatcaaaggcctgcaggtgctcatgggcaggatggagagcgtcttcaaccaggccatcaggaacaccatctacgcggcattgcaggacttcgcccaggtgacgctgcgtgagcccctgcggcaggcggtacggaagaagaagaatgtcctcatcagcgtcctacaggcaattcgaaagaccatctgtgactgggagggagggcgagagccccctaatgacccatgcttgagaggggagaaggaccccaaaggtggatttgatatcaaggtgccccggcgtgctgtggggccatccagcacacagctgtacatggtgcggaccatgcttgaatcactcattgcagacaaaagcggctccaagaagaccctgaggagcagcctggatggacccattgtcctcgccatagaggactttcacaaacagtccttcttcttcacacatctgctcaacatcagtgaagccctgcagcagtgttgtgacctctcccagctctggttccgagaattcttcctggagttaaccatgggccgacgaatccagttccccatcgagatgtccatgccctggattctaacggaccatatcctggaaaccaaagaaccttccatgatggagtatgtcctctaccctctggatctgtacaacgacagcgcctactatgctctgaccaagtttaaaaagcagttcctgtacgatgagatagaagctgaggtgaacctgtgttttgatcagtttgtctacaagctggcagaccagatctttgcttactacaaagccatggctggcagtgtcctgttggataaacgttttcgagctgagtgtaagaattatggcgtcatcattccgtatccaccgtccaatcgctatgaaacactgctgaagcagagacacgtccagctgttgggtagatcaattgacttgaacagactcattacccagcgcatctctgccgccatgtataaatccttggaccaagctatcagccgctttgagagtgaggacctgacctccattgtggagctggagtggctgctggagattaaccggctcacgcatcggctgctctgtaagcatatgacgctggacagcttcgatgccatgttccgagaggccaatcacaatgtgtccgccccctatggccgtatcaccctgcatgtcttctgggaactgaactttgactttctccccaactactgctacaatgggtccactaaccgttttgtgcggactgccattcctttcacccaagaaccacaacgagacaaacctgccaacgtccagccttattacctctatggatccaagcctctcaacattgcctacagccacatctacagctcctacaggaatttcgtggggccacctcatttcaagactatctgcagactcctgggttatcagggcatcgctgtggtcatggaggaactgctaaagattgtgaagagcttgctccaaggaaccattctccagtatgtgaaaacactgatagaggtgatgcccaagatatgccgcttgccccgacatgagtatggctccccagggatcctggagttcttccaccaccagctgaaggacatcattgagtacgcagagctcaaaacagacgtgttccagagcctgagggaagtgggcaatgccatcctcttctgcctcctcatagagcaagctctgtctcaggaggaggtctgcgatttgctccatgccgcacccttccaaaacatcttgcctagagtctacatcaaagagggggagcgcctggaggtccggatgaaacgtctggaagccaagtatgccccgctccacctggtccctctgatcgagcggctggggacccctcagcaaatcgccattgctcgcgagggtgacctcctgaccaaggagcggctgtgctgtggcctgtccatgttcgaggtcatcctgacccgcattcggagctacctgcaggaccccatctggcggggcccaccgcccaccaatggcgtcatgcacgtcgatgagtgtgtggagttccaccggctgtggagcgccatgcagttcgtgtactgcatccctgtgggaaccaacgagttcacagctgagcagtgtttcggcgatggcttgaactgggctggttgctccatcattgtcctgctgggccagcagcgtcgctttgacctgttcgacttctgttaccacctgctaaaagtgcagaggcaggacgggaaggatgaaatcattaagaatgtgcccctgaagaagatggccgaccggatcaggaagtatcagatcttgaacaatgaggtttttgccatcctgaacaaatacatgaagtccgtggagacagacagttccactgtggagcatgtgcgctgcttccagccacccatccaccagtccttggccaccacttgctaagcagaagatcctgcagacccttatctggaggaggaagagaagcaggagagagaaagccacagccagcctgccataggatccaactggacaacgtgtgggatggacctggaaacaagcacctccccaaacacatcaccactccctagggcggggcctgtgcatgctctcccatgacatctccatgctggtttctccatagcataaatgaaaaaaaaaaaaaaaa

SEQ ID NO: 5133 - DNA, 580 bp, Homo sapiens
  source 1..580: mol_type = unassigned DNA
atcctgcgccccggcgcggggccctgcggtagcctcaggcccctcccctggacccgccgcagagccagtgcagaatacagaaactgcagccatgaccacgcacgtcaccctggaagatgccctgtccaacgtggacctgcttgaagagcttcccctccccgaccagcagccatgcatcgagcctccaccttcctccatcatgtaccaggctaactttgacacaaactttgaggacaggaatgcatttgtcacgggcattgcaagcgcaaggccatcgagcggttctgcagcgaggtgaagcggctgtgccatgccgagcgcaggaaggactttgtctctgaggcctacctcctgacccttggcaagttcatcaacatgtttgctgtcctggatgagctaaagaacatgaagtgcagcgtcaagaatgaccactctgcctacaagagggcagcacagttcctgcggaagatggcagatccccagtctatccaggagtcgcagaacctttccatgttcctggccaaccacaacaggatcacccagtgtctccaccagcaacttgaagtgatcccaggctatg

SEQ ID NO: 5134 - DNA, 6370 bp, Homo sapiens
  source 1..6370: mol_type = unassigned DNA
atcctgcgccccggcgcggggccctgcggtagcctcaggcccctcccctggacccgccgcagagccagtgcagaatacagaaactgcagccatgaccacgcacgtcaccctggaagatgccctgtccaacgtggacctgcttgaagagcttcccctccccgaccagcagccatgcatcgagcctccaccttcctccatcatgtaccaggctaactttgacacaaactttgaggacaggaatgcatttgtcacgggcattgcaaggtacattgagcaggctacagtccactccagcatggtgaaatgcaacgagcagcccaaccgagtagagatctatgagaagacagtagaggtgctggagccggaggtcaccaagctcatgaagttcatgtattttcagcgcaaggccatcgagcggttctgcagcgaggtgaagcggctgtgccatgccgagcgcaggaaggactttgtctctgaggcctacctcctgacccttggcaagttcatcaacatgtttgctgtcctggatgagctaaagaacatgaagtgcagcgtcaagaatgaccactctgcctacaagagggcagcacagttcctgcggaagatggcagatccccagtctatccaggagtcgcagaacctttccatgttcctggccaaccacaacaggatcacccagtgtctccaccagcaacttgaagtgatcccaggctatgaggagctgctggctgacattgtcaacatctgtgtggattactacgagaacaagatgtacctgactcccagtgagaaacatatgctcctcaaggtgatgggctttggcctctacctaatggatggaaatgtcagtaacatttacaaactggatgccaagaagagaattaatcttagcaaaattgataaattctttaagcagctgcaggtggtgccccttttcggcgacatgcagatagagctggccagatacattaagaccagtgctcactatgaagagaacaagtccaagtggacgtgcacccagagcagcatcagcccccagtacaatatctgcgagcagatggttcagatccgggatgaccacatccgcttcatctccgagctcgctcgctacagcaacagtgaggtggtgacgggctcagggctggacagccagaagtcagacgaggagtatcgcgagctcttcgacctagccctgcggggtctgcagcttctatccaagtggagcgcccacgtcatggaggtgtactcttggaagctggttcatcccacagacaagttctgcaacaaggactgtcctggcaccgcggaggaatatgagagagccacacgctacaattacaccagtgaggaaaaatttgccttcgttgaggtgatcgccatgatcaaaggcctgcaggtgctcatgggcaggatggagagcgtcttcaaccaggccatcaggaacaccatctacgcggcattgcaggacttcgcccaggtgacgctgcgtgagcccctgcggcaggcggtacggaagaagaagaatgtcctcatcagcgtcctacaggcaattcgaaagaccatctgtgactgggagggagggcgagagccccctaatgacccatgcttgagaggggagaaggaccccaaaggtggatttgatatcaaggtgccccggcgtgctgtggggccatccagcacacagctgtacatggtgcggaccatgcttgaatcactcattgcagacaaaagcggctccaagaagaccctgaggagcagcctggatggacccattgtcctcgccatagaggactttcacaaacagtccttcttcttcacacatctgctcaacatcagtgaagccctgcagcagtgttgtgacctctcccagctctggttccgagaattcttcctggagttaaccatgggccgacgaatccagttccccatcgagatgtccatgccctggattctaacggaccatatcctggaaaccaaagaaccttccatgatggagtatgtcctctaccctctggatctgtacaacgacagcgcctactatgctctgaccaagtttaaaaagcagttcctgtacgatgagatagaagctgaggtgaacctgtgttttgatcagtttgtctacaagctggcagaccagatctttgcttactacaaagccatggctggcagtgtcctgttggataaacgttttcgagctgagtgtaagaattatggcgtcatcattccgtatccaccgtccaatcgctatgaaacactgctgaagcagagacacgtccagctgttgggtagatcaattgacttgaacagactcattacccagcgcatctctgccgccatgtataaatccttggaccaagctatcagccgctttgagagtgaggacctgacctccattgtggagctggagtggctgctggagattaaccggctcacgcatcggctgctctgtaagcatatgacgctggacagcttcgatgccatgttccgagaggccaatcacaatgtgtccgccccctatggccgtatcaccctgcatgtcttctgggaactgaactttgactttctccccaactactgctacaatgggtccactaaccgttttgtgcggactgccattcctttcacccaagaaccacaacgagacaaacctgccaacgtccagccttattacctctatggatccaagcctctcaacattgcctacagccacatctacagctcctacaggaatttcgtggggccacctcatttcaagactatctgcagactcctgggttatcagggcatcgctgtggtcatggaggaactgctaaagattgtgaagagcttgctccaaggaaccattctccagtatgtgaaaacactgatagaggtgatgcccaagatatgccgcttgccccgacatgagtatggctccccagggatcctggagttcttccaccaccagctgaaggacatcattgagtacgcagagctcaaaacagacgtgttccagagcctgagggaagtgggcaatgccatcctcttctgcctcctcatagagcaagctctgtctcaggaggaggtctgcgatttgctccatgccgcacccttccaaaacatcttgcctagagtctacatcaaagagggggagcgcctggaggtccggatgaaacgtctggaagccaagtatgccccgctccacctggtccctctgatcgagcggctggggacccctcagcaaatcgccattgctcgcgagggtgacctcctgaccaaggagcggctgtgctgtggcctgtccatgttcgaggtcatcctgacccgcattcggagctacctgcaggaccccatctggcggggcccaccgcccaccaatggcgtcatgcacgtcgatgagtgtgtggagttccaccggctgtggagcgccatgcagttcgtgtactgcatccctgtgggaaccaacgagttcacagctgagcagtgtttcggcgatggcttgaactgggctggttgctccatcattgtcctgctgggccagcagcgtcgctttgacctgttcgacttctgttaccacctgctaaaagtgcagaggcaggacgggaaggatgaaatcattaagaatgtgcccctgaagaagatggccgaccggatcaggaagtatcagatcttgaacaatgaggtttttgccatcctgaacaaatacatgaagtccgtggagacagacagttccactgtggagcatgtgcgctgcttccagccacccatccaccagtccttggccaccacttgctaagcagaagatcctgcagacccttatctggaggaggaagagaagcaggagagagaaagccacagccagcctgccataggatccaactggacaacgtgtgggatggacctggaaacaagcacctccccaaacacatcaccactccctagggcggggcctgtgcatgctctcccatgacatctccatgctggtttctccatagcataaatgaaaaaaaaaaaaaaaaagtaaacagggcagtgtgtgctttttcttttctcccccctcaactatattaagaactcctagtttcaccctttctccatcccatcatcccacctatctgtggttgcttcccaagacctcctcccaagatagacatctcctacccagtgcccttgtgtgaccccaggactcaagtctcagactgtgaacagatgtggccatgcccagagacgccagcctggccagaagggcatgcctcagcttactacttcatctctcctggttccctccctgcagtgccccgggtgtcatcttctcccactctgggtaccagggattctaccacataggcttcccaaagccccattctaactcccctctctcagggaagccctagagagaggtccaaaaagcattcacagctgtatcacactctatgcaggtggggtaggagactgatcaggcctgctgtggggaagcagtatgtatgaacacagccagaaatgtcatagtccaaacaggatgctttcaggccatctcagctgcttgatggtgagatggttcccttattccttcaggaaaggcttagcattgggccacataggggaagcagctttgaacaaatcagtcatagcactgcctatagcattagccagtgaccaaattagggacaacgtcttggcacagaattgcttatcaaggaacatttccacaagaaagaaaatattaaggggttatttccacagaagcccaaaacgtcttggaaacacagaggtgaggaggaggaatagtaattgtcaatgagcttttaataccaagatacaccccctgcccccaaagaagagtcctcttttagggaatcagaaccttcattgtcctagaagctgaaagattcttggaacattttagcttttactctcaacttgctgttctctttacattccttaagttagactttcgggtgtggcttctctcccaggggtaacatttacttccattttctagactgaaccaaaagtcttctgcagaatctcccaccgagtgtggtaagaaggaaggacaaaaggctttaggatataaatttcatgttacagagcatgtcattgtcaaaggaaatctgtggccctgagattttaagaacataaaatgtgacatttgatatttctccagcccagggaagtaagatggttagcaatggttgccttaatcaaatggtcccatttttaaccccaaaggaagtgcccacagcaagaggtttgtgtgatgcacttatgtcctccggtgaggaaagggggccacatatgaaaggccccttaggtcagatcctgagagtagcacatttgagtgcagattcctgggccccacctcaaacctactaattctgaatctctgggaatagggccaggaaatctgccctttctacaaactacccaagttgttctgttgcacatcaatgtttgggaaccactgctgtaagggaatcattctggtcaccttgagctttgagctaccactaagccatgaaagaaaatacatcatacagggaagagagaagggaggaggttccaagtagtaactggcagatcctcctgtctggaggtaccaccttctattctggtttctgacttttccttcttgatgaccatagatgtgttccagaggcaaaagagacacattatcccagatggcagaacatgctttcaaaacatataaaatgtcaaagttccagatccttctacatctttagtcctgtctgaggatggtagctggctctctgtagctgatagatggctagagttccatccaaatccttgaccacgacttcatggagatttgaataatctatttgatgagatttctatttcaataacccacctctctcaccccacattcatatccctaaatttgaccctctgggccgagtcacattaccttcaggagacttgatcccagtagactgaggtcttccctttcagcagaaagatttcatttccctggcttgccagtggcactgatttccgaacacccaatgagtttaatattctttcctccttggcattactgccccagcctctttttattttttttgtgtgtgtctaataaccaggaaaaaaataaagcttaggttttaaaaagttttaaaaataatctgtttcagaaactgtcaaatgtaccatatttgtattaagagttgttgggaatttttgtacaatgaatttacatttatttatggtgacatatttacgcttgtgatcaaataatgatgttaaattcttaaatcatatttgctatgcagctgaagatgatattttgatttgtattttgggggtacctgtgttgagttgataaacatttccatcttcattaaaactgcttccaaactagtaaaaccag

SEQ ID NO: 5135 - DNA, 1294 bp, Homo sapiens
  source 1..1294: mol_type = unassigned DNA
ccccggcgcggggccctgcggtagcctcaggcccctcccctggacccgccgcagagccagtgcagaatacagaaactgcagccatgaccacgcacgtcaccctggaagatgccctgtccaacgtggacctgcttgaagagcttcccctccccgaccagcagccatgcatcgagcctccaccttcctccatcatgtaccaggctaactttgacacaaactttgaggacaggaatgcatttgtcacgggcattgcaaggtacattgagcaggctacagtccactccagcatgaatgagatgctggaggaaggacatgagtatgcggtcatgctgtacacctggcgcagctgttcccgggccattccccaggtgaaatgcaacgagcagcccaaccgagtagagatctatgagaagacagtagaggtgctggagccggaggtcaccaagctcatgaagttcatgtattttcagcgcaaggccatcgagcggttctgcagcgaggtgaagcggctgtgccatgccgagcgcaggaaggactttgtctctgaggcctacctcctgacccttggcaagttcatcaacatgtttgctgtcctggatgagctaaagaacatgaagtgcagcgtcaagaatgaccactctgcctacaagagggcagcacagttcctgcggaagatggcagatccccagtctatccaggagtcgcagaacctttccatgttcctggccaaccacaacaggatcacccagtgtctccaccagcaacttgaagtgatcccaggctatgaggagctgctggctgacattgtcaacatctgtgtggattactacgagaacaagatgtacctgactcccagtgagaaacatatgctcctcaaggtaaaactcccctgaggccgcacccatggagcctgggcttaccctctcaccttcttcttattaaaaatccgttttaaaaaacaatgtttcttttttcttaaacattgatacagatcttacggcacataatggtttgtaacctgttcctttcctgtaatataatataccgtagtcacctttccagatgtcattaaggctatttctacaatgttatgtgtaatgactgccaagtattctgttgtattggaacattgtcatgtaacatatcccctgtggttggatatttgtttgctaaacttcattgaacacccttgtagcagtttttgtgcacatctttttgtcaaggcaaacttcctagaagagaaattgctggctcaaagggaaaaacagaataaatctttttttttatttcaata

SEQ ID NO: 5136 - DNA, 967 bp, Homo sapiens
  source 1..967: mol_type = unassigned DNA
cggcgcggggccctgcggtagcctcaggcccctcccctggacccgccgcagagccagtgcagaatacagaaactgcagccatgaccacgcacgtcaccctggaagatgccctgtccaacgtggacctgcttgaagagcttcccctccccgaccagcagccatgcatcgagcctccaccttcctccatcatgtaccaggctaactttgacacaaactttgaggacaggaatgcatttgtcacgggcattgcaaggtacattgagcaggctacagtccactccagcatgaatgagatgctggaggaaggacatgagtatgcggtcatgctgtacacctggcgcagctgttcccgggccattccccaggtgaaatgcaacgagcagcccaaccgagtagagatctatgagaagacagtagaggtgctggagccggaggtcaccaagctcatgaagttcatgtattttcagcgcaaggccatcgagcggttctgcagcgaggtgaagcggctgtgccatgccgagcgcaggaaggactttgtctctgaggcctacctcctgacccttggcaagttcatcaacatgtttgctgtcctggatgagctaaagaacatgaagtgcagcgtcaagaatgaccactctgcctacaagagggcagcacagttcctgcggaagatggcagatccccagtctatccaggagtcgcagaacctttccatgttcctggccaaccacaacaggatcacccagcaacttgaagtgatcccaggctatgaggagctgctggctgacattgtcaacatctgtgtggattactacgagaacaagatgtacctgactcccagtgagaaacatatgctcctcaaggtgatgggctttggcctctacctaatggatggaaatgtcagtaacatttacaaactggatgccaagaagagaattaatcttagcaaaattgataaattctttaa

SEQ ID NO: 5137 - DNA, 1000 bp, Homo sapiens
  source 1..1000: mol_type = unassigned DNA
cctggacccgccgcagagccaggtaagcggccctcgcaggcctcgggccgggcacggggactaggatgccgccggggacggggatgaggccgtgaggatgcgcgaagggccgccccctctcccggcccgcggggggcgctcggcgctgtgcccgggctagcccgaggcccggcctcaggccccacgcggcccctttccccctcggacccaccgtgcgtcccgcggcacggaccctctgcccgggaggcgcgggcacatcgcggagctccggcgcggcggcgggggagccgcagcagcaggtgcgcggcctgggccggagccgccagcccgggaggaggcggtgctaatctcagggaccggagacacctgcagcggccgcgagcccggcagcggcgacatcctcgagtccagtgcagaatacagaaactgcagccatgaccacgcacgtcaccctggaagatgccctgtccaacgtggacctgcttgaagagcttcccctccccgaccagcagccatgcatcgagcctccaccttcctccatcatgtaccaggctaactttgacacaaactttgaggacaggaatgcatttgtcacgggcattgcaaggtacattgagcaggctacagtccactccagcatgaatgagatgctggaggaaggacatgagtatgcggtcatgctgtacacctggcgcagctgttcccgggccattccccaggtgaaatgcaacgagcagcccaaccgagtagagatctatgagaagacagtagaggtgctggagccggaggtcaccaagctcatgaagttcatgtattttcagcgcaaggccatcgagcggttctgcagcgaggtgaagcggctgtgccatgccgagcgcaggaaggactttgtctctgaggcctacctcctgacccttggcaagttcatcaacatgtttgctgtcctggatgagctaaagaacatgaagtgcagcgtcaagaatgaccactctgcctacaa

SEQ ID NO: 5138 - DNA, 925 bp, Homo sapiens
  source 1..925: mol_type = unassigned DNA
gaggggcgcagcgtcgatgtttgggggcggagggctttgatgagagaggagcaggtctgacccgcttggaagctttctggcctacactagcatcgctcaccaagctggctgcgggcacggtggaagtgggggaaggggatgagtgggctgactcctgggggaaaaggtggtttttttcttgagctctgaagaaccaggaagatgcttgcctgtctgttgtggcgtctacttttcagtgcagaatacagaaactgcagccatgaccacgcacgtcaccctggaagatgccctgtccaacgtggacctgcttgaagagcttcccctccccgaccagcagccatgcatcgagcctccaccttcctccatcatgtaccaggctaactttgacacaaactttgaggacaggaatgcatttgtcacgggcattgcaaggtacattgagcaggctacagtccactccagcatgaatgagatgctggaggaaggacatgagtatgcggtcatgctgtacacctggcgcagctgttcccgggccattccccaggtgaaatgcaacgagcagcccaaccgagtagagatctatgagaagacagtagaggtgctggagccggaggtcaccaagctcatgaagttcatgtattttcagcgcaaggccatcgagcggttctgcagcgaggtgaagcggctgtgccatgccgagcgcaggaaggactttgtctctgaggcctacctcctgacccttggcaagttcatcaacatgtttgctgtcctggatgagctaaagaacatgaagtgcagcgtcaagaatgaccactctgcctacaagagggcagcacagttcctgcggaagatggcagatccccagtctatccaggagtcgcagaacctttccatgttcctggccaaccacaacaggatcacccag

SEQ ID NO: 5139 - DNA, 4256 bp, Homo sapiens
  source 1..4256: mol_type = unassigned DNA
gtagagttaaggaagggcctcttcctctgtgagaattcagcattttgcaaccatccaaaaatgttgagggcatgctttgcttccagggcagacagagcagcacagtgagcatgggacacaggatccctgacttgctgtgtgcccttaaaccagccactacctctctgacgttcaaaattgagcaatggaaggcagcctgcccaactgttacctgcctgtcatcatgaaagcctgcggatgagtgcagaatacagaaactgcagccatgaccacgcacgtcaccctggaagatgccctgtccaacgtggacctgcttgaagagcttcccctccccgaccagcagccatgcatcgagcctccaccttcctccatcatgtaccaggctaactttgacacaaactttgaggacaggaatgcatttgtcacgggcattgcaaggtacattgagcaggctacagtccactccagcatgaatgagatgctggaggaaggacatgagtatgcggtcatgctgtacacctggcgcagctgttcccgggccattccccaggtgaaatgcaacgagcagcccaaccgagtagagatctatgagaagacagtagaggtgctggagccggaggtcaccaagctcatgaagttcatgtattttcagcgcaaggccatcgagcggttctgcagcgaggtgaagcggctgtgccatgccgagcgcaggaaggactttgtctctgaggcctacctcctgacccttggcaagttcatcaacatgtttgctgtcctggatgagctaaagaacatgaagtgcagcgtcaagaatgaccactctgcctacaagagggcagcacagttcctgcggaagatggcagatccccagtctatccaggagtcgcagaacctttccatgttcctggccaaccacaacaggatcacccagtgtctccaccagcaacttgaagtgatcccaggctatgaggagctgctggctgacattgtcaacatctgtgtggattactacgagaacaagatgtacctgactcccagtgagaaacatatgctcctcaaggtgatgggctttggcctctacctaatggatggaaatgtcagtaacatttacaaactggatgccaagaagagaattaatcttagcaaaattgataaattctttaagcagctgcaggtggtgccccttttcggcgacatgcagatagagctggccagatacattaagaccagtgctcactatgaagagaacaagtccaagtggacgtgcacccagagcagcatcagcccccagtacaatatctgcgagcagatggttcagatccgggatgaccacatccgcttcatctccgagctcgctcgctacagcaacagtgaggtggtgacgggctcagggctggacagccagaagtcagacgaggagtatcgcgagctcttcgacctagccctgcggggtctgcagcttctatccaagtggagcgcccacgtcatggaggtgtactcttggaagctggttcatcccacagacaagttctgcaacaaggactgtcctggcaccgcggaggaatatgagagagccacacgctacaattacaccagtgaggaaaaatttgccttcgttgaggtgatcgccatgatcaaaggcctgcaggtgctcatgggcaggatggagagcgtcttcaaccaggccatcaggaacaccatctacgcggcattgcaggacttcgcccaggtgacgctgcgtgagcccctgcggcaggcggtacggaagaagaagaatgtcctcatcagcgtcctacaggcaattcgaaagaccatctgtgactgggagggagggcgagagccccctaatgacccatgcttgagaggggagaaggaccccaaaggtggatttgatatcaaggtgccccggcgtgctgtggggccatccagcacacagctgtacatggtgcggaccatgcttgaatcactcattgcagacaaaagcggctccaagaagaccctgaggagcagcctggatggacccattgtcctcgccatagaggactttcacaaacagtccttcttcttcacacatctgctcaacatcagtgaagccctgcagcagtgttgtgacctctcccagctctggttccgagaattcttcctggagttaaccatgggccgacgaatccagttccccatcgagatgtccatgccctggattctaacggaccatatcctggaaaccaaagaaccttccatgatggagtatgtcctctaccctctggatctgtacaacgacagcgcctactatgctctgaccaagtttaaaaagcagttcctgtacgatgagatagaagctgaggtgaacctgtgttttgatcagtttgtctacaagctggcagaccagatctttgcttactacaaagccatggctggcagtgtcctgttggataaacgttttcgagctgagtgtaagaattatggcgtcatcattccgtatccaccgtccaatcgctatgaaacactgctgaagcagagacacgtccagctgttgggtagatcaattgacttgaacagactcattacccagcgcatctctgccgccatgtataaatccttggaccaagctatcagccgctttgagagtgaggacctgacctccattgtggagctggagtggctgctggagattaaccggctcacgcatcggctgctctgtaagcatatgacgctggacagcttcgatgccatgttccgagaggccaatcacaatgtgtccgccccctatggccgtatcaccctgcatgtcttctgggaactgaactttgactttctccccaactactgctacaatgggtccactaaccgttttgtgcggactgccattcctttcacccaagaaccacaacgagacaaacctgccaacgtccagccttattacctctatggatccaagcctctcaacattgcctacagccacatctacagctcctacaggaatttcgtggggccacctcatttcaagactatctgcagactcctgggttatcagggcatcgctgtggtcatggaggaactgctaaagattgtgaagagcttgctccaaggaaccattctccagtatgtgaaaacactgatagaggtgatgcccaagatatgccgcttgccccgacatgagtatggctccccagggatcctggagttcttccaccaccagctgaaggacatcattgagtacgcagagctcaaaacagacgtgttccagagcctgagggaagtgggcaatgccatcctcttctgcctcctcatagagcaagctctgtctcaggaggaggtctgcgatttgctccatgccgcacccttccaaaacatcttgcctagagtctacatcaaagagggggagcgcctggaggtccggatgaaacgtctggaagccaagtatgccccgctccacctggtccctctgatcgagcggctggggacccctcagcaaatcgccattgctcgcgagggtgacctcctgaccaaggagcggctgtgctgtggcctgtccatgttcgaggtcatcctgacccgcattcggagctacctgcaggaccccatctggcggggcccaccgcccaccaatggcgtcatgcacgtcgatgagtgtgtggagttccaccggctgtggagcgccatgcagttcgtgtactgcatccctgtgggaaccaacgagttcacagctgagcagtgtttcggcgatggcttgaactgggctggttgctccatcattgtcctgctgggccagcagcgtcgctttgacctgttcgacttctgttaccacctgctaaaagtgcagaggcaggacgggaaggatgaaatcattaagaatgtgcccctgaagaagatggccgaccggatcaggaagtatcagatcttgaacaatgaggtttttgccatcctgaacaaatacatgaagtccgtggagacagacagttccactgtggagcatgtgcgctgcttccagccacccatccaccagtccttggccaccacttgctaagcagaagatcctgcagacccttatctggaggaggaagagaagcaggagagagaaagccacagccagcctgccataggatccaactggacaacgtgtgggatggacctggaaacaagcacctccccaaacacatcaccactccctagggcggggcctgtgcatgctctcccatgacatctccatgctggtttctccatagcataaatgaaaaaaaaaaaaaaaaagtaaa

SEQ ID NO: 5140 - DNA, 377 bp, Homo sapiens
  source 1..377: mol_type = unassigned DNA
aattcagcattttgcaaccatccaaaaatgttgagggcatgctttgcttccagggcagacagagcagcacagtgagcatgggacacaggatccctgacttgctgtgtgcccttaaaccagccactacctctctgacgttcaaaattgagcaatggaaggcagcctgcccaactgttacctgcctgtcatcatgaaagcctgcggatgagtacacaaaatggacaatgttgacatgctgaacacatcagcccccacagccaaccccccaactctgctccattcctgccactcaagggaagagatgaacatgcaagcaataatatcacacagagatcttgaaccctcgcctcacatacaataaaatgtaccttgtttgc

SEQ ID NO: 5141 - DNA, 915 bp, Homo sapiens
  source 1..915: mol_type = unassigned DNA
agtctcgcttcgtcacccaggctggagtacagtggctcaatctcagctcactgcaacctccacctcccaggttcaagcaattctgcctcaccctcccgagtagctgggactacagtgcagaatacagaaactgcagccatgaccacgcacgtcaccctggaagatgccctgtccaacgtggacctgcttgaagagcttcccctccccgaccagcagccatgcatcgagcctccaccttcctccatcatgtaccaggctaactttgacacaaactttgaggacaggaatgcatttgtcacgggcattgcaaggtacattgagcaggctacagtccactccagcatgatattttagatgcattgtctcatttgctcctgacatcaaccctgtgagaatgagatgctggaggaaggacatgagtatgcggtcatgctgtacacctggcgcagctgttcccgggccattccccaggtgaaatgcaacgagcagcccaaccgagtagagatctatgagaagacagtagaggtgctggagccggaggtcaccaagctcatgaagttcatgtattttcagcgcaaggccatcgagcggttctgcagcgaggtgaagcggctgtgccatgccgagcgcaggaaggactttgtctctgaggcctacctcctgacccttggcaagttcatcaacatgtttgctgtcctggatgagctaaagaacatgaagtgcagcgtcaagaatgaccactctgcctacaagagggcagcacagttcctgcggaagatggcagatccccagtctatccaggagtcgcagaacctttccatgttcctggccaaccacaacaggatcacccagtgtctccaccagcaacttgaagtgatcccaggctatgaggagctgctggctgacattgtcaac

SEQ ID NO: 5142 - DNA, 409 bp, Homo sapiens
  source 1..409: mol_type = unassigned DNA
tcatcaacatgtttgctgtcctggatgagctaaagaacatgaagtgcagcgtcaagaatgaccactctgcctacaagagggcagcacagttcctgcggaagatggcagatccccagtctatccaggagtcgcagaacctttccatgttcctggccaaccacaacaggatcacccaggtgagggcagactccttgttaggcctggcctgatgtctcggggttataggcaggcgtgtagaggttgggtggaccacgagcccaagcagacaagctcagtctgcagcttccatctccactgccctacttgagagtgaaatgtagctgaggacttaagtctgtcctcccaaccccaggtggccgattcaccctctccagttgtcatgctcgtgaagccctctcagccagtgctc

SEQ ID NO: 5143 - DNA, 771 bp, Homo sapiens
  source 1..771: mol_type = unassigned DNA
aaaaaaggcggagggaaggaggaaagagggtggaaagagaaggagagaagggggcgagaggtagagggggtgggtggagggaggggccacccccacgtctcagagtggccctggcttctcccaccacagtgtgcttccatgttgccagggcactgttggaaaagaggcacagtcacattcatatttccgcaatcccagcccaaaggccccccaaagccagcttcaaccgcagagtgtctgtgctgtcagagtgggtaggctggttttggaggttgcccaccttgctttttctgtgctcagattccatccctttgtagtcctagagaggctgtgttcccgcccctctcatattactggtaagtattatggaccaggtatctggaaaggcctacagttggatcctagatgaggctggcaccaaagaggaggaggaaggactgttccattaggcctgaagctcccacagtgttggacttagcaggctttcttgctgaggcggctgggataccatttggtgtcacccaggggagttggccacgtgggctgagcaccaggagcagctaatgcctgttccacccaggcgcctgaggctgggaccctctccgaccccataattttctacccaggtggacgtgcacccagagcagcatcagcccccagtacaatatctgcgagcagatggttcagatccgggatgaccacatccgcttcatctccgagctcgctcgctacagcaacagtgaggtggtgacgggctcagggctggacagc

SEQ ID NO: 5144 - DNA, 576 bp, Homo sapiens
  source 1..576: mol_type = unassigned DNA
ctgtacatggtgcggaccatgcttgaatcactcattgcagacaaaagcggctccaagaagaccctgaggagcagcctggatggacccattgtcctcgccatagaggactttcacaaacagtccttcttcttcacacatctgctcaacatcagtgacggagtcttgctctgttgcccaggttggagtgcagtggcactatctcagctcaccgcaacctccgcttcccaggttcaggctggagtgcagtcgtgtgatctcagctcaccgcaacctctgccacccagaagccctgcagcagtgttgtgacctctcccagctctggttccgagaattcttcctggagttaaccatgggccgacgaatccagttccccatcgagatgtccatgccctggattctaacggaccatatcctggaaaccaaagaaccttccatgatggagtatgtcctctaccctctggatctgtacaacgacagcgcctactatgctctgaccaagtttaaaaagcagttcctgtacgatgagatagaagctgaggtgaacctgtgttttgatcagtttgtctacaagctggc

SEQ ID NO: 5145 - DNA, 745 bp, Homo sapiens
  source 1..745: mol_type = unassigned DNA; mol_type = unassigned DNA
ggaccatatcctggaaaccaaagaaccttccatgatggagtaagaggcaggattgggccagcaagtggctcctggggtacaagtagagggcagtttgccagggagatccgttctttccagaaggaagcactgagttgacaagaaatgaggccatatgtcccaccacagggagagctcagccagacagaatcatttaattcagccttgcagataaattctgaagtttcccagcccaactgcccttcctatgccttgtcagcctcataacagctatgctcagaaaagaatcatctcaggagcaggtagcttgtattcttaactgctacctgatgtgttttagtcccaaatgaatttttacaagtcttggttttatttgcaccctggactttttctttggactgactgtaaagtaagttgcttctaagcggtggaggctcaaggaacgtaagagagggatgaaagatggtcttttcctgactgtgaacttgtttctatttcccaagcaagtataaagctgtcttccttaaggggggttattagcaagcggctggctgtgtttttccctcttcaggtatgtcctctaccctctggatctgtacaacgacagcgcctactatgctctgaccaagtttaaaaagcagttcctgtacgatgagatagaagctgaggtgaacctgtgttttgatcagtttgtctacaagctggcagaccagatctttgcttactacaaagccatggctggcag

SEQ ID NO: 5146 - DNA, 579 bp, Homo sapiens
  source 1..579: mol_type = unassigned DNA
ataaagctgaacgggcaccagtgatgtttcctgcttcctctccaccaggtgaacctgtgttttgatcagtttgtctacaagctggcagaccagatctttgcttactacaaagccatggctggcagtgtcctgttggataaacgttttcgagctgagtgtaagaattatggcgtcatcattccgtatccaccgtccaatcgctatgaaacactgctgaagcagagacacgtccagctgttgggtagatcaattgacttgaacagactcattacccagcgcatctctgccgccatgtataaatccttggaccaagctatcagccgctttgagagtgaggacctgacctccattgtggagctggagtggctgctggagattaaccggctcacgcatcggctgctctgtaagcatatgacgctggacagcttcgatgccatgttccgagaggccaatcacaatgtgtccgccccctatggccgtatcaccctgcatgtcttctgggaactgaactttgactttctccccaactactgctacaatgggtccactaaccgttttgtgcggactgccattcctttc

SEQ ID NO: 5147 - DNA, 583 bp, Homo sapiens
  source 1..583: mol_type = unassigned DNA
gtttcccatagaccctactgagcagtgtcaacttcccactgaccaccccgattcacctcccagggatcctggagttcttccaccaccagctgaaggacatcattgagtacgcagagctcaaaacagacgtgttccagagcctgagggaagtgggcaatgccatcctcttctgcctcctcatagagcaagctctgtctcaggaggaggtctgcgatttgctccatgccgcacccttccaaaacatcttgcctagagtctacatcaaagagggggagcgcctggaggtccggatgaaacgtctggaagccaagtatgccccgctccacctggtccctctgatcgagcggctggggacccctcaggtaccaatcttatataataaatgggctctgatcactgacaggaacttgagagcatttgaccaaaccccctcattgtacaggtcaggaaactgaggctcagagaagggaagacaatgtccaatacccaaaaactggttaatattaatagcaacagcaggtctggaatgagatttgctgactctcaggcctgagtgtttcttctgtagcctgtatcatgtatc

SEQ ID NO: 5148 - DNA, 916 bp, Homo sapiens
  source 1..916: mol_type = unassigned DNA
gtctcattttctgctctgcgactccttttgcagagggggagcgcctggaggtccggatgaaacgtctggaagccaagtatgccccgctccacctggtccctctgatcgagcggctggggacccctcagcaaatcgccattgctcgcgagggtgacctcctgaccaaggagcggctgtgctgtggcctgtccatgttcgaggtcatcctgacccgcattcggagctacctgcaggaccccatctggcggggcccaccgcccaccaatggcgtcatgcacgtcgatgagtgtgtggagttccaccggctgtggagcgccatgcagttcgtgtactgcatccctgtgggaaccaacgagttcacagctgagcagtgtttcggcgatggcttgaactgggctggttgctccatcattgtcctgctgggccagcagcgtcgctttgacctgttcgacttctgttaccacctgctaaaagtgcagaggcaggacgggaaggatgaaatcattaagaatgtgcccctgaagaagatggccgaccggatcaggaagtatcagatcttgaacaatgaggtttttgccatcctgaacaaatacatgaagtccgtggagacagacagttccactgtggagcatgtgcgctgcttccagccacccatccaccagtccttggccaccacttgctaagcagaagatcctgcagacccttatctggaggaggaagagaagcaggagagagaaagccacagccagcctgccataggatccaactggacaacgtgtgggatggacctggaaacaagcacctccccaaacacatcaccactccctagggcggggcctgtgcatgctctcccatgacatctccatgctggtttctccatagcataaatgaaaaaaaaaaaaaaaaagtaaacagg

SEQ ID NO: 5149 - DNA, 562 bp, Homo sapiens
  source 1..562: mol_type = unassigned DNA
ttttctgctctgcgactccttttgcagagggggagcgcctggaggtccggatgaaacgtctggaagccaagtatgccccgctccacctggtccctctgatcgagcggctggggacccctcagcaaatcgccattgctcgcgagggtgacctcctgaccaaggagcggctgtgctgtggcctgtccatgttcgaggtcatcctgacccgcattcggagctacctgcaggaccccatctggcggggcccaccgcccaccaatggcgtcatgcacgtcgatgagtgtgtggagttccaccggctgtggagcgccatgcagttcgtgtactgcatccctgtgggaaccaacgagttcacagctgagtgagtaccccccagagaaggcagggttacccccaacctgcctgtgctcctgcaagtcatggggctgccagagttcagccagaaacgtgggcagggggtgggggtggttggccaacaactactttgttgagtgtgttgagctgactgcattggcaagaaagagcccagtaagggtttgatagtaagaccctcactgcctgc

SEQ ID NO: 5150 - DNA, 892 bp, Homo sapiens
  source 1..892: mol_type = unassigned DNA
cttttgcagagggggagcgcctggaggtccggatgaaacgtctggaagccaagtatgccccgctccacctggtccctctgatcgagcggctggggacccctcagcaaatcgccattgctcgcgagggtgacctcctgaccaaggagcggctgtgctgtggcctgtccatgttcgaggtcatcctgacccgcattcggagctacctgcaggaccccatctggcggggcccaccgcccaccaatggcgtcatgcacgtcgatgagtgtgtggagttccaccggctgtggagcgccatgcagttcgtgtactgcatccctgtgggaaccaacgagttcacagctgagcagtgtttcggcgatggcttgaactgggctggttgctccatcattgtcctgctgggccagcagcgtcgctttgacctgttcgacttctgttaccacctgctaaaagtgcagaggcaggacgggaaggatgaaatcattaagaatgtgcccctgaagaagatggccgaccggatcaggaagtatcagatcttgaacaatgaggtttttgccatcctgaacaaatacatgaagtccgtggagacagacagttccactgtggagcatgtgcgctgcttccagccacccatccaccagtccttggccaccacttgctaagcagaagatcctgcagacccttatctggaggaggaagagaagcaggagagagaaagccacagccagcctgccataggatccaactggacaacgtgtgggatggacctggaaacaagcacctccccaaacacatcaccactccctagggcggggcctgtgcatgctctcccatgacatctccatgctggtttctccatagcataaatgaaaaaaaaaaaaaaaaagtaaacagg

SEQ ID NO: 5151 - DNA, 579 bp, Homo sapiens
  source 1..579: mol_type = unassigned DNA
gatttcagcaagcttcacattttgggggcaggcaggggaagaattctagaagagaaacagggtattctagtgagacaagccaatgctgactgtttaagagatttaggattgaaatctgcttttgaactcgcattccggcggtcctctttggtgttctcaccaagggcaaaaggactcaaatcctcagcggaggacagaaggtggcctctcttctggcaaaacatgcaaatcgccattgctcgcgagggtgacctcctgaccaaggagcggctgtgctgtggcctgtccatgttcgaggtcatcctgacccgcattcggagctacctgcaggaccccatctggcggggcccaccgcccaccaatggcgtcatgcacgtcgatgagtgtgtggagttccaccggctgtggagcgccatgcagttcgtgtactgcatccctgtgggaaccaacgagttcacagctgagtgagtaccccccagagaaggcagggttacccccaacctgcctgtgctcctgcaagtcatggggctgccagagttcagccagaaacgtgggcagggggtgggggtggttggccaa

SEQ ID NO: 5152 - DNA, 582 bp, Homo sapiens
  source 1..582: mol_type = unassigned DNA
gatttcagcaagcttcacattttgggggcaggcaggggaagaattctagaagagaaacagggtattctagtgagacaagccaatgctgactgtttaagagatttaggattgaaatctgcttttgaactcgcattccggcggtcctctttggtgttctcaccaagggcaaaaggactcaaatcctcagcggaggacagaaggtggcctctcttctggcaaaacatgcaaatcgccattgctcgcgagggtgacctcctgaccaaggagcggctgtgctgtggcctgtccatgttcgaggtcatcctgacccgcattcggagctacctgcaggaccccatctggcggggcccaccgcccaccaatggcgtcatgcacgtcgatgagtgtgtggagttccaccggctgtggagcgccatgcagttcgtgtactgcatccctgtgggaaccaacgagttcacagctgagcagtgtttcggcgatggcttgaactgggctggttgctccatcattgtcctgctgggccagcagcgtcgctttgacctgttcgacttctgttaccacctgctaaaagtgcagaggcag

SEQ ID NO: 5153 - DNA, 2158 bp, Homo sapiens
  source 1..2158: mol_type = unassigned DNA
ggtgggcgggcggcagtcgcgtcgcccccaccccgcgcagccttcaccttgccggcattggctcttacccacacggggctgggggtttggagcggatttgtttttttaaacattttccagcagaccacatccccgccccaccgctggctgtcccccgccccccgcacatataccctgcacacacgcacgcacacacacacacacacccggcgcgcacagacacacgctccctccctccgcgctctacccctcgcccgcccgccgcgcacgcagccggccccggctcccggcgccccgcgccccgcgccccgcgccccgccaccgccgccgccgagcaaagccgggctgggcttggagctgctcatggagaaagtgccaggcgagatggagatcgagcgcagggagcggagcgaggagctgtccgaggcggagaggaaggcggtgcaggctatgtgggcccggctctatgccaactgcgaggacgtgggggtggccatcctggtgaggttctttgtgaacttcccctcggccaagcagtacttcagccagttcaagcacatggaggatcccctggagatggagcggagcccccagctgcggaagcacgcctgccgagtcatgggggccctcaacactgtcgtggagaacctgcatgaccccgacaaggtgtcctctgtgctcgcccttgtggggaaagcccacgccctcaagcacaaggtggaaccggtgtacttcaagatcctctctggggtcattctggaggtggtcgccgaggaatttgccagtgacttcccacctgagacgcagagagcctgggccaagctgcgtggcctcatctacagccacgtgaccgctgcctacaaggaagtgggctgggtgcagcaggtccccaacgccaccaccccaccggccacactgccctcttcggggccgtaggacccctaactccacccccctccctggcagcacctcgagcagaaggccgagttctgaagaccctccttgacgctccatttctgggtgccaaggaagctggaggaatccctgactcaacttccccgaaggaggcctctgtggcggccagggtccccccctggagctgctgggaggcggcgctggctgcctggatgctgaccccagcgcggcgggcagagcggggcccactcttcttagcttttctactcactgttagagagagacctagctgagcggctggcaggaagcgggacaggtctaggagtcccttagggaataaaccagccccgtttctatcagcccggccagcatgcaggtctccacatcaccatctagagtatcacgcacacatctaccatatatacagatatattctatatacgagctatatataaatatatatatacatatatatatacacacatacatatctagaatgtgtatccgcggcgcccagaagcctcggtttggcccacctgtgagtggggcagggaggggttccggttgtgcagagaacagagtgttctggcaaagaggaaatcccacagcagcgcagaggacctgggcctggaggggcagggctggggcaacccggcttggcggcaaagcccagccccttctcagaccagctccccacattcctgaattccacttccaggcagaaaggagtgggctccccctactccctcagaggaactgactcaccggctgtcctagaatgggcaggggcagagcgaagttctgggtgggatgaccgcactgggggaggggcctcagtccagaaacctcgaccgctagctccacctgccttggccaccagggcagccccgggggatccgggctgctgggcagcaggtcggcgggaccacatgcctgggtctcaccctcagctccgagggccgagggctttccccaccccaccctcctcctggccggcagtcggccctgtctattcatctgcgtcaggcttgccaggggggccccccgtgtgtgccccttggtcacgtgtgtcgtcttcaaggatgttttgctgctgtggctcctgctgtgtcccctcctggcccatcctcatcctcatcttcatcctcatcctcatctgtgcaaccgcccgtcctccttttctagtttctgatgtttgtaaccagacccagctgtgtcattaaacagacccgttcttgctgta

SEQ ID NO: 5154 - DNA, 842 bp, Homo sapiens
  source 1..842: mol_type = unassigned DNA
gggtggcccgaggagggacgagacaggccggacagaatgcgccacgtttcagaattaatggaaaaagagctcacattggtatcgtgctttgcagtttgtgaaacacttttttacccagtttatgtcacaagacagacattattcacattttagagaaaaagatccggagctcccatgggccagtagacttgcctgagatcacacagcacgttcgtagcaggacggagactagaacttgggtctcacggttgctttcaactgcactgtgccggatctcttggcaggaacccaccggccacactgccctcttcggggccgtaggacccctaactccacccccctccctggcagcacctcgagcagaaggccgagttctgaagaccctccttgacgctccatttctgggtgccaaggaagctggaggaatccctgactcaacttccccgaaggaggcctctgtggcggccagggtccccccctggagctgctgggaggcggcgctggctgcctggatgctgaccccagcgcggcgggcagagcggggcccactcttcttagcttttctactcactgttagagagagacctagctgagcggctggcaggaagcgggacaggtctaggagtcccttagggaataaaccagccccgtttctatcagcccggccagcatgcaggtctccacatcaccatctagagtatcacgcacacatctaccatatatacagatatattctatatacgagctatatataaatatatatatacatatatatatacacacatacatatctagaatgtgtatccgcggcgcccagaagcctcggtttggcccacctgtga

SEQ ID NO: 5155 - DNA, 815 bp, Homo sapiens
  source 1..815: mol_type = unassigned DNA; mol_type = unassigned DNA
cccgcccgccgcgcacgcagccggccccggctcccggcgccccgcgccccgcgccccgcgccccgccaccgccgccgccgagcaaagccgggctgggcttggagctgctcatggagaaagtgccaggcgagatggagatcgagcgcagggagcggagcgaggagctgtccgaggcggagaggaaggcggtgcaggctatgtgggcccggctctatgccaactgcgaggacgtgggggtggccatcctggtgaggttctttgtgaacttcccctcggccaagcagtacttcagccagttcaagcacatggaggatcccctggagatggagcggagcccccagctgcggaagcacgcctgccgagtcatgggggccctcaacactgtcgtggagaacctgcatgaccccgacaaggtgtcctctgtgctcgcccttgtggggaaagcccacgccctcaagcacaaggtggaaccggtgtacttcaagcccaccggccacactgccctcttcggggccgtaggacccctaactccacccccctccctggcagcacctcgagcagaaggccgagttctgaagaccctccttgacgctccatttctgggtgccaaggaagctggaggaatccctgactcaacttccccgaaggaggcctctgtggcggccagggtccccccctggagctgctgggaggcggcgctggctgcctggatgctgaccccagcgcggcgggcagagcggggcccactcttcttagcttttctactcactgttagagagagacctagctgagcggctggcaggaagcgggacagg

SEQ ID NO: 5156 - DNA, 830 bp, Homo sapiens
  source 1..830: mol_type = unassigned DNA; mol_type = unassigned DNA
aggatttaatttcagatcaactcatgattccagaacctgagttcttaccctctcggctatgactagagcagggcttgaagggggtgtagagtttgggaaggaagcaagaagcgaggaagacagaggcctaggagatgaagccgccagcctgagcaagcctggcagatagacatggccagacttggtaggggttctttgtgaacttcccctcggccaagcagtacttcagccagttcaagcacatggaggatcccctggagatggagcggagcccccagctgcggaagcacgcctgccgagtcatgggggccctcaacactgtcgtggagaacctgcatgaccccgacaaggtgtcctctgtgctcgcccttgtggggaaagcccacgccctcaagcacaaggtggaaccggtgtacttcaagatcctctctggggtcattctggaggtggtcgccgaggaatttgccagtgacttcccacctgagacgcagagagcctgggccaagctgcgtggcctcatctacagccacgtgaccgctgcctacaaggaagtgggctgggtgcagcaggtccccaacgccaccaccccaccggccacactgccctcttcggggccgtaggacccctaactccacccccctccctggcagcacctcgagcagaaggccgagttctgaagaccctccttgacgctccatttctgggtgccaaggaagctggaggaatccctgactcaacttccccgaaggaggcctctgtggcggccagggtccccccctggagctgctgggaggcggcgctggctgcctggatgctgaccccagcgcggc

SEQ ID NO: 5157 - DNA, 788 bp, Homo sapiens
  source 1..788: mol_type = unassigned DNA; mol_type = unassigned DNA
tgcaaattccagcttgtacttaaatacttcctgcgaagttttgactgagacgctgcaacaattcccgagctgtttcatcgtggcaccttcctggtggcaggtggattagcacattgtctgcaacccaggaggacttggaggaaagtcccagctctgctgattctagctgagtaaccttggcaaaggtcacctcacttctctctgagtcttattttctcatctgtaaaatgaggaggaggaggaggatcatccaaacatcacgggacttcgttaaatcagtgcttcggggcacttagcacagcgcctggcgcaaggttctttgtgaacttcccctcggccaagcagtacttcagccagttcaagcacatggaggatcccctggagatggagcggagcccccagctgcggaagcacgcctgccgagtcatgggggccctcaacactgtcgtggagaacctgcatgaccccgacaaggtgtcctctgtgctcgcccttgtggggaaagcccacgccctcaagcacaaggtggaaccggtgtacttcaagatcctctctggggtcattctggaggtggtcgccgaggaatttgccagtgacttcccacctgagacgcagagagcctgggccaagctgcgtggcctcatctacagccacgtgaccgctgcctacaaggaagtgggctgggtgcagcaggtccccaacgccaccaccccaccggccacactgccctcttcggggccgtaggacccctaactccacccccctccctggcagcacctcgagcagaa

SEQ ID NO: 5158 - DNA, 2566 bp, Homo sapiens
  source 1..2566: mol_type = unassigned DNA; mol_type = unassigned DNA
gggagaagccgagggcagcttagccacggccggttcccgttccctccaggacgcgagggtcgccttgggtggggaaccgcgaccgggcgaggacctatcccggtgtggggcttcccgatttcgaaagaatctcgctgcacccccgcccagagttcagaccaagcgaaaagttatttgagaggcctcgggggcgcggggtgaggagtcgtggcggaggccttggtcggggcgccgtggatatccccgagtcaccgcgtccctctcctgcagctcccgcgtcgctgggaggagcgagggagcgagcgggaaggggtctagctggcctttgctcggccctccccagcgcccggctttgaacccgccctgcactgctgtctgggcgggtccggggactcagcactcgacccaaaggtgcaggcgcgcgagcacaacccatggctgcgctgggctgcgcgaggctgaggtgggcgctgcgaggggccggccgtggcctctgcccccacggggccagagccaaggccgcgatccctgccgccctcccctcggacaaggccaccggagctcccggagccgggcctggtgtccggcggcggcaacggagcttagaggagattccacgtctaggacagctgcgcttcttctttcagctgttcgttcaaggctatgccctgcaactgcaccagttacaggtgctttacaaggccaagtacggtccaatgtggatgtcctacttagggcctcagatgcacgtgaacctggccagtgccccgctcttggagcaagtgatgcggcaagagggcaagtacccagtacggaacgacatggagctatggaaggagcaccgggaccagcacgacctgacctatgggccgttcaccacggaaggacaccactggtaccagctgcgccaggctctgaaccagcggttgctgaagccagcggaagcagcgctctatacggatgctttcaatgaggtgattgatgactttatgactcgactggaccagctgcgggcagagagtgcttcggggaaccaggtgtcggacatggctcaactcttctactactttgccttggaagctatttgctacatcctgttcgagaaacgcattggctgcctgcagcgatccatccccgaggacaccgtgaccttcgtcagatccatcgggttaatgttccagaactcactctatgccaccttcctccccaagtggactcgccccgtgctgcctttctggaagcgatacctggatggttggaatgccatcttttcctttgggaagaagctgattgatgagaagctcgaagatatggaggcccaactgcaggcagcagggccagatggcatccaggtgtctggctacctgcacttcttactggccagtggacagctcagtcctcgggaggccatgggcagcctgcctgagctgctcatggctggagtggacacgacatccaacacgctgacatgggccctgtaccacctctcaaaggaccctgagatccaggaggccttgcacgaggaagtggtgggtgtggtgccagccgggcaagtgccccagcacaaggactttgcccacatgccgttgctcaaagctgtgcttaaggagactctgcggtaggacagaatgctgttctggggggcacaggatctctttgtggggagggaatcagaggaggaaatctgaagtgaagacaggtgggctggggctagtgacaaggatgagatgggagaggtaggggagaaggagtggggcactttgtacccccatgaatccagagcagactccagacattcttttccctgcagtctctaccctgtggtccccacaaactcccggatcatagaaaaggaaattgaagttgatggcttcctcttccccaagaacgtgagtggggctagagagcccgattgcccaggagtgccctatgcccccgaagagaggcattcatgctgcccaatcttcctttatagacccagtttgtgttctgccactatgtggtgtcccgggaccccactgccttctctgagcctgaaagcttccagccccaccgctggctgagaaacagccagcctgctacccccaggatccagcacccatttggctctgtgccctttggctatggggtccgggcctgcctgggccgcaggattgcagagctggagatgcagctactcctcgcaaggctgatccagaagtacaaggtggtcctggccccggagacgggggagttgaagagtgtggcccgcattgtcctggttcccaataagaaagtgggcctgcagttcctgcagagacagtgctgagctgagtctccgccttgctggggcttgtcctagaggctccagctctggcacagtggttcctggctgctgccatgtctcagatgaggagggagagaaggaggccgccagactcgagaggtgggaggaactccttgcacacaccctgagcttttgccacttctatcatttttgagcaactccctctcagctaaaaggccacccctttatcgcattgctgtccttgggtagaatataaaataaagggacttttatttctta

SEQ ID NO: 5159 - DNA, 2286 bp, Homo sapiens
  source 1..2286: mol_type = unassigned DNA; mol_type = unassigned DNA
gccgagggcagcttagccacggccggttcccgttccctccaggacgcgagggtcgccttgggtggggaaccgcgaccgggcgaggacctatcccggtgtggggcttcccgatttcgaaagaatctcgctgcacccccgcccagagttcagaccaagcgaaaagttatttgagaggcctcgggggcgcggggtgaggagtcgtggcggaggccttggtcggggcgccgtggatatccccgagtcaccgcgtccctctcctgcagctcccgcgtcgctgggaggagcgagggagcgagcgggaaggggtctagctggcctttgctcggccctccccagcgcccggctttgaacccgccctgcactgctgtctgggcgggtccggggactcagcactcgacccaaaggtgcaggcgcgcgagcacaacccatggctgcgctgggctgcgcgaggctgaggtgggcgctgcgaggggccggccgtggcctctgcccccacggggccagagccaaggccgcgatccctgccgccctcccctcggacaaggccaccggagctcccggagccgggcctggtgtccggcggcggcaacggagcttagaggagattccacgtctaggacagctgcgcttcttctttcagctgttcgttcaaggctatgccctgcaactgcaccagttacaggtgctttacaaggccaagtacggtccaatgtggatgtcctacttagggcctcagatgcacgtgaacctggccagtgccccgctcttggagcaagtgatgcggcaagagggcaagtacccagtacggaacgacatggagctatggaaggagcaccgggaccagcacgacctgacctatgggccgttcaccacggaaggacaccactggtaccagctgcgccaggctctgaaccagcggttgctgaagccagcggaagcagcgctctatacggatgctttcaatgaggtgattgatgactttatgactcgactggaccagctgcgggcagagagtgcttcggggaaccaggtgtcggacatggctcaactcttctactactttgccttggaagctatttgctacatcctgttcgagaaacgcattggctgcctgcagcgatccatccccgaggacaccgtgaccttcgtcagatccatcgggttaatgttccagaactcactctatgccaccttcctccccaagtggactcgccccgtgctgcctttctggaagcgatacctggatggttggaatgccatcttttcctttgggaagaagctgattgatgagaagctcgaagatatggaggcccaactgcaggcagcagggccagatggcatccaggtgtctggctacctgcacttcttactggccagtggacagctcagtcctcgggaggccatgggcagcctgcctgagctgctcatggctggagtggacacgacatccaacacgctgacatgggccctgtaccacctctcaaaggaccctgagatccaggaggccttgcacgaggaagtggtgggtgtggtgccagccgggcaagtgccccagcacaaggactttgcccacatgccgttgctcaaagctgtgcttaaggagactctgcgtctctaccctgtggtccccacaaactcccggatcatagaaaaggaaattgaagttgatggcttcctcttccccaagaacacccagtttgtgttctgccactatgtggtgtcccgggaccccactgccttctctgagcctgaaagcttccagccccaccgctggctgagaaacagccagcctgctacccccaggatccagcacccatttggctctgtgccctttggctatggggtccgggcctgcctgggccgcaggattgcagagctggagatgcagctactcctcgcaaggctgatccagaagtacaaggtggtcctggccccggagacgggggagttgaagagtgtggcccgcattgtcctggttcccaataagaaagtgggcctgcagttcctgcagagacagtgctgagctgagtctccgccttgctggggcttgtcctagaggctccagctctggcacagtggttcctggctgctgccatgtctcagatgaggagggagagaaggaggccgccagactcgagaggtgggaggaactccttgcacacaccctgagcttttgccacttctatcatttttgagcaactccctctcagctaaaaggccacccctttatcgcattgctgtccttgggtagaatataaaataaagggacttttatttcttattgga

SEQ ID NO: 5160 - DNA, 903 bp, Homo sapiens
  source 1..903: mol_type = unassigned DNA; mol_type = unassigned DNA
cccaaaggtgcaggcgcgcgagcacaacccatggctgcgctgggctgcgcgaggctgaggtgggcgctgcgaggggccggccgtggcctctgcccccacggggccagagccaaggccgcgatccctgccgccctcccctcggacaaggccaccggagctcccggagccgggcctggtgtccggcggcggcaacggagcttagaggagattccacgtctaggacagctgcgcttcttctttcagctgttcgttcaaggctatgccctgcaactgcaccagttacagggaaggacaccactggtaccagctgcgccaggctctgaaccagcggttgctgaagccagcggaagcagcgctctatacggatgctttcaatgaggtgattgatgactttatgactcgactggaccagctgcgggcagagagtgcttcggggaaccaggtgtcggacatggctcaactcttctactactttgccttggaagctatttgctacatcctgttcgagaaacgcattggctgcctgcagcgatccatccccgaggacaccgtgaccttcgtcagatccatcgggttaatgttccagaactcactctatgccaccttcctccccaagtggactcgccccgtgctgcctttctggaagcgatacctggatggttggaatgccatcttttcctttgggaagaagctgattgatgagaagctcgaagatatggaggcccaactgcaggcagcagggccagatggcatccaggtgtctggctacctgcacttcttactggccagtggacagctcagtcctcgggaggccatgggcagcctgcctgagctgctcatggctggagtggacacgacatccaacacgctgacatgggccctgtaccacctctcaaaggaccc

SEQ ID NO: 5161 - DNA, 1210 bp, Homo sapiens
  source 1..1210: mol_type = unassigned DNA; mol_type = unassigned DNA
gcacaacccatggctgcgctgggctgcgcgaggctgaggtgggcgctgcgaggggccggccgtggcctctgcccccacggggccagagccaaggccgcgatccctgccgccctcccctcggacaaggccaccggagctcccggagccgggcctggtgtccggcggcggcaacggagcttagaggagattccacgtctaggacagctgcgcttcttctttcagctgttcgttcaaggctatgccctgcaactgcaccagttacagggaaggacaccactggtaccagctgcgccaggctctgaaccagcggttgctgaagccagcggaagcagcgctctatacggatgctttcaatgaggtgattgatgactttatgactcgactggaccagctgcgggcagagagtgcttcggggaaccaggtgtcggacatggctcaactcttctactactttgccttggaaggtacccttgctgggagaggggctggggaagggaatgggtcagggagaggttgtgctccctctcctcaagggctcctggattccatatgtcctggttctgcctcctgtgatggcctctgtgcactactcagctatttgctacatcctgttcgagaaacgcattggctgcctgcagcgatccatccccgaggacaccgtgaccttcgtcagatccatcgggttaatgttccagaactcactctatgccaccttcctccccaagtggactcgccccgtgctgcctttctggaagcgatacctggatggttggaatgccatcttttcctttggtgaggactcccagatggggcccagggaagagagatgggggtgactccaggtctgtgcatcagcggtctctcccaggccttttccctcatgctaccagttgtcggagtggctcttggtccttggagatcatgacttttggctttgtcctttcctcttctctgttgctttcacagggaagaagctgattgatgagaagctcgaagatatggaggcccaactgcaggcagcagggccagatggcatccaggtgtctggctacctgcacttcttactggccagtggacagctcagtcctcgggaggccatgggcagcctgcctgagctgctcatggctggagtggacacgacatccaacacgctgacatgggccctgtaccacctctcaaaggaccctgagatccaggaggccttgcacga

SEQ ID NO: 5162 - DNA, 799 bp, Homo sapiens
  source 1..799: mol_type = unassigned DNA; mol_type = unassigned DNA
catgaaggaagaaggcatggcttagctaaaaggagaaatgtcccagaaacctccatactgacagccaggaagtagtctcagaggctttggattccaggaaagaagctggtgctttacaaggccaagtacggtccaatgtggatgtcctacttagggcctcagatgcacgtgaacctggccagtgccccgctcttggagcaagtgatgcggcaagagggcaagtacccagtacggaacgacatggagctatggaaggagcaccgggaccagcacgacctgacctatgggccgttcaccacggaaggacaccactggtaccagctgcgccaggctctgaaccagcggttgctgaagccagcggaagcagcgctctatacggatgctttcaatgaggtgattgatgactttatgactcgactggaccagctgcgggcagagagtgcttcggggaaccaggtgtcggacatggctcaactcttctactactttgccttggaagctatttgctacatcctgttcgagaaacgcattggctgcctgcagcgatccatccccgaggacaccgtgaccttcgtcagatccatcgggttaatgttccagaactcactctatgccaccttcctccccaagtggactcgccccgtgctgcctttctggaagcgatacctggatggttggaatgccatcttttcctttgggaagaagctgattgatgagaagctcgaagatatggaggcccaactgcaggcagcagggccagatggcatccaggtgtctggctacctgcacttcttactgg

SEQ ID NO: 5163 - DNA, 1187 bp, Homo sapiens
  source 1..1187: mol_type = unassigned DNA; mol_type = unassigned DNA
ttgcggcgccgcttcggggacgtgttcagcctgcagctggcctggacgccggtggtcgtgctcaatgggctggcggccgtgcgcgaggcgctggtgacccacggcgaggacaccgccgaccgcccgcctgtgcccatcacccagatcctgggtttcgggccgcgttcccaaggacgcccctttcgccccaacggtctcttggacaaagccgtgagcaacgtgatcgcctccctcacctgcgggcgccgcttcgagtacgacgaccctcgcttcctcaggctgctggacctagctcaggagggactgaaggaggagtcgggctttctgcgcgaggtgctgaatgctgtccccgtcctcctgcatatcccagcgctggctggcaaggtcctacgcttccaaaaggctttcctgacccagctggatgagctgctaactgagcacaggatgacctgggacccagcccagcccccccgagacctgactgaggccttcctggcagagatggagaagtggtggctgacctgttctctgccgggatggtgaccacctcgaccacgctggcctggggcctcctgctcatgatcctacatccggatgtgcagcgccgtgtccaacaggagatcgacgacgtgatagggcaggtgcggcgaccagagatgggtgaccaggctcacatgccctacaccactgccgtgattcatgaggtgcagcgctttggggacatcgtccccctgggtgtgacccatatgacatcccgtgacatcgaagtacagggcttccgcatccctaagggaacgacactcatcaccaacctgtcatcggtgctgaaggatgaggccgtctgggagaagcccttccgcttccaccccgaacacttcctggatgcccagggccactttgtgaagccggaggccttcctgcctttctcagcaggccgccgtgcatgcctcggggagcccctggcccgcatggagctcttcctcttcttcacctccctgctgcagcacttcagcttctcggtgcccactggacagccccggcccagccaccatggtgtctttgctttcctggtgagcccatccccctatgagctttgtgctgtgccccgctagaatggggtacctagtccccagcctgctccctagccagaggctctaatgtacaataaagcaatgtggtagttccaa

SEQ ID NO: 5164 - DNA, 1684 bp, Homo sapiens
  source 1..1684: mol_type = unassigned DNA; mol_type = unassigned DNA
ataagggaagggtcacgcgctcggtgtgctgagagtgtcctgcctggtcctctgtgcctggtggggtgggggtgccaggtgtgtccagaggagcccatttggtagtgaggcaggtatggggctagaagcactggtgcccctggccgtgatagtggccatcttcctgctcctggtggacctgatgcaccggcgccaacgctgggctgcacgctacccaccaggccccctgccactgcccgggctgggcaacctgctgcatgtggacttccagaacacaccatactgcttcgaccagttgcggcgccgcttcggggacgtgttcagcctgcagctggcctggacgccggtggtcgtgctcaatgggctggcggccgtgcgcgaggcgctggtgacccacggcgaggacaccgccgaccgcccgcctgtgcccatcacccagatcctgggtttcgggccgcgttcccaaggggtgttcctggcgcgctatgggcccgcgtggcgcgagcagaggcgcttctccgtgtccaccttgcgcaacttgggcctgggcaagaagtcgctggagcagtgggtgaccgaggaggccgcctgcctttgtgccgccttcgccaaccactccggacgcccctttcgccccaacggtctcttggacaaagccgtgagcaacgtgatcgcctccctcacctgcgggcgccgcttcgagtacgacgaccctcgcttcctcaggctgctggacctagctcaggagggactgaaggaggagtcgggctttctgcgcgaggtgctgaatgctgtccccgtcctcctgcatatcccagcgctggctggcaaggtcctacgcttccaaaaggctttcctgacccagctggatgagctgctaactgagcacaggatgacctgggacccagcccagcccccccgagacctgactgaggccttcctggcagagatggagaaggccaaggggaaccctgagagcagcttcaatgatgagaacctgcgcatagtggtggctgacctgttctctgccgggatggtgaccacctcgaccacgctggcctggggcctcctgctcatgatcctacatccggatgtgcagcgccgtgtccaacaggagatcgacgacgtgatagggcaggtgcggcgaccagagatgggtgaccaggctcacatgccctacaccactgccgtgattcatgaggtgcagcgctttggggacatcgtccccctgggtgtgacccatatgacatcccgtgacatcgaagtacagggcttccgcatccctaagggaacgacactcatcaccaacctgtcatcggtgctgaaggatgaggccgtctgggagaagcccttccgcttccaccccgaacacttcctggatgcccagggccactttgtgaagccggaggccttcctgcctttctcagcaggccgccgtgcatgcctcggggagcccctggcccgcatggagctcttcctcttcttcacctccctgctgcagcacttcagcttctcggtgcccactggacagccccggcccagccaccatggtgtctttgctttcctggtgagcccatccccctatgagctttgtgctgtgccccgctagaatggggtacctagtccccagcctgctccctagccagaggctctaatgtacaataaagcaatgtggtagttccaa

SEQ ID NO: 5165 - DNA, 2257 bp, Homo sapiens
  source 1..2257: mol_type = unassigned DNA; mol_type = unassigned DNA
cccatttggtagtgaggcaggtatggggctagaagcactggtgcccctggccgtgatagtggccatcttcctgctcctggtggacctgatgcaccggcgccaacgctgggctgcacgctacccaccaggccccctgccactgcccgggctgggcaacctgctgcatgtggacttccagaacacaccatactgcttcgaccaggtgagggaggaggtcctggagggcggcagaggtgctgaggctcccctaccagaagcaaacatggatggtgggtgaaaccacaggctggaccagaagccaggctgagaaggggaagcaggtttgggggacgtcctggagaagggcatttatacatggcatgaaggactggattttccaaaggccaaggaagagtagggcaagggcctggaggtggagctggacttggcagtgggcatgcaagcccattgggcaacatatgttatggagtacaaagtcccttctgctgacaccagaaggaaaggccttgggaatggaagatgagttagtcctgagtgccgtttaaatcacgaaatcgaggatgaagggggtgcagtgacccggttcaaaccttttgcactgtgggtcctcgggcctcactgctcaccggcatggaccatcatctgggaatgggatgctaactggggcctctcggcaattttggtgactcttgcaaggtcatacctgggtgacgcatccaaactgagttcctccatcacagaaggtgtgacccccacccccgccccacgatcaggaggctgggtctcctccttccacctgctcactcctggtagccccgggggtcgtccaaggttcaaataggactaggacctgtagtctggggtgatcctggcttgacaagaggccctgaccctccctctgcagttgcggcgccgcttcggggacgtgttcagcctgcagctggcctggacgccggtggtcgtgctcaatgggctggcggccgtgcgcgaggcgctggtgacccacggcgaggacaccgccgaccgcccgcctgtgcccatcacccagatcctgggtttcgggccgcgttcccaaggggtgttcctggcgcgctatgggcccgcgtggcgcgagcagaggcgcttctccgtgtccaccttgcgcaacttgggcctgggcaagaagtcgctggagcagtgggtgaccgaggaggccgcctgcctttgtgccgccttcgccaaccactccggacgcccctttcgccccaacggtctcttggacaaagccgtgagcaacgtgatcgcctccctcacctgcgggcgccgcttcgagtacgacgaccctcgcttcctcaggctgctggacctagctcaggagggactgaaggaggagtcgggctttctgcgcgaggtgctgaatgctgtccccgtcctcctgcatatcccagcgctggctggcaaggtcctacgcttccaaaaggctttcctgacccagctggatgagctgctaactgagcacaggatgacctgggacccagcccagcccccccgagacctgactgaggccttcctggcagagatggagaaggccaaggggaaccctgagagcagcttcaatgatgagaacctgcgcatagtggtggctgacctgttctctgccgggatggtgaccacctcgaccacgctggcctggggcctcctgctcatgatcctacatccggatgtgcagcgccgtgtccaacaggagatcgacgacgtgatagggcaggtgcggcgaccagagatgggtgaccaggctcacatgccctacaccactgccgtgattcatgaggtgcagcgctttggggacatcgtccccctgggtgtgacccatatgacatcccgtgacatcgaagtacagggcttccgcatccctaagggaacgacactcatcaccaacctgtcatcggtgctgaaggatgaggccgtctgggagaagcccttccgcttccaccccgaacacttcctggatgcccagggccactttgtgaagccggaggccttcctgcctttctcagcaggccgccgtgcatgcctcggggagcccctggcccgcatggagctcttcctcttcttcacctccctgctgcagcacttcagcttctcggtgcccactggacagccccggcccagccaccatggtgtctttgctttcctggtgagcccatccccctatgagctttgtgctgtgccccgctagaatggggtacctagtccccagcctgctccctagccagag

SEQ ID NO: 5166 - DNA, 1433 bp, Homo sapiens
  source 1..1433: mol_type = unassigned DNA; mol_type = unassigned DNA
gcctggtcctctgtgcctggtggggtgggggtgccaggtgtgtccagaggagcccatttggtagtgaggcaggtatggggctagaagcactggtgcccctggccgtgatagtggccatcttcctgctcctggtggacctgatgcaccggcgccaacgctgggctgcacgctacccaccaggccccctgccactgcccgggctgggcaacctgctgcatgtggacttccagaacacaccatactgcttcgaccagttgcggcgccgcttcggggacgtgttcagcctgcagctggcctggacgccggtggtcgtgctcaatgggctggcggccgtgcgcgaggcgctggtgacccacggcgaggacaccgccgaccgcccgcctgtgcccatcacccagatcctgggtttcgggccgcgttcccaaggacgcccctttcgccccaacggtctcttggacaaagccgtgagcaacgtgatcgcctccctcacctgcgggcgccgcttcgagtacgacgaccctcgcttcctcaggctgctggacctagctcaggagggactgaaggaggagtcgggctttctgcgcgaggtgctgaatgctgtccccgtcctcctgcatatcccagcgctggctggcaaggtcctacgcttccaaaaggctttcctgacccagctggatgagctgctaactgagcacaggatgacctgggacccagcccagcccccccgagacctgactgaggccttcctggcagagatggagaaggccaaggggaaccctgagagcagcttcaatgatgagaacctgcgcatagtggtggctgacctgttctctgccgggatggtgaccacctcgaccacgctggcctggggcctcctgctcatgatcctacatccggatgtgcagcgccgtgtccaacaggagatcgacgacgtgatagggcaggtgcggcgaccagagatgggtgaccaggctcacatgccctacaccactgccgtgattcatgaggtgcagcgctttggggacatcgtccccctgggtgtgacccatatgacatcccgtgacatcgaagtacagggcttccgcatccctaagggaacgacactcatcaccaacctgtcatcggtgctgaaggatgaggccgtctgggagaagcccttccgcttccaccccgaacacttcctggatgcccagggccactttgtgaagccggaggccttcctgcctttctcagcaggccgccgtgcatgcctcggggagcccctggcccgcatggagctcttcctcttcttcacctccctgctgcagcacttcagcttctcggtgcccactggacagccccggcccagccaccatggtgtctttgctttcctggtgagcccatccccctatgagctttgtgctgtgccccgctagaatggggtacctagtccc

SEQ ID NO: 5167 - DNA, 1714 bp, Homo sapiens
  source 1..1714: mol_type = unassigned DNA
gtgctgagagtgtcctgcctggtcctctgtgcctggtggggtgggggtgccaggtgtgtccagaggagcccatttggtagtgaggcaggtatggggctagaagcactggtgcccctggccgtgatagtggccatcttcctgctcctggtggacctgatgcaccggcgccaacgctgggctgcacgctacccaccaggccccctgccactgcccgggctgggcaacctgctgcatgtggacttccagaacacaccatactgcttcgaccagttgcggcgccgcttcggggacgtgttcagcctgcagctggcctggacgccggtggtcgtgctcaatgggctggcggccgtgcgcgaggcgctggtgacccacggcgaggacaccgccgaccgcccgcctgtgcccatcacccagatcctgggtttcgggccgcgttcccaaggggtgttcctggcgcgctatgggcccgcgtggcgcgagcagaggcgcttctccgtgtccaccttgcgcaacttgggcctgggcaagaagtcgctggagcagtgggtgaccgaggaggccgcctgcctttgtgccgccttcgccaaccactccggacgcccctttcgccccaacggtctcttggacaaagccgtgagcaacgtgatcgcctccctcacctgcgggcgccgcttcgagtacgacgaccctcgcttcctcaggctgctggacctagctcaggagggactgaaggaggagtcgggctttctgcgcgaggtgctgaatgctgtccccgtcctcctgcatatcccagcgctggctggcaaggtcctacgcttccaaaaggctttcctgacccagctggatgagctgctaactgagcacaggatgacctgggacccagcccagcccccccgagacctgactgaggccttcctggcagagatggagaaggccaaggggaaccctgagagcagcttcaatgatgagaacctgcgcatagtggtggctgacctgttctctgccgggatggtgaccacctcgaccacgctggcctggggcctcctgctcatgatcctacatccggatgtgcagcagggaggaagggtacaggcgggggcccatcccattgtggggacgcatgtctgtccaggccgtgtccaacaggagatcgacgacgtgatagggcaggtgcggcgaccagagatgggtgaccaggctcacatgccctacaccactgccgtgattcatgaggtgcagcgctttggggacatcgtccccctgggtgtgacccatatgacatcccgtgacatcgaagtacagggcttccgcatccctaagggaacgacactcatcaccaacctgtcatcggtgctgaaggatgaggccgtctgggagaagcccttccgcttccaccccgaacacttcctggatgcccagggccactttgtgaagccggaggccttcctgcctttctcagcaggccgccgtgcatgcctcggggagcccctggcccgcatggagctcttcctcttcttcacctccctgctgcagcacttcagcttctcggtgcccactggacagccccggcccagccaccatggtgtctttgctttcctggtgagcccatccccctatgagctttgtgctgtgccccgctagaatggggtacctagtccccagcctgctccctagccagaggctctaatgtacaataaagcaatgtggtagttcc

SEQ ID NO: 5168 - DNA, 1187 bp, Homo sapiens
  source 1..1187: mol_type = unassigned DNA
ttgcggcgccgcttcggggacgtgttcagcctgcagctggcctggacgccggtggtcgtgctcaatgggctggcggccgtgcgcgaggcgctggtgacccacggcgaggacaccgccgaccgcccgcctgtgcccatcacccagatcctgggtttcgggccgcgttcccaaggacgcccctttcgccccaacggtctcttggacaaagccgtgagcaacgtgatcgcctccctcacctgcgggcgccgcttcgagtacgacgaccctcgcttcctcaggctgctggacctagctcaggagggactgaaggaggagtcgggctttctgcgcgaggtgctgaatgctgtccccgtcctcctgcatatcccagcgctggctggcaaggtcctacgcttccaaaaggctttcctgacccagctggatgagctgctaactgagcacaggatgacctgggacccagcccagcccccccgagacctgactgaggccttcctggcagagatggagaagtggtggctgacctgttctctgccgggatggtgaccacctcgaccacgctggcctggggcctcctgctcatgatcctacatccggatgtgcagcgccgtgtccaacaggagatcgacgacgtgatagggcaggtgcggcgaccagagatgggtgaccaggctcacatgccctacaccactgccgtgattcatgaggtgcagcgctttggggacatcgtccccctgggtgtgacccatatgacatcccgtgacatcgaagtacagggcttccgcatccctaagggaacgacactcatcaccaacctgtcatcggtgctgaaggatgaggccgtctgggagaagcccttccgcttccaccccgaacacttcctggatgcccagggccactttgtgaagccggaggccttcctgcctttctcagcaggccgccgtgcatgcctcggggagcccctggcccgcatggagctcttcctcttcttcacctccctgctgcagcacttcagcttctcggtgcccactggacagccccggcccagccaccatggtgtctttgctttcctggtgaccccatccccctatgagctttgtgctgtgccccgctagaatggggtacctagtccccagcctgctccctagccagaggctctaatgtacaataaagcaatgtggtagttccaa

SEQ ID NO: 5169 - DNA, 1684 bp, Homo sapiens
  source 1..1684: mol_type = unassigned DNA
ataagggaagggtcacgcgctcggtgtgctgagagtgtcctgcctggtcctctgtgcctggtggggtgggggtgccaggtgtgtccagaggagcccatttggtagtgaggcaggtatggggctagaagcactggtgcccctggccgtgatagtggccatcttcctgctcctggtggacctgatgcaccggcgccaacgctgggctgcacgctacccaccaggccccctgccactgcccgggctgggcaacctgctgcatgtggacttccagaacacaccatactgcttcgaccagttgcggcgccgcttcggggacgtgttcagcctgcagctggcctggacgccggtggtcgtgctcaatgggctggcggccgtgcgcgaggcgctggtgacccacggcgaggacaccgccgaccgcccgcctgtgcccatcacccagatcctgggtttcgggccgcgttcccaaggggtgttcctggcgcgctatgggcccgcgtggcgcgagcagaggcgcttctccgtctccaccttgcgcaacttgggcctgggcaagaagtcgctggagcagtgggtgaccgaggaggccgcctgcctttgtgccgccttcgccaaccactccggacgcccctttcgccccaacggtctcttggacaaagccgtgagcaacgtgatcgcctccctcacctgcgggcgccgcttcgagtacgacgaccctcgcttcctcaggctgctggacctagctcaggagggactgaaggaggagtcgggctttctgcgcgaggtgctgaatgctgtccccgtcctcctgcatatcccagcgctggctggcaaggtcctacgcttccaaaaggctttcctgacccagctggatgagctgctaactgagcacaggatgacctgggacccagcccagcccccccgagacctgactgaggccttcctggcagagatggagaaggccaaggggaaccctgagagcagcttcaatgatgagaacctgtgcatagtggtggctgacctgttctctgccgggatggtgaccacctcgaccacgctggcctggggcctcctgctcatgatcctacatccggatgtgcagcgccgtgtccaacaggagatcgacgacgtgatagggcaggtgcggcgaccagagatgggtgaccaggctcacatgccctacaccactgccgtgattcatgaggtgcagcgctttggggacatcgtccccctgggtgtgacccatatgacatcccgtgacatcgaagtacagggcttccgcatccctaagggaacgacactcatcaccaacctgtcatcggtgctgaaggatgaggccgtctgggagaagcccttccgcttccaccccgaacacttcctggatgcccagggccactttgtgaagccggaggccttcctgcctttctcagcaggccgccgtgcatgcctcggggagcccctggcccgcatggagctcttcctcttcttcacctccctgctgcagcacttcagcttctcggtgcccactggacagccccggcccagccaccatggtgtctttgctttcctggtgaccccatccccctatgagctttgtgctgtgccccgctagaatggggtacctagtccccagcctgctccctagccagaggctctaatgtacaataaagcaatgtggtagttccaa

SEQ ID NO: 5170 - DNA, 2257 bp, Homo sapiens
  source 1..2257: mol_type = unassigned DNA
cccatttggtagtgaggcaggtatggggctagaagcactggtgcccctggccgtgatagtggccatcttcctgctcctggtggacctgatgcaccggcgccaacgctgggctgcacgctacccaccaggccccctgccactgcccgggctgggcaacctgctgcatgtggacttccagaacacaccatactgcttcgaccaggtgagggaggaggtcctggagggcggcagaggtcctgaggatgccccaccaccagcaaacatgggtggtgggtgaaaccacaggctggaccagaagccaggctgagaaggggaagcaggtttgggggacttcctggagaagggcatttatacatggcatgaaggactggattttccaaaggccaaggaagagtagggcaagggcctggaggtggagctggacttggcagtgggcatgcaagcccattgggcaacatatgttatggagtacaaagtcccttctgctgacaccagaaggaaaggccttgggaatggaagatgagttagtcctgagtgccgtttaaatcacgaaatcgaggatgaagggggtgcagtgacccggttcaaaccttttgcactgtgggtcctcgggcctcactgctcaccggcatggaccatcatctgggaatgggatgctaactggggcctctcggcaattttggtgactcttgcaaggtcatacctgggtgacgcatccaaactgagttcctccatcacagaaggtgtgacccccacccccgccccaggatcaggaggctgggtctcctccttccacctgctcactcctggtagccccgggggtcgtccaaggttcaaataggactaggacctgtagtctggggggatcctggcttgacaagaggccctgaccctccctctgcagttgcggcgccgcttcggggacgtgttcagcctgcagctggcctggacgccggtggtcgtgctcaatgggctggcggccgtgcgcgaggcgctggtgacccacggcgaggacaccgccgaccgcccgcctgtgcccatcacccagatcctgggtttcgggccgcgttcccaaggggtgttcctggcgcgctatgggcccgcgtggcgcgagcagaggcgcttctccgtctccaccttgcgcaacttgggcctgggcaagaagtcgctggagcagtgggtgaccgaggaggccgcctgcctttgtgccgccttcgccaaccactccggacgcccctttcgccccaacggtctcttggacaaagccgtgagcaacgtgatcgcctccctcacctgcgggcgccgcttcgagtacgacgaccctcgcttcctcaggctgctggacctagctcaggagggactgaaggaggagtcgggctttctgcgcgaggtgctgaatgctgtccccgtcctcctgcatatcccagcgctggctggcaaggtcctacgcttccaaaaggctttcctgacccagctggatgagctgctaactgagcacaggatgacctgggacccagcccagcccccccgagacctgactgaggccttcctggcagagatggagaaggccaaggggaaccctgagagcagcttcaatgatgagaacctgtgcatagtggtggctgacctgttctctgccgggatggtgaccacctcgaccacgctggcctggggcctcctgctcatgatcctacatccggatgtgcagcgccgtgtccaacaggagatcgacgacgtgatagggcaggtgcggcgaccagagatgggtgaccaggctcacatgccctacaccactgccgtgattcatgaggtgcagcgctttggggacatcgtccccctgggtgtgacccatatgacatcccgtgacatcgaagtacagggcttccgcatccctaagggaacgacactcatcaccaacctgtcatcggtgctgaaggatgaggccgtctgggagaagcccttccgcttccaccccgaacacttcctggatgcccagggccactttgtgaagccggaggccttcctgcctttctcagcaggccgccgtgcatgcctcggggagcccctggcccgcatggagctcttcctcttcttcacctccctgctgcagcacttcagcttctcggtgcccactggacagccccggcccagccaccatggtgtctttgctttcctggtgaccccatccccctatgagctttgtgctgtgccccgctagaatggggtacctagtccccagcctgctccctagccagag

SEQ ID NO: 5171 - DNA, 1433 bp, Homo sapiens
  source 1..1433: mol_type = unassigned DNA
gcctggtcctctgtgcctggtggggtgggggtgccaggtgtgtccagaggagcccatttggtagtgaggcaggtatggggctagaagcactggtgcccctggccgtgatagtggccatcttcctgctcctggtggacctgatgcaccggcgccaacgctgggctgcacgctacccaccaggccccctgccactgcccgggctgggcaacctgctgcatgtggacttccagaacacaccatactgcttcgaccagttgcggcgccgcttcggggacgtgttcagcctgcagctggcctggacgccggtggtcgtgctcaatgggctggcggccgtgcgcgaggcgctggtgacccacggcgaggacaccgccgaccgcccgcctgtgcccatcacccagatcctgggtttcgggccgcgttcccaaggacgcccctttcgccccaacggtctcttggacaaagccgtgagcaacgtgatcgcctccctcacctgcgggcgccgcttcgagtacgacgaccctcgcttcctcaggctgctggacctagctcaggagggactgaaggaggagtcgggctttctgcgcgaggtgctgaatgctgtccccgtcctcctgcatatcccagcgctggctggcaaggtcctacgcttccaaaaggctttcctgacccagctggatgagctgctaactgagcacaggatgacctgggacccagcccagcccccccgagacctgactgaggccttcctggcagagatggagaaggccaaggggaaccctgagagcagcttcaatgatgagaacctgtgcatagtggtggctgacctgttctctgccgggatggtgaccacctcgaccacgctggcctggggcctcctgctcatgatcctacatccggatgtgcagcgccgtgtccaacaggagatcgacgacgtgatagggcaggtgcggcgaccagagatgggtgaccaggctcacatgccctacaccactgccgtgattcatgaggtgcagcgctttggggacatcgtccccctgggtgtgacccatatgacatcccgtgacatcgaagtacagggcttccgcatccctaagggaacgacactcatcaccaacctgtcatcggtgctgaaggatgaggccgtctgggagaagcccttccgcttccaccccgaacacttcctggatgcccagggccactttgtgaagccggaggccttcctgcctttctcagcaggccgccgtgcatgcctcggggagcccctggcccgcatggagctcttcctcttcttcacctccctgctgcagcacttcagcttctcggtgcccactggacagccccggcccagccaccatggtgtctttgctttcctggtgaccccatccccctatgagctttgtgctgtgccccgctagaatggggtacctagtccc

SEQ ID NO: 5172 - DNA, 1684 bp, Homo sapiens
  source 1..1684: mol_type = unassigned DNA
ataagggaagggtcacgcgctcggtgtgctgagagtgtcctgcctggtcctctgtgcctggtggggtgggggtgccaggtgtgtccagaggagcccatttggtagtgaggcaggtatggggctagaagcactggtgcccctggccgtgatagtggccatcttcctgctcctggtggacctgatgcaccggcgccaacgctgggctgcacgctactcaccaggccccctgccactgcccgggctgggcaacctgctgcatgtggacttccagaacacaccatactgcttcgaccagttgcggcgccgcttcggggacgtgttcagcctgcagctggcctggacgccggtggtcgtgctcaatgggctggcggccgtgcgcgaggcgctggtgacccacggcgaggacaccgccgaccgcccgcctgtgcccatcacccagatcctgggttttgggccgcgttcccaaggggtgttcctggcgcgctatgggcccgcgtggcgcgagcagaggcgcttctccgtctccaccttgcgcaacttgggcctgggcaagaagtcgctggagcagtgggtgaccgaggaggccgcctgcctttgtgccgccttcgccaaccactccggacgcccctttcgccccaacggtctcttggacaaagccgtgagcaacgtgatcgcctccctcacctgcgggcgccgcttcgagtacgacgaccctcgcttcctcaggctgctggacctagctcaggagggactgaaggaggagtcgggctttctgcgcgaggtgctgaatgctgtccccgtcctcctgcatatcccagcgctggctggcaaggtcctacgcttccaaaaggctttcctgacccagctggatgagctgctaactgagcacaggatgacctgggacccagcccagcccccccgagacctgactgaggccttcctggcagagatggagaaggccaaggggaaccctgagagcagcttcaatgatgagaacctgcgcatagtggtggctgacctgttctctgccgggatggtgaccacctcgaccacgctggcctggggcctcctgctcatgatcctacatccggatgtgcagcgccgtgtccaacaggagatcgacgacgtgatagggcaggtgcggcgaccagagatgggtgaccaggctcacatgccctacaccactgccgtgattcatgaggtgcagcgctttggggacatcgtccccctgggtgtgacccatatgacatcccgtgacatcgaagtacagggcttccgcatccctaagggaacgacactcatcaccaacctgtcatcggtgctgaaggatgaggccgtctgggagaagcccttccgcttccaccccgaacacttcctggatgcccagggccactttgtgaagccggaggccttcctgcctttctcagcaggccgccgtgcatgcctcggggagcccctggcccgcatggagctcttcctcttcttcacctccctgctgcagcacttcagcttctcggtgcccactggacagccccggcccagccaccatggtgtctttgctttcctggtgaccccatccccctatgagctttgtgctgtgccccgctagaatggggtacctagtccccagcctgctccctagccagaggctctaatgtacaataaagcaatgtggtagttccaa

SEQ ID NO: 5173 - DNA, 1504 bp, Homo sapiens
  source 1..1504: mol_type = unassigned DNA
gtgctgagagtgtcctgcctggtcctctgtgcctggtggggtgggggtgccaggtgtgtccagaggagcccatttggtagtgaggcaggtatggggctagaagcactggtgcccctggccgtgatagtggccatcttcctgctcctggtggacctgatgcaccggcgccaacgctgggctgcacgctactcaccaggccccctgccactgcccgggctgggcaacctgctgcatgtggacttccagaacacaccatactgcttcgaccagttgcggcgccgcttcggggacgtgttcagcctgcagctggcctggacgccggtggtcgtgctcaatgggctggcggccgtgcgcgaggcgctggtgacccacggcgaggacaccgccgaccgcccgcctgtgcccatcacccagatcctgggttttgggccgcgttcccaaggacgcccctttcgccccaacggtctcttggacaaagccgtgagcaacgtgatcgcctccctcacctgcgggcgccgcttcgagtacgacgaccctcgcttcctcaggctgctggacctagctcaggagggactgaaggaggagtcgggctttctgcgcgaggtgctgaatgctgtccccgtcctcctgcatatcccagcgctggctggcaaggtcctacgcttccaaaaggctttcctgacccagctggatgagctgctaactgagcacaggatgacctgggacccagcccagcccccccgagacctgactgaggccttcctggcagagatggagaaggccaaggggaaccctgagagcagcttcaatgatgagaacctgcgcatagtggtggctgacctgttctctgccgggatggtgaccacctcgaccacgctggcctggggcctcctgctcatgatcctacatccggatgtgcagcgccgtgtccaacaggagatcgacgacgtgatagggcaggtgcggcgaccagagatgggtgaccaggctcacatgccctacaccactgccgtgattcatgaggtgcagcgctttggggacatcgtccccctgggtgtgacccatatgacatcccgtgacatcgaagtacagggcttccgcatccctaagggaacgacactcatcaccaacctgtcatcggtgctgaaggatgaggccgtctgggagaagcccttccgcttccaccccgaacacttcctggatgcccagggccactttgtgaagccggaggccttcctgcctttctcagcaggccgccgtgcatgcctcggggagcccctggcccgcatggagctcttcctcttcttcacctccctgctgcagcacttcagcttctcggtgcccactggacagccccggcccagccaccatggtgtctttgctttcctggtgaccccatccccctatgagctttgtgctgtgccccgctagaatggggtacctagtccccagcctgctccctagccagaggctctaatgtacaataaagcaatgtggtagttcc

SEQ ID NO: 5174 - DNA, 1187 bp, Homo sapiens
  source 1..1187: mol_type = unassigned DNA
ttgcggcgccgcttcggggacgtgttcagcctgcagctggcctggacgccggtggtcgtgctcaatgggctggcggccgtgcgcgaggcgctggtgacccacggcgaggacaccgccgaccgcccgcctgtgcccatcacccagatcctgggttttgggccgcgttcccaaggacgcccctttcgccccaacggtctcttggacaaagccgtgagcaacgtgatcgcctccctcacctgcgggcgccgcttcgagtacgacgaccctcgcttcctcaggctgctggacctagctcaggagggactgaaggaggagtcgggctttctgcgcgaggtgctgaatgctgtccccgtcctcctgcatatcccagcgctggctggcaaggtcctacgcttccaaaaggctttcctgacccagctggatgagctgctaactgagcacaggatgacctgggacccagcccagcccccccgagacctgactgaggccttcctggcagagatggagaagtggtggctgacctgttctctgccgggatggtgaccacctcgaccacgctggcctggggcctcctgctcatgatcctacatccggatgtgcagcgccgtgtccaacaggagatcgacgacgtgatagggcaggtgcggcgaccagagatgggtgaccaggctcacatgccctacaccactgccgtgattcatgaggtgcagcgctttggggacatcgtccccctgggtgtgacccatatgacatcccgtgacatcgaagtacagggcttccgcatccctaagggaacgacactcatcaccaacctgtcatcggtgctgaaggatgaggccgtctgggagaagcccttccgcttccaccccgaacacttcctggatgcccagggccactttgtgaagccggaggccttcctgcctttctcagcaggccgccgtgcatgcctcggggagcccctggcccgcatggagctcttcctcttcttcacctccctgctgcagcacttcagcttctcggtgcccactggacagccccggcccagccaccatggtgtctttgctttcctggtgaccccatccccctatgagctttgtgctgtgccccgctagaatggggtacctagtccccagcctgctccctagccagaggctctaatgtacaataaagcaatgtggtagttccaa

SEQ ID NO: 5175 - DNA, 1684 bp, Homo sapiens; identical to SEQ ID NO: 5172
  source 1..1684: mol_type = unassigned DNA

SEQ ID NO: 5176 - DNA, 1714 bp, Homo sapiens
  source 1..1714: mol_type = unassigned DNA
gtgctgagagtgtcctgcctggtcctctgtgcctggtggggtgggggtgccaggtgtgtccagaggagcccatttggtagtgaggcaggtatggggctagaagcactggtgcccctggccgtgatagtggccatcttcctgctcctggtggacctgatgcaccggcgccaacgctgggctgcacgctactcaccaggccccctgccactgcccgggctgggcaacctgctgcatgtggacttccagaacacaccatactgcttcgaccagttgcggcgccgcttcggggacgtgttcagcctgcagctggcctggacgccggtggtcgtgctcaatgggctggcggccgtgcgcgaggcgctggtgacccacggcgaggacaccgccgaccgcccgcctgtgcccatcacccagatcctgggttttgggccgcgttcccaaggggtgttcctggcgcgctatgggcccgcgtggcgcgagcagaggcgcttctccgtctccaccttgcgcaacttgggcctgggcaagaagtcgctggagcagtgggtgaccgaggaggccgcctgcctttgtgccgccttcgccaaccactccggacgcccctttcgccccaacggtctcttggacaaagccgtgagcaacgtgatcgcctccctcacctgcgggcgccgcttcgagtacgacgaccctcgcttcctcaggctgctggacctagctcaggagggactgaaggaggagtcgggctttctgcgcgaggtgctgaatgctgtccccgtcctcctgcatatcccagcgctggctggcaaggtcctacgcttccaaaaggctttcctgacccagctggatgagctgctaactgagcacaggatgacctgggacccagcccagcccccccgagacctgactgaggccttcctggcagagatggagaaggccaaggggaaccctgagagcagcttcaatgatgagaacctgcgcatagtggtggctgacctgttctctgccgggatggtgaccacctcgaccacgctggcctggggcctcctgctcatgatcctacatccggatgtgcagcagggaggaagggtacaggcgggggcccatcccattgtggggacgcatgtctgtccaggccgtgtccaacaggagatcgacgacgtgatagggcaggtgcggcgaccagagatgggtgaccaggctcacatgccctacaccactgccgtgattcatgaggtgcagcgctttggggacatcgtccccctgggtgtgacccatatgacatcccgtgacatcgaagtacagggcttccgcatccctaagggaacgacactcatcaccaacctgtcatcggtgctgaaggatgaggccgtctgggagaagcccttccgcttccaccccgaacacttcctggatgcccagggccactttgtgaagccggaggccttcctgcctttctcagcaggccgccgtgcatgcctcggggagcccctggcccgcatggagctcttcctcttcttcacctccctgctgcagcacttcagcttctcggtgcccactggacagccccggcccagccaccatggtgtctttgctttcctggtgaccccatccccctatgagctttgtgctgtgccccgctagaatggggtacctagtccccagcctgctccctagccagaggctctaatgtacaataaagcaatgtggtagttcc

SEQ ID NO: 5177 - DNA, 2257 bp, Homo sapiens
  source 1..2257: mol_type = unassigned DNA
cccatttggtagtgaggcaggtatggggctagaagcactggtgcccctggccgtgatagtggccatcttcctgctcctggtggacctgatgcaccggcgccaacgctgggctgcacgctactcaccaggccccctgccactgcccgggctgggcaacctgctgcatgtggacttccagaacacaccatactgcttcgaccaggtgagggaggaggtcctggagggcggcagaggtgctgaggctcccctaccagaagcaaacatggatggtgggtgaaaccacaggctggaccagaagccaggctgagaaggggaagcaggtttgggggacttcctggagaagggcatttatacatggcatgaaggactggattttccaaaggccaaggaagagtagggcaagggcctggaggtggagctggacttggcagtgggcatgcaagcccattgggcaacatatgttatggagtacaaagtcccttctgctgacaccagaaggaaaggccttgggaatggaagatgagttagtcctgagtgccgtttaaatcacgaaatcgaggatgaagggggtgcagtgacccggttcaaaccttttgcactgtgggtcctcgggcctcactgctcaccggcatggaccatcatctgggaatgggatgctaactggggcctctcggcaattttggtgactcttgcaaggtcatacctgggtgacgcatccaaactgagttcctccatcacagaaggtgtgacccccacccccgccccacgatcaggaggctgggtctcctccttccacctgctcactcctggtagccccgggggtcgtccaaggttcaaataggactaggacctgtagtctggggggatcctggcttgacaagaggccctgaccctccctctgcagttgcggcgccgcttcggggacgtgttcagcctgcagctggcctggacgccggtggtcgtgctcaatgggctggcggccgtgcgcgaggcgctggtgacccacggcgaggacaccgccgaccgcccgcctgtgcccatcacccagatcctgggttttgggccgcgttcccaaggggtgttcctggcgcgctatgggcccgcgtggcgcgagcagaggcgcttctccgtctccaccttgcgcaacttgggcctgggcaagaagtcgctggagcagtgggtgaccgaggaggccgcctgcctttgtgccgccttcgccaaccactccggacgcccctttcgccccaacggtctcttggacaaagccgtgagcaacgtgatcgcctccctcacctgcgggcgccgcttcgagtacgacgaccctcgcttcctcaggctgctggacctagctcaggagggactgaaggaggagtcgggctttctgcgcgaggtgctgaatgctgtccccgtcctcctgcatatcccagcgctggctggcaaggtcctacgcttccaaaaggctttcctgacccagctggatgagctgctaactgagcacaggatgacctgggacccagcccagcccccccgagacctgactgaggccttcctggcagagatggagaaggccaaggggaaccctgagagcagcttcaatgatgagaacctgcgcatagtggtggctgacctgttctctgccgggatggtgaccacctcgaccacgctggcctggggcctcctgctcatgatcctacatccggatgtgcagcgccgtgtccaacaggagatcgacgacgtgatagggcaggtgcggcgaccagagatgggtgaccaggctcacatgccctacaccactgccgtgattcatgaggtgcagcgctttggggacatcgtccccctgggtgtgacccatatgacatcccgtgacatcgaagtacagggcttccgcatccctaagggaacgacactcatcaccaacctgtcatcggtgctgaaggatgaggccgtctgggagaagcccttccgcttccaccccgaacacttcctggatgcccagggccactttgtgaagccggaggccttcctgcctttctcagcaggccgccgtgcatgcctcggggagcccctggcccgcatggagctcttcctcttcttcacctccctgctgcagcacttcagcttctcggtgcccactggacagccccggcccagccaccatggtgtctttgctttcctggtgaccccatccccctatgagctttgtgctgtgccccgctagaatggggtacctagtccccagcctgctccctagccagag

SEQ ID NO: 5178 - DNA, 1433 bp, Homo sapiens
  source 1..1433: mol_type = unassigned DNA
gcctggtcctctgtgcctggtggggtgggggtgccaggtgtgtccagaggagcccatttggtagtgaggcaggtatggggctagaagcactggtgcccctggccgtgatagtggccatcttcctgctcctggtggacctgatgcaccggcgccaacgctgggctgcacgctactcaccaggccccctgccactgcccgggctgggcaacctgctgcatgtggacttccagaacacaccatactgcttcgaccagttgcggcgccgcttcggggacgtgttcagcctgcagctggcctggacgccggtggtcgtgctcaatgggctggcggccgtgcgcgaggcgctggtgacccacggcgaggacaccgccgaccgcccgcctgtgcccatcacccagatcctgggttttgggccgcgttcccaaggacgcccctttcgccccaacggtctcttggacaaagccgtgagcaacgtgatcgcctccctcacctgcgggcgccgcttcgagtacgacgaccctcgcttcctcaggctgctggacctagctcaggagggactgaaggaggagtcgggctttctgcgcgaggtgctgaatgctgtccccgtcctcctgcatatcccagcgctggctggcaaggtcctacgcttccaaaaggctttcctgacccagctggatgagctgctaactgagcacaggatgacctgggacccagcccagcccccccgagacctgactgaggccttcctggcagagatggagaaggccaaggggaaccctgagagcagcttcaatgatgagaacctgcgcatagtggtggctgacctgttctctgccgggatggtgaccacctcgaccacgctggcctggggcctcctgctcatgatcctacatccggatgtgcagcgccgtgtccaacaggagatcgacgacgtgatagggcaggtgcggcgaccagagatgggtgaccaggctcacatgccctacaccactgccgtgattcatgaggtgcagcgctttggggacatcgtccccctgggtgtgacccatatgacatcccgtgacatcgaagtacagggcttccgcatccctaagggaacgacactcatcaccaacctgtcatcggtgctgaaggatgaggccgtctgggagaagcccttccgcttccaccccgaacacttcctggatgcccagggccactttgtgaagccggaggccttcctgcctttctcagcaggccgccgtgcatgcctcggggagcccctggcccgcatggagctcttcctcttcttcacctccctgctgcagcacttcagcttctcggtgcccactggacagccccggcccagccaccatggtgtctttgctttcctggtgaccccatccccctatgagctttgtgctgtgccccgctagaatggggtacctagtccc

SEQ ID NO: 5179 - DNA, 1187 bp, Homo sapiens; identical to SEQ ID NO: 5174
  source 1..1187: mol_type = unassigned DNA

SEQ ID NO: 5180 - DNA, 1684 bp, Homo sapiens; identical to SEQ ID NO: 5172
  source 1..1684: mol_type = unassigned DNA

SEQ ID NO: 5181 - DNA, 2257 bp, Homo sapiens; identical to SEQ ID NO: 5177
  source 1..2257: mol_type = unassigned DNA

SEQ ID NO: 5182 - DNA, 1433 bp, Homo sapiens; identical to SEQ ID NO: 5178
  source 1..1433: mol_type = unassigned DNA

SEQ ID NO: 5183 - DNA, 1714 bp, Homo sapiens; identical to SEQ ID NO: 5176
  source 1..1714: mol_type = unassigned DNA; mol_type = unassigned DNA

SEQ ID NO: 5184 - DNA, 1187 bp, Homo sapiens
  source 1..1187: mol_type = unassigned DNA; mol_type = unassigned DNA
ttgcggcgccgcttcggggacgtgttcagcctgcagctggcctggacgccggtggtcgtgctcaatgggctggcggccgtgcgcgaggcgatggtgacccgcggcgaggacacggccgaccgcccgcctgtgcccatcacccagatcctgggtttcgggccgcgttcccaaggacgcccctttcgccccaacggtctcttggacaaagccgtgagcaacgtgatcgcctccctcacctgcgggcgccgcttcgagtacgacgaccctcgcttcctcaggctgctggacctagctcaggagggactgaaggaggagtcgggctttctgcgcgaggtgctgaatgctgtccccgtcctcctgcatatcccagcgctggctggcaaggtcctacgcttccaaaaggctttcctgacccagctggatgagctgctaactgagcacaggatgacctgggacccagcccagcccccccgagacctgactgaggccttcctggcagagatggagaagtggtggctgacctgttctctgccgggatggtgaccacctcgaccacgctggcctggggcctcctgctcatgatcctacatccggatgtgcagcgccgtgtccaacaggagatcgacgacgtgatagggcaggtgcggcgaccagagatgggtgaccaggctcacatgccctacaccactgccgtgattcatgaggtgcagcgctttggggacatcgtccccctgggtgtgacccatatgacatcccgtgacatcgaagtacagggcttccgcatccctaagggaacgacactcatcaccaacctgtcatcggtgctgaaggatgaggccgtctgggagaagcccttccgcttccaccccgaacacttcctggatgcccagggccactttgtgaagccggaggccttcctgcctttctcagcaggccgccgtgcatgcctcggggagcccctggcccgcatggagctcttcctcttcttcacctccctgctgcagcacttcagcttctcggtgcccactggacagccccggcccagccaccatggtgtctttgctttcctggtgaccccatccccctatgagctttgtgctgtgccccgctagaatggggtacctagtccccagcctgctccctagccagaggctctaatgtacaataaagcaatgtggtagttccaa

SEQ ID NO: 5185 - DNA, 1684 bp, Homo sapiens
  source 1..1684: mol_type = unassigned DNA; mol_type = unassigned DNA
ataagggaagggtcacgcgctcggtgtgctgagagtgtcctgcctggtcctctgtgcctggtggggtgggggtgccaggtgtgtccagaggagcccatttggtagtgaggcaggtatggggctagaagcactggtgcccctggccgtgatagtggccatcttcctgctcctggtggacctgatgcaccggcgccaacgctgggctgcacgctactcaccaggccccctgccactgcccgggctgggcaacctgctgcatgtggacttccagaacacaccatactgcttcgaccagttgcggcgccgcttcggggacgtgttcagcctgcagctggcctggacgccggtggtcgtgctcaatgggctggcggccgtgcgcgaggcgatggtgacccgcggcgaggacacggccgaccgcccgcctgtgcccatcacccagatcctgggtttcgggccgcgttcccaaggggtgttcctggcgcgctatgggcccgcgtggcgcgagcagaggcgcttctccgtctccaccttgcgcaacttgggcctgggcaagaagtcgctggagcagtgggtgaccgaggaggccgcctgcctttgtgccgccttcgccaaccactccggacgcccctttcgccccaacggtctcttggacaaagccgtgagcaacgtgatcgcctccctcacctgcgggcgccgcttcgagtacgacgaccctcgcttcctcaggctgctggacctagctcaggagggactgaaggaggagtcgggctttctgcgcgaggtgctgaatgctgtccccgtcctcctgcatatcccagcgctggctggcaaggtcctacgcttccaaaaggctttcctgacccagctggatgagctgctaactgagcacaggatgacctgggacccagcccagcccccccgagacctgactgaggccttcctggcagagatggagaaggccaaggggaaccctgagagcagcttcaatgatgagaacctgcgcatagtggtggctgacctgttctctgccgggatggtgaccacctcgaccacgctggcctggggcctcctgctcatgatcctacatccggatgtgcagcgccgtgtccaacaggagatcgacgacgtgatagggcaggtgcggcgaccagagatgggtgaccaggctcacatgccctacaccactgccgtgattcatgaggtgcagcgctttggggacatcgtccccctgggtgtgacccatatgacatcccgtgacatcgaagtacagggcttccgcatccctaagggaacgacactcatcaccaacctgtcatcggtgctgaaggatgaggccgtctgggagaagcccttccgcttccaccccgaacacttcctggatgcccagggccactttgtgaagccggaggccttcctgcctttctcagcaggccgccgtgcatgcctcggggagcccctggcccgcatggagctcttcctcttcttcacctccctgctgcagcacttcagcttctcggtgcccactggacagccccggcccagccaccatggtgtctttgctttcctggtgaccccatccccctatgagctttgtgctgtgccccgctagaatggggtacctagtccccagcctgctccctagccagaggctctaatgtacaataaagcaatgtggtagttccaa

SEQ ID NO: 5186 - DNA, 1714 bp, Homo sapiens
  source 1..1714: mol_type = unassigned DNA; mol_type = unassigned DNA
gtgctgagagtgtcctgcctggtcctctgtgcctggtggggtgggggtgccaggtgtgtccagaggagcccatttggtagtgaggcaggtatggggctagaagcactggtgcccctggccgtgatagtggccatcttcctgctcctggtggacctgatgcaccggcgccaacgctgggctgcacgctactcaccaggccccctgccactgcccgggctgggcaacctgctgcatgtggacttccagaacacaccatactgcttcgaccagttgcggcgccgcttcggggacgtgttcagcctgcagctggcctggacgccggtggtcgtgctcaatgggctggcggccgtgcgcgaggcgatggtgacccgcggcgaggacacggccgaccgcccgcctgtgcccatcacccagatcctgggtttcgggccgcgttcccaaggggtgttcctggcgcgctatgggcccgcgtggcgcgagcagaggcgcttctccgtctccaccttgcgcaacttgggcctgggcaagaagtcgctggagcagtgggtgaccgaggaggccgcctgcctttgtgccgccttcgccaaccactccggacgcccctttcgccccaacggtctcttggacaaagccgtgagcaacgtgatcgcctccctcacctgcgggcgccgcttcgagtacgacgaccctcgcttcctcaggctgctggacctagctcaggagggactgaaggaggagtcgggctttctgcgcgaggtgctgaatgctgtccccgtcctcctgcatatcccagcgctggctggcaaggtcctacgcttccaaaaggctttcctgacccagctggatgagctgctaactgagcacaggatgacctgggacccagcccagcccccccgagacctgactgaggccttcctggcagagatggagaaggccaaggggaaccctgagagcagcttcaatgatgagaacctgcgcatagtggtggctgacctgttctctgccgggatggtgaccacctcgaccacgctggcctggggcctcctgctcatgatcctacatccggatgtgcagcagggaggaagggtacaggcgggggcccatcccattgtggggacgcatgtctgtccaggccgtgtccaacaggagatcgacgacgtgatagggcaggtgcggcgaccagagatgggtgaccaggctcacatgccctacaccactgccgtgattcatgaggtgcagcgctttggggacatcgtccccctgggtgtgacccatatgacatcccgtgacatcgaagtacagggcttccgcatccctaagggaacgacactcatcaccaacctgtcatcggtgctgaaggatgaggccgtctgggagaagcccttccgcttccaccccgaacacttcctggatgcccagggccactttgtgaagccggaggccttcctgcctttctcagcaggccgccgtgcatgcctcggggagcccctggcccgcatggagctcttcctcttcttcacctccctgctgcagcacttcagcttctcggtgcccactggacagccccggcccagccaccatggtgtctttgctttcctggtgaccccatccccctatgagctttgtgctgtgccccgctagaatggggtacctagtccccagcctgctccctagccagaggctctaatgtacaataaagcaatgtggtagttcc

SEQ ID NO: 5187 - DNA, 2257 bp, Homo sapiens
  source 1..2257: mol_type = unassigned DNA; mol_type = unassigned DNA
cccatttggtagtgaggcaggtatggggctagaagcactggtgcccctggccgtgatagtggccatcttcctgctcctggtggacctgatgcaccggcgccaacgctgggctgcacgctactcaccaggccccctgccactgcccgggctgggcaacctgctgcatgtggacttccagaacacaccatactgcttcgaccaggtgagggaggaggtcctggagggcggcagaggtgctgaggctcccctaccagaagcaaacatggatggtgggtgaaaccacaggctggaccagaagccaggctgagaaggggaagcaggtttgggggacttcctggagaagggcatttatacatggcatgaaggactggattttccaaaggccaaggaagagtagggcaagggcctggaggtggagctggacttggcagtgggcatgcaagcccattgggcaacatatgttatggagtacaaagtcccttctgctgacaccagaaggaaaggccttgggaatggaagatgagttagtcctgagtgccgtttaaatcacgaaatcgaggatgaagggggtgcagtgacccggttcaaaccttttgcactgtgggtcctcgggcctcactgctcaccggcatggaccatcatctgggaatgggatgctaactggggcctctcggcaattttggtgactcttgcaaggtcatacctgggtgacgcatccaaactgagttcctccatcacagaaggtgtgacccccacccccgccccaggatcaggaggctgggtctcctccttccacctgctcactcctggtagccccgggggtcgtccaaggttcaaataggactaggacctgtagtctggggggatcctggcttgacaagaggccctgaccctccctctgcagttgcggcgccgcttcggggacgtgttcagcctgcagctggcctggacgccggtggtcgtgctcaatgggctggcggccgtgcgcgaggcgatggtgacccgcggcgaggacacggccgaccgcccgcctgtgcccatcacccagatcctgggtttcgggccgcgttcccaaggggtgttcctggcgcgctatgggcccgcgtggcgcgagcagaggcgcttctccgtctccaccttgcgcaacttgggcctgggcaagaagtcgctggagcagtgggtgaccgaggaggccgcctgcctttgtgccgccttcgccaaccactccggacgcccctttcgccccaacggtctcttggacaaagccgtgagcaacgtgatcgcctccctcacctgcgggcgccgcttcgagtacgacgaccctcgcttcctcaggctgctggacctagctcaggagggactgaaggaggagtcgggctttctgcgcgaggtgctgaatgctgtccccgtcctcctgcatatcccagcgctggctggcaaggtcctacgcttccaaaaggctttcctgacccagctggatgagctgctaactgagcacaggatgacctgggacccagcccagcccccccgagacctgactgaggccttcctggcagagatggagaaggccaaggggaaccctgagagcagcttcaatgatgagaacctgcgcatagtggtggctgacctgttctctgccgggatggtgaccacctcgaccacgctggcctggggcctcctgctcatgatcctacatccggatgtgcagcgccgtgtccaacaggagatcgacgacgtgatagggcaggtgcggcgaccagagatgggtgaccaggctcacatgccctacaccactgccgtgattcatgaggtgcagcgctttggggacatcgtccccctgggtgtgacccatatgacatcccgtgacatcgaagtacagggcttccgcatccctaagggaacgacactcatcaccaacctgtcatcggtgctgaaggatgaggccgtctgggagaagcccttccgcttccaccccgaacacttcctggatgcccagggccactttgtgaagccggaggccttcctgcctttctcagcaggccgccgtgcatgcctcggggagcccctggcccgcatggagctcttcctcttcttcacctccctgctgcagcacttcagcttctcggtgcccactggacagccccggcccagccaccatggtgtctttgctttcctggtgaccccatccccctatgagctttgtgctgtgccccgctagaatggggtacctagtccccagcctgctccctagccagag

SEQ ID NO: 5188 - DNA, 1433 bp, Homo sapiens
  source 1..1433: mol_type = unassigned DNA; mol_type = unassigned DNA
gcctggtcctctgtgcctggtggggtgggggtgccaggtgtgtccagaggagcccatttggtagtgaggcaggtatggggctagaagcactggtgcccctggccgtgatagtggccatcttcctgctcctggtggacctgatgcaccggcgccaacgctgggctgcacgctactcaccaggccccctgccactgcccgggctgggcaacctgctgcatgtggacttccagaacacaccatactgcttcgaccagttgcggcgccgcttcggggacgtgttcagcctgcagctggcctggacgccggtggtcgtgctcaatgggctggcggccgtgcgcgaggcgatggtgacccgcggcgaggacacggccgaccgcccgcctgtgcccatcacccagatcctgggtttcgggccgcgttcccaaggacgcccctttcgccccaacggtctcttggacaaagccgtgagcaacgtgatcgcctccctcacctgcgggcgccgcttcgagtacgacgaccctcgcttcctcaggctgctggacctagctcaggagggactgaaggaggagtcgggctttctgcgcgaggtgctgaatgctgtccccgtcctcctgcatatcccagcgctggctggcaaggtcctacgcttccaaaaggctttcctgacccagctggatgagctgctaactgagcacaggatgacctgggacccagcccagcccccccgagacctgactgaggccttcctggcagagatggagaaggccaaggggaaccctgagagcagcttcaatgatgagaacctgcgcatagtggtggctgacctgttctctgccgggatggtgaccacctcgaccacgctggcctggggcctcctgctcatgatcctacatccggatgtgcagcgccgtgtccaacaggagatcgacgacgtgatagggcaggtgcggcgaccagagatgggtgaccaggctcacatgccctacaccactgccgtgattcatgaggtgcagcgctttggggacatcgtccccctgggtgtgacccatatgacatcccgtgacatcgaagtacagggcttccgcatccctaagggaacgacactcatcaccaacctgtcatcggtgctgaaggatgaggccgtctgggagaagcccttccgcttccaccccgaacacttcctggatgcccagggccactttgtgaagccggaggccttcctgcctttctcagcaggccgccgtgcatgcctcggggagcccctggcccgcatggagctcttcctcttcttcacctccctgctgcagcacttcagcttctcggtgcccactggacagccccggcccagccaccatggtgtctttgctttcctggtgaccccatccccctatgagctttgtgctgtgccccgctagaatggggtacctagtccc

SEQ ID NO: 5189 - DNA, 1896 bp, Homo sapiens
  source 1..1896: mol_type = unassigned DNA; mol_type = unassigned DNA
cgccgcctgcttggaccgcagaagagcaggaggacgtctgagccatgctcgcggcgatgggctctctggcggctgccctctgggcagtggtccatcctcggactctcctactgggcactgtcgcctttctgctcgctgctgactttctcaaaagacggcgcccaaagaactacccgccggggccctggcgcctgcccttccttggcaacttcttccttgtggacttcgagcagtcgcacctggaggttcagctgtttgtgaagaaatatgggaacctttttagcttggagcttggtgacatatctgcagttcttattactggcttgcccttaatcaaagaagcccttatccacatggaccaaaactttgggaaccgccccgtgacccctatgcgagaacatatctttaagaaaaatggattgattatgtcaagtggccaggcatggaaggagcaaagaaggttcactctgacagcactaaggaactttggtttaggaaagaagagcttagaggaacgcattcaggaggaggcccaacacctcactgaagcaataaaagaggagaacggacagccttttgaccctcatttcaagatcaacaatgcagtttccaatatcatttgctccatcaccttcggagaacgctttgagtaccaggatagttggtttcagcagctgctgaagttactagatgaagtcacatacttggaggcttcaaagacatgccagctctacaatgtctttccatggataatgaaattcctgcctggaccccaccaaactctcttcagcaactggaaaaaactgaaattgtttgtttctcatatgattgacaaacacagaaaggattggaatcctgcagaaacaagagactttattgatgcttaccttaaagaaatgtcaaagcacacaggcaatcctacttcaagtttccatgaagaaaacctcatctgcagcaccctggacctcttctttgccggaaccgagacaacttccacaactctgcgatgggctctgctttatatggccctctacccagaaatccaagaaaaagtacaagctgagattgacagagtgattggccaggggcagcagccgagcacagccgcccgggagtccatgccctacaccaatgctgtcatccatgaggtgcagagaatgggcaacatcatccccctgaacgttcccagggaagtgacagttgataccactttggctgggtaccacctgcccaagggtaccatgatcctgaccaatttgacggcgctgcacagggaccccacagagtgggccacccctgacacattcaatccggaccattttctggagaatggacagtttaagaaaagggaagcctttatgcctttctcaataggaaagcgggcatgcctcggagaacagttggccaggactgagctgtttattttcttcacttcccttatgcaaaaatttaccttcaggcccccaaacaatgagaagctgagcctgaagtttagaatgggtatcaccatttccccagtcagtcaccgcctctgcgctgttcctcaggtgtaatattgttaagaaagaaaggggcaaggaaagtaagaagacatggcacgtgttctgaaaccactggtgtctgctcagatgtgttgggacaaaatgaaagtgactttcaagaaagatcagaggaatttgactcagagaaaactagatccaaatcccagctctactgtctcgtccgaattagccttgggaaaatcatttatatgctaaataatttacctttttatctaggagatgaaaagaggataatgtttccttccataaagaaagttcttgtaagaatcaaaagaaatggtgagctttaagtggtttgtaaaccataaaacacatcataaaagttctatctata

SEQ ID NO: 5190 - DNA, 2549 bp, Homo sapiens
  source 1..2549: mol_type = unassigned DNA; mol_type = unassigned DNA
atttaatagaagatgaaccagcaaaatatataggaagttgctggcagagaattaggacgaaaatctggagacagtggtatcctgagcaccactggaaggcagtatttcaagaaagaagtgtctactgctgctgcaagtaagacgaggtcaaaaggtatccggaccaattcagtgggtgagcaggccatagtcagatattaaaaggtgttgaggagtgctctggaattgaagaaattgaaaggagtatggcattacctgtgttataaaacaaatgatggtctgtcaaacacaccaaaatttttttttctttgcttgtactcttctttctgtatggaactttcactcctccttgatctcttgattccttacatcatcttttaatgtccaggttagataggacctctcctataaagcctttcttagccttagcctctttaagagtatgggcattgtcttaaccattagtgcattcctagtgtttagcataacataaatacttaactttacttatgtaactaataatcaaagcatgggctttggaataaggcagacctgaaattgaatacctgtttagttgcttacttactgtgagaccctgtaaaatgcattttatcctttatcccttgttcctcagttttttcattagtaaaatgtgtggggtggtaataattgtacctatcccagagagtttctatgagtactaaattatataatgcacaacaaaatgcatattaaagtgcctgccattgcaagcaatcagtaaatattagccattatatccattgctttgggattatttctctgggcagttttcaagtgccttaatgatcttctcctgtccttcatctgatacacattcccatatcatttgctggatattcatattatggaatcagaatactgtaatgttgactttctttttcccaggattgattatgtcaagtggccaggcatggaaggagcaaagaaggttcactctgacagcactaaggaactttggtttaggaaagaagagcttagaggaacgcattcaggaggaggcccaacacctcactgaagcaataaaagaggagaacggacagccttttgaccctcatttcaagatcaacaatgcagtttccaatatcatttgctccatcaccttcggagaacgctttgagtaccaggatagttggtttcagcagctgctgaagttactagatgaagtcacatacttggaggcttcaaagacatgccagctctacaatgtctttccatggataatgaaattcctgcctggaccccaccaaactctcttcagcaactggaaaaaactgaaattgtttgtttctcatatgattgacaaacacagaaaggattggaatcctgcagaaacaagagactttattgatgcttaccttaaagaaatgtcaaagcacacaggcaatcctacttcaagtttccatgaagaaaacctcatctgcagcaccctggacctcttctttgccggaaccgagacaacttccacaactctgcgatgggctctgctttatatggccctctacccagaaatccaagaaaaagtacaagctgagattgacagagtgattggccaggggcagcagccgagcacagccgcccgggagtccatgccctacaccaatgctgtcatccatgaggtgcagagaatgggcaacatcatccccctgaacgttcccagggaagtgacagttgataccactttggctgggtaccacctgcccaagaacatctcaccagactagggatctgccaaactttgggaaattctgcttcatgaacctggggttctagaatgctaaaatgtgaaaggacatttaagaccacctgggacaacatcatattaatgctggtgtttttaacataatatccccacagggtaccatgatcctgaccaatttgacggcgctgcacagggaccccacagagtgggccacccctgacacattcaatccggaccattttctggagaatggacagtttaagaaaagggaagcctttatgcctttctcaataggaaagcgggcatgcctcggagaacagttggccaggactgagctgtttattttcttcacttcccttatgcaaaaatttaccttcaggcccccaaacaatgagaagctgagcctgaagtttagaatgggtatcaccatttccccagtcagtcaccgcctctgcgctgttcctcaggtgtaatattgttaagaaagaaaggggcaaggaaagtaagaagacatggcacgtgttctgaaaccactggtgtctgctcagatgtgttgggacaaaatgaaagtgactttcaagaaagatcagaggaatttgactcagagaaaactagatccaaatcccagctctactgtctcgtccgaattagccttgggaaaatcatttatatgctaaataatttacctttttatctaggagatgaaaagaggataatgtttccttccataaagaaagttcttgtaagaatcaaaagaaatggtgagctttaagtggtttgtaaaccataaaacacatcataaaagttc

SEQ ID NO: 5191 - DNA, 1667 bp, Homo sapiens
  source 1..1667: mol_type = unassigned DNA; mol_type = unassigned DNA
gaggacgtctgagccatgctcgcggcgatgggctctctggcggctgccctctgggcagtggtccatcctcggactctcctactgggcactgtcgcctttctgctcgctgctgactttctcaaaagacggcgcccaaagaactacccgccggggccctggcgcctgcccttccttggcaacttcttccttgtggacttcgagcagtcgcacctggaggttcagctgtttgtgaagaaatatgggaacctttttagcttggagcttggtgacatatctgcagttcttattactggcttgcccttaatcaaagaagcccttatccacatggaccaaaactttgggaaccgccccgtgacccctatgcgagaacatatctttaagaaaaatggattgattatgtcaagtggccaggcatggaaggagcaaagaaggttcactctgacagcactaaggaactttggtttaggaaagaagagcttagaggaacgcattcaggaggaggcccaacacctcactgaagcaataaaagaggagaacggacagccttttgaccctcatttcaagatcaacaatgcagtttccaatatcatttgctccatcaccttcggagaacgctttgagtaccaggatagttggtttcagcagctgctgaagttactagatgaagtcacatacttggaggcttcaaagacatgccagctctacaatgtctttccatggataatgaaattcctgcctggaccccaccaaactctcttcagcaactggaaaaaactgaaattgtttgtttctcatatgattgacaaacacagaaaggattggaatcctgcagaaacaagagactttattgatgcttaccttaaagaaatgtcaaagcacacaggcaatcctacttcaagtttccatgaagaaaacctcatctgcagcaccctggacctcttctttgccggaaccgagacaacttccacaactctgcgatgggctctgctttatatggccctctacccagaaatccaagggtaccatgatcctgaccaatttgacggcgctgcacagggaccccacagagtgggccacccctgacacattcaatccggaccattttctggagaatggacagtttaagaaaagggaagcctttatgcctttctcaataggaaagcgggcatgcctcggagaacagttggccaggactgagctgtttattttcttcacttcccttatgcaaaaatttaccttcaggcccccaaacaatgagaagctgagcctgaagtttagaatgggtatcaccatttccccagtcagtcaccgcctctgcgctgttcctcaggtgtaatattgttaagaaagaaaggggcaaggaaagtaagaagacatggcacgtgttctgaaaccactggtgtctgctcagatgtgttgggacaaaatgaaagtgactttcaagaaagatcagaggaatttgactcagagaaaactagatccaaatcccagctctactgtctcgtccgaattagccttgggaaaatcatttatatgctaaataatttacctttttatctaggagatgaaaagaggataatgtttccttccataaagaaagttcttgtaagaatcaaaagaaatggtgagctttaagtggtttgtaaaccataaaacacatcataaaa

SEQ ID NO: 5192 - DNA, 2006 bp, Homo sapiens
  source 1..2006: mol_type = unassigned DNA; mol_type = unassigned DNA
gaggacgtctgagccatgctcgcggcgatgggctctctggcggctgccctctgggcagtggtccatcctcggactctcctactgggcactgtcgcctttctgctcgctgctgactttctcaaaagacggcgcccaaagaactacccgccggggccctggcgcctgcccttccttggcaacttcttccttgtggacttcgagcagtcgcacctggaggttcagctgtttgtgaagaaatatgggaacctttttagcttggagcttggtgacatatctgcagttcttattactggcttgcccttaatcaaagaagcccttatccacatggaccaaaactttgggaaccgccccgtgacccctatgcgagaacatatctttaagaaaaatggattgattatgtcaagtggccaggcatggaaggagcaaagaaggttcactctgacagcactaaggaactttggtttaggaaagaagagcttagaggaacgcattcaggaggaggcccaacacctcactgaagcaataaaagaggagaacggacagccttttgaccctcatttcaagatcaacaatgcagtttccaatatcatttgctccatcaccttcggagaacgctttgagtaccaggatagttggtttcagcagctgctgaagttactagatgaagtcacatacttggaggcttcaaagacatgccagctctacaatgtctttccatggataatgaaattcctgcctggaccccaccaaactctcttcagcaactggaaaaaactgaaattgtttgtttctcatatgattgacaaacacagaaaggattggaatcctgcagaaacaagagactttattgatgcttaccttaaagaaatgtcaaagcacacaggcaatcctacttcaagtttccatgaagaaaacctcatctgcagcaccctggacctcttctttgccggaaccgagacaacttccacaactctgcgatgggctctgctttatatggccctctacccagaaatccaagaaaaagtacaagctgagattgacagagtgattggccaggggcagcagccgagcacagccgcccgggagtccatgccctacaccaatgctgtcatccatgaggtgcagagaatgggcaacatcatccccctgaacgttcccagggaagtgacagttgataccactttggctgggtaccacctgcccaagaacatctcaccagactagggatctgccaaactttgggaaattctgcttcatgaacctggggttctagaatgctaaaatgtgaaaggacatttaagaccacctgggacaacatcatattaatgctggtgtttttaacataatatccccacagggtaccatgatcctgaccaatttgacggcgctgcacagggaccccacagagtgggccacccctgacacattcaatccggaccattttctggagaatggacagtttaagaaaagggaagcctttatgcctttctcaataggaaagcgggcatgcctcggagaacagttggccaggactgagctgtttattttcttcacttcccttatgcaaaaatttaccttcaggcccccaaacaatgagaagctgagcctgaagtttagaatgggtatcaccatttccccagtcagtcaccgcctctgcgctgttcctcaggtgtaatattgttaagaaagaaaggggcaaggaaagtaagaagacatggcacgtgttctgaaaccactggtgtctgctcagatgtgttgggacaaaatgaaagtgactttcaagaaagatcagaggaatttgactcagagaaaactagatccaaatcccagctctactgtctcgtccgaattagccttgggaaaatcatttatatgctaaataatttacctttttatctaggagatgaaaagaggataatgtttccttccataaagaaagttcttgtaagaatcaaaagaaatggtgagctttaagtggtttgtaaaccataaaacacatcataaaa

SEQ ID NO: 5193 - DNA, 759 bp, Homo sapiens
  source 1..759: mol_type = unassigned DNA; mol_type = unassigned DNA
gtctgagccatgctcgcggcgatgggctctctggcggctgccctctgggcagtggtccatcctcggactctcctactgggcactgtcgcctttctgctcgctgctgactttctcaaaagacggcgcccaaagaactacccgccggggccctggcgcctgcccttccttggcaacttcttccttgtggacttcgagcagtcgcacctggaggttcagctggtaggagtgggagaagtttgtgaagaaatatgggaacctttttagcttggagcttggtgacatatctgcagttcttattactggcttgcccttaatcaaagaagcccttatccacatggaccaaaactttgggaaccgccccgtgacccctatgcgagaacatatctttaagaaaaatggattgattatgtcaagtggccaggcatggaaggagcaaagaaggttcactctgacagcactaaggaactttggtttaggaaagaagagcttagaggaacgcattcaggaggaggcccaacacctcactgaagcaataaaagaggagaacggacagccttttgaccctcatttcaagatcaacaatgcagtttccaatatcatttgctccatcaccttcggagaacgctttgagtaccaggatagttggtttcagcagctgctgaagttactagatgaagtcacatacttggaggcttcaaagacatgccagctctacaatgtctttccatggataatgaaattcctgcctggaccccacca

SEQ ID NO: 5194 - DNA, 587 bp, Homo sapiens
  source 1..587: mol_type = unassigned DNA; mol_type = unassigned DNA
gagaaaattataaaatgcttctcatcagaaaagttagccaagatgcaaggatggtcagaagtttttcaaagcaggcaagatgtcctggagaaatattatgtgcacgaggaccttgaaataggagcacatcatttaggctttctctgggcctctgtggcaaacactattccaactatgttctgggcaatgtattatcttctgcggcacccagaagctatggcagcagtgcgtgacgaaattgaccgtttgctgcagtcaacaggtcaaaagaaagggtctggatttcccatccacctcaccagagaacaattggacagcctaatctgcctagaaagcagcatttttgaagctttacgactgtcctcatattcaaccaccattcgttttgttgaggaggatttgactctcagttcagagaccggggactactgtgtgcgaaagggagacttggtagccatctttcctccagtcctacatggtgaccctgaaatctttgaagctccagagcaaactgtgctcacaggagaaactagaggaatggaaataacagagctctcaaatctgtacttctgtactgcctacagtag

SEQ ID NO: 5195 - DNA, 2202 bp, Homo sapiens
  source 1..2202: mol_type = unassigned DNA; mol_type = unassigned DNA
tcattcagcctgggagaccacggtgacattcctgtctgcgctgcgggcaggccagcctctccggccctggactagggggcgccgccgagagaagccgccgcaggctgcagagtcgccgaccgcgctgttcgcaggcagaccccgggctgcccaccgcggcctagcgcgcgccggatggcaggagaagtgtccgcggccacgggccgcttttcgctggagcggttgggcctcccgggcctggccctcgccgcggccctgctgctcctggccctctgcttgcttgtccggcgcaccaggagacccggtgagcctccattgataaaaggttggcttccttatcttggagtggtcctgaacttacgaaaagaccccttaaggttcatgaaaacacttcaaaagcaacatggtgacactttcacagttcttcttggtggaaagtacataacatttatcctggaccccttccagtaccagctagtgataaaaaatcataaacaattaagctttcgagtattttctaataaattattagagaaagcatttagcatcagtcagttgcaaaaaaatcatgacatgaatgatgagcttcacctctgctatcaatttttgcaaggcaaatctttggacatactcttggaaagcatgatgcagaatctaaaacaagtttttgaaccccagctgttaaaaaccacaagttgggacacggcagaactgtatccattctgcagctcaataatatttgagatcacatttacaactatatatggaaaagttattgtttgtgacaacaacaaatttattagtgagctaagagatgattttttaaaatttgatgacaagtttgcatatttagtatccaacatacccattgagcttctaggaaatgtcaagtctattagagagaaaattataaaatgcttctcatcagaaaagttagccaagatgcaaggatggtcagaagtttttcaaagcaggcaagatgtcctggagaaatattatgtgcacgaggaccttgaaataggagcacatcatttaggctttctctgggcctctgtggcaaacactattccaactatgttctgggcaatgtattatcttctgcggcacccagaagctatggcagcagtgcgtgacgaaattgaccgtttgctgcagtcaacaggtcaaaagaaagggtctggatttcccatccacctcaccagagaacaattggacagcctaatctgcctagaaagcagcatttttgaagctttacgactgtcctcatattcaaccaccattcgttttgttgaggaggatttgactctcagttcagagaccggggactactgtgtgcgaaagggagacttggtagccatctttcctccagtcctacatggtgaccctgaaatctttgaagctccagaggagtttagatatgatcgttttatagaagatggtaagaagaaaaccacctttttcaaaagagggaaaaagctgaagtgttacctaatgccgtttggaactggaaccagcaaatgtccaggccgattttttgcacttatggaaataaaacaattgttggttatacttttaacttattttgatttagaaataattgatgataagcccataggactaaactacagccgcttgttgtttggtattcagtatccagattctgatgttttatttagatacaaagtgaaatcttagagaagctaaaaggaaagaaaataaatctatcaaaattaccctaaacatcctaagctcatctatttctttttaatttctgcaaatgtaattgatttatttgtttaaaaagcgctaatttctatttgatctgatatcagtccagtttgtccttagtcacaaagcccatcataatataaaacaggatggtggcaggaaaatggacatcaaaatcaacttaagggtaggctcaaaacagggttgttgttgtttttttagtttctccttgttgtgattttcacctgttataataaatgtaccttcacaccaatagattgggcactgtggaatttaaatcactcaaattgttctctaatatgtaaaattacactttgaactactagaaaattgtgctggaaatggacacagtctaacaaattccaaattctcacagaagaaggaaattgaatttccatgagttacactggatgaaaatgttcccttcaagtataatattaataatacctatat

SEQ ID NO: 5196 - DNA, 2290 bp, Homo sapiens
  source 1..2290: mol_type = unassigned DNA; mol_type = unassigned DNA
agaccgcgagcgagagcgcccccgagcagcgcccgcgccctccgcgccttctccgccgggacctcgagcgaaagacgcccgcccgccgcccagccctcgcctccctgcccaccgggcccaccgcgccgccaccccgaccccgctgcgcacggcctgtccgctgcacaccagcttgttggcgtcttcgtcgccgcgctcgccccgggctactcctgcgcgccacaatgagctcccgcatcgccagggcgctcgccttagtcgtcacccttctccacttgaccaggctggcgctctccacctgccccgctgcctgccactgccccctggaggcgcccaagtgcgcgccgggagtcgggctggtccgggacggctgcggctgctgtaaggtctgcgccaagcagctcaacgaggactgcagcaaaacgcagccctgcgaccacaccaaggggctggaatgcaacttcggcgccagctccaccgctctgaaggggatctgcagagctcagtcagagggcagaccctgtgaatataactccagaatctaccaaaacggggaaagtttccagcccaactgtaaacatcagtgcacatgtattgatggcgccgtgggctgcattcctctgtgtccccaagaactatctctccccaacttgggctgtcccaaccctcggctggtcaaagttaccgggcagtgctgcgaggagtgggtctgtgacgaggatagtatcaaggaccccatggaggaccaggacggcctccttggcaaggagctgggattcgatgcctccgaggtggagttgacgagaaacaatgaattgattgcagttggaaaaggcagctcactgaagcggctccctgtttttggaatggagcctcgcatcctatacaaccctttacaaggccagaaatgtattgttcaaacaacttcatggtcccagtgctcaaagacctgtggaactggtatctccacacgagttaccaatgacaaccctgagtgccgccttgtgaaagaaacccggatttgtgaggtgcggccttgtggacagccagtgtacagcagcctgaaaaagggcaagaaatgcagcaagaccaagaaatcccccgaaccagtcaggtttacttacgctggatgtttgagtgtgaagaaataccggcccaagtactgcggttcctgcgtggacggccgatgctgcacgccccagctgaccaggactgtgaagatgcggttccgctgcgaagatggggagacattttccaagaacgtcatgatgatccagtcctgcaaatgcaactacaactgcccgcatgccaatgaagcagcgtttcccttctacaggctgttcaatgacattcacaaatttagggactaaatgctacctgggtttccagggcacacctagacaaacaagggagaagagtgtcagaatcagaatcatggagaaaatgggcgggggtggtgtgggtgatgggactcattgtagaaaggaagccttgctcattcttgaggagcattaaggtatttcgaaactgccaagggtgctggtgcggatggacactaatgcagccacgattggagaatactttgcttcatagtattggagcacatgttactgcttcattttggagcttgtggagttgatgactttctgttttctgtttgtaaattatttgctaagcatattttctctaggcttttttccttttggggttctacagtcgtaaaagagataataagattagttggacagtttaaagcttttattcgtcctttgacaaaagtaaatgggagggcattccatcccttcctgaagggggacactccatgagtgtctgtgagaggcagctatctgcactctaaactgcaaacagaaatcaggtgttttaagactgaatgttttatttatcaaaatgtagcttttggggagggaggggaaatgtaatactggaataatttgtaaatgattttaattttatattcagtgaaaagattttatttatggaattaaccatttaataaagaaatatttacctaatatctgagtgtatgccattcggtatttttagaggtgctccaaagtcattaggaacaacctagctcacgtactcaattattcaaacaggacttattgggatacagcagtgaattaagctattaaaataagataatgattgcttttataccttcagtagagaaaagtctttgcatataaagtaatgtttaaaaaacatgtattgaacacgacattgtatgaagcacaataaagattctgaagctaaatttgtgatttaa

SEQ ID NO: 5197 - DNA, 551 bp, Homo sapiens
  source 1..551: mol_type = unassigned DNA; mol_type = unassigned DNA
gtgtcgggacctcttggtgggagcagccttccgaggtggccgggctggacgagatcagaggctccccgtcgatagggtcggagacccccgtccctcactgcggcagccgcggcgcccctcctgcgcaccgcgccgagtctcacgcgtatcttctcccccttccaggcgctctccacctgccccgctgcctgccactgccccctggaggcgcccaagtgcgcgccgggagtcgggctggtccgggacggctgcggctgctgtaaggtctgcgccaagcagctcaacgaggactgcagcaaaacgcagccctgcgaccacaccaaggggctggaatgcaacttcggcgccagctccaccgctctgaaggggatctgcagagctcagtcagagggcagaccctgtgaatataactccagaatctaccaaaacggggaaagtttccagcccaactgtaaacatcagtgcacatgtattgatggcgccgtgggctgcattcctctgtgtccccaagaactatctctccccaacttgggctgtcccaaccctcggct

SEQ ID NO: 5198 - DNA, 1336 bp, Homo sapiens
  source 1..1336: mol_type = unassigned DNA; mol_type = unassigned DNA
tactggcgggactacttgttgcaaggtttatggggaaaagtagccagagagcaatccagttatcagcctcagccccattccgctcaggtacagctcgggaagtaagcccccaaccctagttgggtctggaccaacaagacacgaggaggcagcagcccacagccgacccctcatgccacgcactgagcagggttccgcatggacgctggtcttgcctcccaggcgcctgaactagcggagttggggtatcgggtggagtctcggagaaccaatccaatctgagggggacgcctgtgggagtcctaagtatccagcgcagctgggaggcccacgttgggaagtcggagaccgaccccgcctcccgactgcgccgactgcaagagagcgcttccggcggcgcttggaggccgagcagttgggggcggggctcgtgctgtgacgcaagcctcgcctcgccccgcgccgcgcgcgttgccagggtgatcaggtgactcccggttcgcggcgctgggagcggccgtgacgtcaggcgcccggctgctcctcacttgctctgagacaggtgcggcaagtctactgcgggctggtccgggctcctcaggttcagacccgaccgttatccagtcggttcgtggagaggagaggtgcactttacaggtccccgatgaaccaagagaaccctccaccatatccaggccctggtccaacggccccatacccaccttatccaccacaaccaatgggtccaggacctatggggggaccctacccacctcctcaagggtacccctaccaaggatacccacagtacggctggcagggtggacctcaggagcctcctaaaaccacagtgtatgtggtagaagaccaaagaagagatgagctaggaccatccacctgcctcacagcctgctggacggctctctgttgctgctgtctctgggacatgctcacctgaccagaccagcccagccgtcctgtcctgccagctctgctgccacctctgacaggtgtgcctgcccccatctcttctgattgctgttaacaaatgactagctttgcacagacacctctaccttcagcactatgggattctagattaatgggggttgctactgtttaattcagtgacttgatctttttaatgtccaaaatccatttcttattgatctttaaagatgtgctaaatgacttttttggccaaaggcttagttgtgaaaaatataatttttaaattatacattcaaggtagtggccaaatgtaacacatcaatcatggaatgatttctctgctaacagccgcctgtatgtttcaataaatttgtccaaagctcaa

SEQ ID NO: 5199 - DNA, 665 bp, Homo sapiens
  source 1..665: mol_type = unassigned DNA; mol_type = unassigned DNA
cggccgtgacgtcaggcgcccggctgctcctcacttgctctgagacaggtgcggcaagtctactgcgggctggtccgggctcctcaggttcagacccgaccgttatccagtcggttcgtggagaggagaggtgcactttacaggtccccgatgaaccaagagaaccctccaccatatccaggccctggtccaacggccccatacccaccttatccaccacaaccaatgggtccaggacctatggggggaccctacccacctcctcaagggtacccctaccaaggatacccacagtacggctggcagggtggacctcaggagcctcctaaaaccacagtgtatgtggtagaagaccaaagaagagatgagctaggaccatccacctgcctcacagcctgctggacggctctctgttgctgctgtctctgggacatgctcacctgaccagaccagcccagccgtcctgtcctgccagctctgctgccacctctgacagggtggcgccaggctgccatagcagcaagtccgattttcctccatcagctggcccgcccagcccagccagcccgagaagccgcagctgacagctagctccctgccgactctgccttccctccgaagcagtggacgtgctgataaatgtttaccggtgctctctttaaaaa

SEQ ID NO: 5200 - DNA, 588 bp, Homo sapiens
  source 1..588: mol_type = unassigned DNA; mol_type = unassigned DNA
acttgctctgagacaggtgcggcaagtctactgcgggctggtccgggctcctcaggttcagacccgaccgttatccagtcggttcgtggagaggagaggtgcactttacaggtccccgatgaaccaagagaaccctccaccatatccaggccctggtccaacggccccatacccaccttatccaccacaaccaatgggtccaggacctatggggggaccctacccacctcctcaagggtacccctaccaaggatacccacagtacggctggcagggtggacctcaggagcctcctaaaaccacagtgtatgtggtagaagaccaaagaagagatgagctaggaccatccacctgcctcacagcctgctggacggctctctgttgctgctgtctctgggacatgctcacctgaccagaccagcccagccgtcctgtcctgccagctctgctgccacctctgacagcaggacctggaatgtctgcagcaggacgatccctctgtggagcccaggacatacggaatgctgagtagaaaccacactgaatgaatagcattgggacttagaacagctacttgcacagaacaag

SEQ ID NO: 5201 - DNA, 813 bp, Homo sapiens
  source 1..813: mol_type = unassigned DNA; mol_type = unassigned DNA
acttgctctgagacaggtgcggcaagtctactgcgggctggtccgggctcctcaggttcagacccgaccgttatccagtcggttcgtggagaggagagtgtatgtggtagaagaccaaagaagagatgagctaggaccatccacctgcctcacagcctgctggacggctctctgttgctgctgtctctgggacatgctcacctgaccagaccagcccagccgtcctgtcctgccagctctgctgccacctctgacagctgactgtgaattgcttccttggactgaagaataaacctatgaaacacaagaaagttgaaaattaagccacatgactattgaattcatcgaaatcaatagctacatactacaaatattaaactgagcaaattaaaaggacaaatgcatattaacataatacgtcaagctcaggaaaccaccagaagtttaaaccttcttggctgagaaggaataaaggcttaaaagtagattctgctttcttatttaatataggaatcaggcagggaacagtggtgtgggcctacagtcccagatactcaggaggctgaggtgggaggattgtttgagcccaggtgtctgagtctagtctgggcaacatagcaagaccctgtctcattaaaaaaaaaagcgggggggttgcgggagttgggcacagtggctcacacctgtaatcccagcactctgagaggccgaggcaggaggactgcttgagcctgggagttcaagactagcccaggcaacatgatgagacccatctctacaaaaaataaatttaaaatattagtcaggcacagt

SEQ ID NO: 5202 - DNA, 3101 bp, Homo sapiens
  source 1..3101: mol_type = unassigned DNA; mol_type = unassigned DNA
agtcgttgccacccgcggagatgaaatgtgagcctgggtggccaaggacgccggagtggccgccttccccgcgcctgagcgcagtggggcgagacaaagagacctgggcccccagcgcagcccgtctcgggccacgggcgccccagctccgcggagtcccgcagtcgctggcccgggacgcgcccggcccgggctcccttggaaggctccctaggcaatggccgggtctctgctccacccggctctcaggagcgctgctctctccatctgatcgccctccatcctccccattccctccggttccgggctctcccttcgctccaagcctcaggccaccggcttggatggacgctccgaggctacccgtgcgtccaggggtcttgcttccgaagttggtcctgctctttgtctacgcagatgattgccttgctcagtgtggcaaagattgcaaatcttactgctgtgatggaaccacgccctactgttgctcctactacgcttatattgggaatatcctctcgggcactgcaattgcgggcattgtttttggaatagtatttatcatgggggtcattgctgggattgccatatgcatctgcatgtgcatgaagaaccacagggcgacccgcgtgggcatcctcaggacgactcacatcaacaccgtctcctcctatcctggaccaccaccctacggtcacgaccacgagatggaatactgtgcagacttgcctcctccatactcccccaccccacagggtccagcacagcgttctccaccccctccttatcctggaaacgcaaggaaataatctatctcccagaacagaacatgtgccaatgggcgatcttgcctggaataaaatgcctctactcagaaacaggcaggaaagaattgctccaaggaatactttttggggtcagataatgtgtcaggtggaatatccctgctaggagatataggatttctactctgctcaaagctgaccccatctggagtattaatgtttggttctatggaaccacattttaagagatctgctgatccacctaagcacattcagggaagagtaatgtaattgacaaaatatctgataatcatgttgtttaagggctaggtgaagaaagtttcagtattgatcctggaaaaaaagaagatctaagtaggatgggagaatgatttggcccacacaaggaagcaactttattctatatagctttaaaagtcagaactagaattgttcattctttcattcatcaataaatgtattttgagtgcctaagagtttactatgtgcctagcactgtttgaggtcctgatggaagttacaggacgggtactctggttttagtacaagaaagagcaatgactagattgctttgtgaagctcttggtagagacacgctccagaagggataacaaaatcaaatagtagatgggttcattgggcctcagaagttctgctcgtattttaggtgggtgtgaagtgaatttctatatgtccaggagtgaatacaacagaaagagttggatcttatttatttaattagggagttaaaacaagaccaaaaagactcaacagccgcttgaagccaagaactcttcaatgccagctactgccacctaaaaatcatctggctttatagtggatcagaataaaggttattctaactgtggggagaaaaaaaaaattgtatcaagttccacaggtagcagacacttcacttccaagtaaaagatgagaaatcaattattcccacaggattttaggtcagggagcaaaaatctcagaacttgaccatgaagatacacaacagactcgcaaaaataaagtgggaaatgaagttcagattcccttctgtagatttccttaaaactattatttttttcttcttcgtaaaattttgataatctgttctcttaaaaaagttaatgacacaattaagatactgacatcaaattgttgccttttaccaaaatgcaaattttatgaagtgcctacctttatatgtataaagcatttaataaataattctaatgtgccatattttgctgtgagtgaccttaacatttatatttttatatgaattgtttcatgtatttataaaaattgtatattgaacattggaaatagatgattagatttttgtgtcattttacaattaaatctaaaatgcttaatccaatatcatcatcaaaattcagtgaaatcccaaaacagtgccaagaattttgctgaatgaaacaatcaaacaaagcattttaaggtgtaagttatagtacctgtacttgcagataagaagcttactatatcattattataagtagcatatattactttcaaatacctatattagaaagatattgatctgactgaaatataacctacctgccagtaaggtccaaaggctgaatttgttttgaatgagttccttgatctttaagcactgatgattttcttatatatgaggatgcaaagcattcaagagtttcagcctgttctggtgaggggctccctgacttacataaagttttcagtgcaattttaatagtacatatgctttaatttatttttcttctgcgtgtggtcagacccaattacactgtggctaagactctcaaagtgccagggtttctgtgatgattctgagaatgctgaatacaaatataccttatattctttaaggaaaacggaaaggaaagatcagcagaaatagggttttctcatcttcaccatcaataaacatttattgcgtacctcctatattctgcaaattttccccaaatagaagccagttcagtccacaccatctcttctttgagttgtttatggcctcccttaaggcattttacaaacccataagcctacaatagatgagtatttttactatttgtattaagtgtcataatagcatcaatgtgcacattaccagtatagactgttggagttcactgattgttttcatagatgatgcttcttggggaaaaatagtataggatgtgaaagttttgaattacggttatttaaaaactaacatttgctatggccaaagtgtttacaataagcaataaagtgaaagaacctattataacacagattata

SEQ ID NO: 5203 - DNA, 735 bp, Homo sapiens
  source 1..735: mol_type = unassigned DNA; mol_type = unassigned DNA
cccccagcgcagcccgtctcgggccacgggcgccccagctccgcggagtcccgcagtcgctggcccgggacgcgcccggcccgggctcccttggaaggctccctaggcaatggccgggtctctgctccacccggctctcaggagcgctgctctctccatctgatcgccctccatcctccccattccctccggttccgggctctcccttcgctccaagcctcaggccaccggcttggatggacgctccgaggctacccgtgcgtccaggggtcttgcttccgaagttggtcctgctctttgtctacgcagatgattgccttgctcagtgtggcaaagattgcaaatcttactgctgtgatggaaccacgccctactgttgctcctactacgcttatattgggaatatcctctcgggcactgcaattgcgggcattgtttttggaatagtatttatcatgggggtcattgctgggattgccatatgcatctgcatgtgcatgaagaaccacagggcgacccgcgtgggcatcctcaggacgactcacatcaacaccgtctcctcctatcctgaatatgaactccatgaggcagagatcttggtctattttgttcaacactctattccaagcatgtaagaccaggcctggtacataatgggcactcagctgaatgaatgatgaacacaactcatgaaaagacctgaattaatcatatatcaataccctagggaattga

SEQ ID NO: 5204 - DNA, 5433 bp, Homo sapiens
  source 1..5433: mol_type = unassigned DNA; mol_type = unassigned DNA
gcggccgcctctgctgcggccggaaacaatagtggaggaacccgagccgcacggaacggcggtggtggcccgcggagccggacggggcactatgaacgaagaggagcagtttgtaaacattgatttgaatgatgacaacatttgcagtgtttgtaaactgggaacagacaaagaaacactctccttctgccacatttgttttgagctaaatattgagggggtaccaaagtctgatctcttgcacaccaaatcattaaggggccataaagactgctttgaaaaataccatttaattgcaaaccagggttgtcctcgatctaagctttcaaaaagtacttatgaagaagttaaaaccattttgagtaagaagataaactggattgtgcagtatgcacaaaataaggatctggattcagattctgaatgttctaaaaacccccagcatcatctgtttaatttcaggcataagccagaagaaaaattactcccacagtttgactcccaagtaccaaaatattctgcaaaatggatagatggaagtgcaggtggcatctctaactgtacacaaagaattttggagcagagggaaaatacagactttggactttctatgttacaagattcaggtgccactttatgtcgtaacagtgtattgtggcctcatagtcacaaccaggcacagaaaaaagaagagacaatctctagtccagaggctaatgtccagacccagcatccacattacagcagagaggaattgaattcgatgactcttggtgaggtagagcaactgaatgcaaagctcctacagcaaatccaggaagtttttgaagagttaactcaccaagtgcaagaaaaagattctttggcctcacagctccatgtccgccacgttgccatcgaacagcttctgaagaactgttctaagttaccatgtctgcaagtagggcgaacaggaatgaagtcgcacctacccataaacaactgacctaaacagacttacttcgtatgccctgccctttattggtctcccagacatgcaaactttgaagaagtttgaagaaagttgtggtccgtttttttatggtcattaaatttgccaaacataaggcagtatttaacatctttgtcaaataaagcagatcattatactctagtcttctagggctaatcattttggctcatttggggactcttttttcccagaattactaaacaaattttatcacatgtgactacttaaatatactgttacagtgtcattttattaaacattttaattcacctgtcaaaacaacagattaactccttagtgtaaactactagagataatttttaagagggaaatggaattcatatcacctcttatttattatgagcaatattttaatataaaaattttatatgtgaaaatgctattttaggtactttgccattctctttataaatgtgtatttgagtggttctgtatatttatttacattatcatgtgtgaatatgttcacccatatttcaggtcactgcattttattctcttaatacaatgttttcacaacggttaccttgctttccaaagataaatatattttggattagaaatctgagttgttttaatttctaatacctcttgtaaaagaagaattaataactttttaaagcagtattcaggtaaatacaatacattattttgttttctaacaaaagcagttcttagttcaggaagaaaagactaatctggcttctatgtcaatttgtctccatagaaatgaaagcctcctcttgcttctttcattattagcttcacaccagtgactgtgatgcattagaatttggacagagtaagtcaagcctcacttccaattcaaatataatgtctatcttcaaattgagtgtgctgtgaaattgttctgtctttgaaaaaaaaaagtaagattattttgtgtgccactttgggtaaagtttcaagaatacttaaactgtccaaattgtattatcaccatcattgaacttagtgctcaaagaaagcattgtgaggtatttttctaaactttagactctatagagaaatataggattgttctacagaagaaaagcaaaactcctaattaaaaaaaaataaacctatgtattaagagaatgttctcgtaagttgcctatgatgcttccaaagagtttttatctaacagattgtgccaaacagctagataaattttaataatgtattacagtaaaggctataaccaatgcagaattaaaatgggctctaaattctgtttttaactcatgtttagaatgtacttatgaggtagatccttgcttgaaagtatctgctgaaaagcccagtaacgtggcagcttcatgcataaagatataaatgacatttgccttaaatttggcagcctaccctggcttgggtcagattttgttgttgaacacaagaaagtatttaagcaaagaaacacttcagtttaattgaaaacaactttttgtaatgctgacgtgttaaattggcctgagggtattaattgatatctgttgattttgtttttctttgaagtataacattactttttggagggaatttttgaaagatgctttcgatttctctcaattctttaagtcatgcaaaatgaatttaaaatccagggagtatggatgcattgccttagttttgatgagctttaaattaaatgtgtgcaatatcaaaatattcaaacttacaagctgggtaaatacatttcctgattaatatcttagtgcttaattgttcccacattttcaaatttgactttactcttttttggcgtaattcagtaagattgttaccagccagtgtgtttgcacacatttgggtttgtgtttagatgagttagggacagtcataaaagttggggatatgttgcatttgatatcaatagtagcatatttccagaatatgagccataagttgcagtcctgaatacaacagtgttatccaaagaaaggagttttctgacaaatatacatagctttgctaatgagtacggaacaagtggatgaacgtgtgcatgtgctaaggtcttaagtgggactctgatttattccatttagatatttctacttaagctctaaaaaggagaggtgctcttaaaaaaaactttgtggtgctggtactcacactactttatttggatgagttcctagtaaaaaaaactttttgttgaagtattttgcacagcagtttatccaaatgtttggtaaacttataatttagtcctatgttagttttcttaatcaaatatgcaattactgtgtatgcaaatataagtatcaggtacagagttgagttctaacaagagaacatgaaatatcacaaatattgttttccacacttggctattctctacagttgttagtaatttttgagaatgttttgaagcatatctcatgtactactgtttaaaaagtggcaaaacagactgccagtcatccattactaaattttcagagcttatatgattaaggggagtgagataagacaaatctttttcacgttcagttttataatttgacacgttaaattgagttttaaaaattagaaaagtgtttttgaccacacaggttgttctctttaaagttcagccttataatgaagctaaaaatcaattatgttttactttgagattatcatcttatcctttgatcctcatattaatatctaaattagtcttttttaaaaggcatgcacttgagactccagtaatagatgattcaggcagcagaatagtgttttgttgtgtcgttgactatgcacaatggtggagcaaagacacattcttagtttttcaaaacacatgttcattttaccacaaagtgcccatttttatatacatttaaggattattttttcaatgtcaagttcatgttagtgatttcagaaatatagtcaaaatatatagtcaaatatatcttgacaggcatcttgagatttggtttttcattttactatatttatgactgaaaatggttttgtgttttctttatgttgtttatatattttttaccttagtgtttacactggtaaggcttgttagtccatttttgtagtttttttaaagtaagcttttagatctatttgtgttttaatgtttcccagtttgggttttgttttgttttggaagaatctgctttcattattaaattataaaatgtaaatgctctaaagtaggaatttttaaagagtaaattatttgtgtagcttattaggaggttcaggttagtgaccataaagtgggttacttgtacatgaaaatttgaaatggtaccatgtaaaattcttctattgtcaactttttctgatgtatgccagttcatttactgacaaatgttgttactaagtgcttattaagaagtgtaatacgctataaaaaagttaatactttttgttcagatgtaaggcaaagataattgatgccgtttcagtgtatgattgtatttttaacttttacgttggtgggagtaactatttgaggaaatttgtggtgagaattagtaagagataaaacccccaacagtttattcttaccaagtaaagttttgtggtcatggggcagggaagagtttatttaccagaatactagagccctcacacaaaataaaggtaacttggaggagggctataatgcttgcatctcagtattttcatttcacttcatcctttcataattgccttgattatggtgcagtctaacctattaagcaacttctggctatggtaacattgatatgaaccatattatatcaagtctccaaaacatctagtttgttaacatacactttccctgttctttttagtttgagtccacattactaatacattttaataatatttaattatttcacaattttaagtttaccaaagtaaacaaaaattcatgaagatgagtattgccctctcccaaaaaaggtttaaagattagttgaacttccctcaactacacctaaagcaaaggggaattttagtaagtgtgtgtaccttgtttctttcagacgcatctagaatgtttttctttcaccgtacctccaaaagaggcaatttagaaagtattaagtagtgacttttgttcagttccattttgtgtgtgtgtgtgtgtgtgtgtgtgtgtgtgtgaaccttgctttaaaacagtagcgtatactatggtcattgaacttaatctctctggtgttagaaatttactttacaaaattgtgttaagacttttggaaaaagaaaatgaaactgctgtggtaaaaaccaagtttgtttcaaaaaagtaggcaattatttggctgttatattttctttgaaaactgcaataatttatatatttgtattgctctgcttgggaactgtatatatgcttgtctactatttttaattttacaacaataaaataagtattttgttatctgcta

SEQ ID NO: 5205 - DNA, 1593 bp, Homo sapiens
  source 1..1593: mol_type = unassigned DNA; mol_type = unassigned DNA
gcggccgcctctgctgcggccggaaacaatagtggaggaacccgagccgcacggaacggcggtggtggcccgcggagccggacggggcactatgaacgaagaggagcagtttgtaaacattgatttgaatgatgacaacatttgcagtgtttgtaaactgggaacagacaaagaaacactctccttctgccacatttgttttgagctaaatattgagggggtaccaaagtctgatctcttgcacaccaaatcattaaggggccataaagactgctttgaaaaataccatttaattgcaaaccagggttgtcctcgatctaagctttcaaaaagtacttatgaagaagttaaaaccattttgagtaagaagataaactggattgtgcagtatgcacaaaataaggatctggattcagattctgaatgttctaaaaacccccagcatcatctgtttaatttcaggcataagccagaagaaaaattactcccacagtttgactcccaagtaccaaaatattctgcaaaatggatagatggaagtgcaggtggcatctctaactgtacacaaagaattttggagcagagggaaaatacagactttggactttctatgttacaagattcaggtgccactttatgtcgtaacagtgtattgtggcctcatagtcacaaccaggcacagaaaaaagaagagacaatctctagtccagaggctaatgtccagacccagcatccacattacagcagagaggaattgaattcgatgactcttggtgaggtagagcaactgaatgcaaagctcctacagcaaatccaggtttttgaagagttaactcaccaagtgcaagaaaaagattctttggcctcacagctccatgtccgccacgttgccatcgaacagcttctgaagaactgttctaagttaccatgtctgcaagtagggcgaacaggaatgaagtcgcacctacccataaacaactgacctaaacagacttacttcgtatgccctgccctttattggtctcccagacatgcaaactttgaagaagtttgaagaaagttgtggtccgtttttttatggtcattaaatttgccaaacataaggcagtatttaacatctttgtcaaataaagcagatcattatactctagtcttctagggctaatcattttggctcatttggggactcttttttcccagaattactaaacaaattttatcacatgtgactacttaaatatactgttacagtgtcattttattaaacattttaattcacctgtcaaaacaacagattaactccttagtgtaaactactagagataatttttaagagggaaatggaattcatatcacctcttatttattatgagcaatattttaatataaaaattttatatgtgaaaatgctattttaggtactttgccattctctttataaatgtgtatttgagtggttctgtatatttatttacattatcatgtgtgaatatgttcacccatatttcaggtcactgcattttattctcttaatacaatgttttcacaacggttaccttgctttccaaagataaatatattttggattagaaa

SEQ ID NO: 5206 - DNA, 1090 bp, Homo sapiens
  source 1..1090: mol_type = unassigned DNA; mol_type = unassigned DNA
gcggccgcctctgctgcggccggaaacaatagtggaggaacccgagccgcacggaacggcggtggtggcccgcggagccggacggggcactatgaacgaagaggagcagtttgtaaacattgatttgaatgatgacaacatttgcagtgtttgtaaactgggaacagacaaagaaacactctccttctgccacatttgttttgagctaaatattgagggggtaccaaagtctgatctcttgcacaccaaatcattaaggggccataaagactgctttgaaaaataccatttaattgcaaaccagggttgtcctcgatctaagctttcaaaaagtacttatgaagaagttaaaaccattttgagtaagaagataaactggattgtgcagtatgcacaaaataaggatctggattcagattctgaatgttctaaaaacccccagcatcatctgtttaatttcaggcataagccagaagaaaaattactcccacagtttgactcccaagtaccaaaatattctgcaaaatggatagatggaagtgcaggtggcatctctaactgtacacaaagaattttggagcagagggaaaatacagactttggactttctatgttacaagattcaggtgccactttatgtcgtaacagtgtattgtggcctcatagtcacaaccaggcacagaaaaaagaagagacaatctctagtccagaggctaatgtccagacccagcatccacattacagcagagaggaataagtttttgaagagttaactcaccaagtgcaagaaaaagattctttggcctcacagctccatgtccgccacgttgccatcgaacagcttctgaagaactgttctaagttaccatgtctgcaagtagggcgaacaggaatgaagtcgcacctacccataaacaactgacctaaacagacttacttcgtatgccctgccctttattggtctcccagacatgcaaactttgaagaagtttgaagaaagttgtggtccgtttttttatggtcattaaatttgccaaacataaggcagtatttaacatctttgtcaaataaagcagatcattatactcta

SEQ ID NO: 5207 - DNA, 896 bp, Homo sapiens
  source 1..896: mol_type = unassigned DNA; mol_type = unassigned DNA
cccggagcgatgggacgaggctctcccgcccgccgggctccaggatgccgcggctctcccagctccggcttgggcccctccggcggtgcccggccggtaccgtgaagccgccgctcggccttcggtgtagttgccccggacacggcgggacgccctccccgggggcactatgaacgaagaggagcagtttgtaaacattgatttgaatgatgacaacatttgcagtgtttgtaaactgggaacagacaaagaaacactctccttctgccacatttgttttgagctaaatattgagggggtaccaaagtctgatctcttgcacaccaaatcattaaggggccataaagactgctttgaaaaataccatttaattgcaaaccagggttgtcctcgatctaagctttcaaaaagtacttatgaagaagttaaaaccattttgagtaagaagataaactggattgtgcagtatgcacaaaataaggatctggattcagattctgaatgttctaaaaacccccagcatcatctgtttaatttcaggcataagccagaagaaaaattactcccacagtttgactcccaagtaccaaaatattctgcaaaatggatagatggaagtgcaggtggcatctctaactgtacacaaagaattttggagcagagggaaaatacagactttggactttctatgttacaagattcaggtgccactttatgtcgtaacagtgtattgtggcctcatagtcacaaccaggcacagaaaaaagaagagacaatctctagtccagaggctaatgtccagacccagcatccacattacagcagagaggaattgaattcgatgactcttggtgaggtagagcaactgaatgcaaagctcctacagcaaatccagg

SEQ ID NO: 5208 - DNA, 744 bp, Homo sapiens
  source 1..744: mol_type = unassigned DNA; mol_type = unassigned DNA
acccgagccgcacggaacggcggtggtggcccgcggagccggacggggcactatgaacgaagaggagcagtttgtaaacattgatttgaatgatgacaacatttgcagtgtttgtaaactgggaacagacaaagaaacactctccttctgccacatttgttttgagctaaatattgagggctgaccttgagcaattctcccacctcagtctcccaggaagctgagattacagaaagaagacaaagatagatttatctctactttagaggaagtgaagtgtcaccctctagttggaagaaactagtccaccttatgctcagtaaatatttagggaatttatacttttaggggtaccaaagtctgatctcttgcacaccaaatcattaaggggccataaagactgctttgaaaaataccatttaattgcaaaccagggttgtcctcgatctaagctttcaaaaagtacttatgaagaagttaaaaccattttgagtaagaagataaactggattgtgcagtatgcacaaaataaggatctggattcagattctgaatgttctaaaaacccccagcatcatctgtttaatttcaggcataagccagaagaaaaattactcccacagtttgactcccaagtaccaaaatattctgcaaaatggatagatggaagtgcaggtggcatctctaactgtacacaaagaattttggagcagagggaaaatacagactttggactttctatgt

SEQ ID NO: 5209 - DNA, 665 bp, Homo sapiens
  source 1..665: mol_type = unassigned DNA; mol_type = unassigned DNA
aacaatagtggaggaacccgagccgcacggaacggcggtggtggcccgcggagccggacggggcactatgaacgaagaggagcagtttgtaaacattgatttgaatgatgacaacatttgcagtgtttgtaaactgggaacagacaaagaaacactctccttctgccacatttgttttgagctaaatattgagggtaaggacacagtatagttttgatcttatggaatgaatttaacacagctgctttgtactgattgtaaggtaaaactaaaatgtcttcaatgattggaaattgtgctaagtatgaatagtgtagagatttgttaaagataaggtttctggaaatgaaggtgcagttaacagagttacgaatttaagagaaatcttttttttttaaagacccctgcaacaaccccatttttcctaatacagaaataagtatgagtgttgactgggaaacgtgttttctggtttgagagcttattgaattgtcagattttaacagacctgtgtgttttttatattaagaagtaacataacaatttttttattctttcgagcctattatgcaagtatttgagtgagatgagcccgaactcttttctcaccagtatgatcttattatctggaaaaatactttaaaatttttagattaacctctttt

SEQ ID NO: 5210 - DNA, 2507 bp, Homo sapiens
  source 1..2507: mol_type = unassigned DNA; mol_type = unassigned DNA
aaccttccaaggattctaccgagtccctggtccaaccggggcctaaagggggacaagaagcagccgatgtgtcagcggacacagtatcatctaaggtacagccaacagcagcagctgccgtcacattgtttctgaggaaatcaagtccacctgcactgtctgcagccctggttgctaagggcaccagcagcagccctttggccgtggcctcaggaccagctaagagcagttcgatgactactcttgctaaaaatgtcacaaacaaggccgcatctggcccaaagaggacaccaggggcagtccatacagccttcccattcacaccaacctacatgtatgcaagaacaggacataccacgagcacacatacagccatgcaaggaaacatggacactgcctctggcctgttgtctacaacttacctccccaggaaaccacaagccatgcacaccggcctcccaaaccccaccaacctggagatgcccagagcatccacgccacgcccactgacagtcacggccgcgctgacatccattacagcctcagtgaaggccacccggttgccaccattgcgagcagaaaacacagatgctgtccttcctgctgcatcggctgcagtggtcacgactggcaaaatggcatccaacctggagtgtcagatgtccagtaagctcctggtgaagacagttctctttctcacccaaaggagagtgcagatcagtgaatccttgaagttcagtatcgccaaagggctcacacaggcattgcggaaggctttccaccagaacgatgtctcagctcacgtggacattctggaatattctcataatgtcacagttggttattatgctaccaaagggaagttggtgtatttgcctgctgtggtgatcgaaatgctgggtgtgtatggagtcagcaacgtcactgcagacctgaagcaacacaccccacacttacagtctgtggcagtacttgcctccccatggaatccccagcctgcaggctacttccagctaaaaacagtgctgcagtttgtgagccaagcggacaacatacagtcctgcaagtttgctcagacaatggaacagaggctgcagaaggcattccaggatgccgagaggaaagtcctgaataccaaaagcaacttgacaattcagattgtgagcacgtccaatgcctcccaggcagtcaccttggtgtacgtcgtgggcaatcagagcacattcctcaacggcaccgtcgccagcagcctcctcagccagctctcggctgagctggtgggattctacctcacctatccgccgctaaccattgctgaaccactggaatatcccaaccttgacatatcagaaacaaccagagactattgggtaattacagtgctgcagggtgtggacaattcgctggtgggcctgcacaaccagagctttgcccgggtcatggagcagcgcctggcccagctattcatgatgtcccagcaacaaggccggcggtttaaacgggccaccaccctgggaagctacactgtgcagatggtgaagatgcagcgtgtcccaggcccgaaggacccagcggagctgacttactataccctgtacaacgggaagcctttgttggggaccgcagctgccaagatcctgagcaccattgattcccaaaggatggccttgacccttcatcacgttgtccttctgcaagctgaccccgtggtgaagaacccgcccaataacctgtggatcatcgctgcagtgctggcgcccattgccgtggtcacggtcatcatcatcatcatcactgccgtgctctgcaggaagaacaagaacgacttcaagcctgacaccatgataaacctgccgcagagagcaaagcctgtgcaaggctttgattatgccaagcaacacctgggccagcaaggggcagatgaggaggtcatccctgtgactcaggagacagtggttctcccactgcccattagagatgctcctcaggaaagagacgtcgctcaggatggaagcaccatcaagaccgccaaatccactgaaaccaggaagagcaggtcgcccagtgagaatggctctgtcatcagcaacgaatcagggaagcccagctcagggagacgctcaccccagaatgtaatggcacagcagaaagtgacaaaggaggaggcaaggaagagaaatgtgccagcgagtgacgaagaggagggagcggttctatttgacaactccagcaaggtggccgctgaaccctttgacacatcttctgggtctgtgcagctcattgccataaaacccacagccctccccatggtgccccccacctcggacaggagccaggagtcatcggcagtcctcaacggcgaggtgaacaaagccctgaagcagaagtcagacatcgagcactatcggaacaagctgcgcctcaaagccaagaggaagggatattacgacttccctgcagtggagacgagcaagggtctgaccgaaagaaagaagatgtatgaaaaa

SEQ ID NO: 5211 - DNA, 11678 bp, Homo sapiens
  source 1..11678: mol_type = unassigned DNA; mol_type = unassigned DNA
gacattcccccactcctccctctacctccatcctcttcattggctcctgactcacctcattccatcatctctgagccagcagagcaatcccccaaagtgctgttagttccccaaacagctccagccgacccctctttaggtcagaacatagctaatcccttaatcccattttctgatgaaatggaccacactgcatcccaaaatgcccaggatctcataggcatccctcatctaggtgtttctggatcctcaacaaaatggcattccgagctgtccccaacagagggtccccattcagcaggttcatccacacctgggtttttgagccccatggcagaactgtcccatccgtctccccctcccccagcacttggaagtcttcttcagcttccagatggaagcccctcatggtcaatgttggaagtggcttcaggtcctgcatccacccagcagatcaaagctggggtgcctggaagagtgcacaatggggtgtctttgccaacttttaagaatacagaaacagcgacccatgaggctgagcctccacttttccagactgcagaatcaggggccatagaaatgaccagcagaaagctagcctctgccactgcaaatgactctgctaacccgctgcatttgtcagcagctccagagaattccagagggcccgccctttcggcagaacacacctcttctttggtgccttctctgcatatcaccacactgggtcaagagcaagccatcctttctggggcggttcccgcatcaccatcaactgggacagccgactttccctccatacttactttcctccagcccacagagaatcatgcctccccatctcctgtgccagaaatgcccactcttccagcagagggcagtgatgggtcccctcctgcaactagagacttgctcctctcaagcaaagttcctaatcttctttccacatcttggacatttccccggtggaaaaaggacagtgtgacagccattttagggaagaatgaagaggcaaatgtgacgattcctctccaggcctttccaaggaaagaggttttgagtcttcacactgtaaatggatttgtctctgatttcagcaccggtagtgtctcatctcccatcattacagcaccaaggacgaatccccttccttcaggaccacctctaccttccatactctccatacaagccacccagactgttttcccatctcttggcttttccagcaccaagccagaggcttatgcagctgctgtggaccattctgggttgccagcttcagcttccaaacaggtgagagcatcgccctcctccatggatgtatatgattccttaacaataggagacatgaaaaagccagcaaccacagatgttttctggagttctctttcagcagaaactggatctctttccacagaatcaataatatctggcttgcagcagcaaacaaattatgatttaaatggacacacaattagcaccacaagttgggaaactcatttagctccaacagctcctcccaatggtttaacttcagctgccgatgccataaaatctcaggatttcaaagatactgctgggcattcagtgactgcagaagggtttagtattcaggatctagtcctcggtacaagcattgagcagcctgtgcaacagtcagacatgaccatggttggaagccatatagacctctggcccacaagcaataacaaccattccagagacttccaaacagctgaagttgcatattactcacccacaactcgacattccgtgtctcatcctcagctacagttgcccaaccagccagcacatcctcttttgctaacctcaccaggaccaacttctacaggtagcttgcaggaaatgctttcagatggaacagatacaggttctgaaatttccagtgacatcaattcatcacctgagagaaatgcttccacaccattccagaacatcttgggatatcactctgctgctgaatcttctatatcgaccagtgtctttcccaggacctcctccagagtgctgcgggcttctcagcaccccaagaaatggacagcggacacagtatcatctaaggtacagccaacagcagcagctgccgtcacattgtttctgaggaaatcaagtccacctgcactgtctgcagccctggttgctaagggcaccagcagcagccctttggccgtggcctcaggaccagctaagagcagttcgatgactactcttgctaaaaatgtcacaaacaaggccgcatctggcccaaagaggacaccaggggcagtccatacagccttcccattcacaccaacctacatgtatgcaagaacaggacataccacgagcacacatacagccatgcaaggaaacatggacactgcctctggcctgttgtctacaacttacctccccaggaaaccacaagccatgcacaccggcctcccaaaccccaccaacctggagatgcccagagcatccacgccacgcccactgacagtcacggccgcgctgacatccattacagcctcagtgaaggccacccggttgccaccattgcgagcagaaaacacagatgctgtccttcctgctgcatcggctgcagtggtcacgactggcaaaatggcatccaacctggagtgtcagatgtccagtaagctcctggtgaagacagttctctttctcacccaaaggagagtgcagatcagtgaatccttgaagttcagtatcgccaaagggctcacacaggcattgcggaaggctttccaccagaacgatgtctcagctcacgtggacattctggaatattctcataatgtcacagttggttattatgctaccaaagggaagttggtgtatttgcctgctgtggtgatcgaaatgctgggtgtgtatggagtcagcaacgtcactgcagacctgaagcaacacaccccacacttacagtctgtggcagtacttgcctccccatggaatccccagcctgcaggctacttccagctaaaaacagtgctgcagtttgtgagccaagcggacaacatacagtcctgcaagtttgctcagacaatggaacagaggctgcagaaggcattccaggatgccgagaggaaagtcctgaataccaaaagcaacttgacaattcagattgtgagcacgtccaatgcctcccaggcagtcaccttggtgtacgtcgtgggcaatcagagcacattcctcaacggcaccgtcgccagcagcctcctcagccagctctcggctgagctggtgggattctacctcacctatccgccgctaaccattgctgaaccactggaatatcccaaccttgacatatcagaaacaaccagagactattgggtaattacagtgctgcagggtgtggacaattcgctggtgggcctgcacaaccagagctttgcccgggtcatggagcagcgcctggcccagctattcatgatgtcccagcaacaaggccggcggtttaaacgggccaccaccctgggaagctacactgtgcagatggtgaagatgcagcgtgtcccaggcccgaaggacccagcggagctgacttactataccctgtacaacgggaagcctttgttggggaccgcagctgccaagatcctgagcaccattgattcccaaaggatggccttgacccttcatcacgttgtccttctgcaagctgaccccgtggtgaagaacccgcccaataacctgtggatcatcgctgcagtgctggcgcccattgccgtggtcacggtcatcatcatcatcatcactgccgtgctctgcaggaagaacaagaacgacttcaagcctgacaccatgataaacctgccgcagagagcaaagcctgtgcaaggctttgattatgccaagcaacacctgggccagcaaggggcagatgaggaggtcatccctgtgactcaggagacagtggttctcccactgcccattagagatgctcctcaggaaagagacgtcgctcaggatggaagcaccatcaagaccgccaaatccactgaaaccaggaagagcaggtcgcccagtgagaatggctctgtcatcagcaacgaatcagggaagcccagctcagggagacgctcaccccagaatgtaatggcacagcagaaagtgacaaaggaggaggcaaggaagagaaatgtgccagcgagtgacgaagaggagggagcggttctatttgacaactccagcaaggtggccgctgaaccctttgacacatcttctgggtctgtgcagctcattgccataaaacccacagccctccccatggtgccccccacctcggacaggagccaggagtcatcggcagtcctcaacggcgaggtgaacaaagccctgaagcagaagtcagacatcgagcactatcggaacaagctgcgcctcaaagccaagaggaagggatattacgacttccctgcagtggagacgagcaagggtctgaccgaaagaaagaagatgtatgaaaaagccccgaaggaaatggagcatgttttggatccagattcagaactctgtgctccattcaccgagtctaaaaacaggcaacagatgaagaactctgtctacagaagccggcagtctctgaacagcccgagtccaggggaaaccgagatggaccttctggtgactcgggagcgaccccggcgtggaatccgcaacagcggatacgatactgagcctgaaatcatagaggaaaccaacattgacagagttcctgagccccggggctattccaggtctcgacaggtgaaaggccactcggagacctccacactgagctcccagccatccatcgacgaggtcaggcagcagatgcacatgctgctggaggaggccttcagcctggcatccgcgggccacgcaggccagagccggcaccaagaggcctacggctcagcccagcacctgccctattcggaggtggtgaccagcgctccggggaccatgacgcggcccagggccggggtgcagtgggtgccgacctaccgcccagaaatgtatcagtacagtctgccccggccggcttacaggttttcccagcttcctgagatggtcatgggctcaccgcctccacccgtacctccccggactggtcctgtggctgtcgcttctctcaggcgatccacctcagacatcggcagcaagaccagaatggccgagtctacagggcccgagccggcccagctgcacgacagcgcctccttcacgcagatgtccagaggccctgtgtccgtgacgcagttggatcagtcggctttaaattactcaggtaatacggtgccagcagtgttcgccatcccagctgccaacagacctggcttcaccggctacttcatcccaacgcctccctcatcctataggaaccaggcctggatgtcctatgcaggagagaatgagctcccgagccagtgggcagattcggtgcccctcccagggtacatcgaggcctacccccgatcacggtacccccagagctctccctccaggcttcctcgtcagtacagccagccagccaacctgcaccccagcctggagcaggccccggcgccctccacagcggcctcgcagcagagcctggcagaaaacgacccgtctgacgctcccctgaccaacatctccactgcggcccttgtgaaggccatccgggaggaggtggccaagctggccaaaaaacagacagacatgtttgagttccaggtctaacgccttagccccgtgggactctggacttccaaactctgaggactcagcctttgggtttcccatgcctacgtgttaggacttgagacatagcaatgggtgagtctttctcaccctccatttctgaaaaggtgaactatggggcttctgggaacaggaaactcttgaacgactagattcttggctcatccaactgattgtgggtcaagtccctggcttggggccttatgtttgatactctctcatgtcaaatgtttgaactttgggcatgtgccctatggaagcttagtcacaagaggcactagctaatctacagattcctatccaatgccacattttaataaatcaccggaagcgggagaatgtagctcttatcttcggtgacctctgcatgttaactctgtttctgtgttaaaggcaatgcaggagtgtggattaagcaccagactgtattctcattcaaccatgaccgtgcgcattaaaatcagtttgtaagggagacactgactccagccaagaaacctgagccccttttttttaggttcatattcaaagtcaaatgaactggatgaaagtcagtaccaatggctgtgcctataaatagacctgattctttgtttccctcgtcaattaaacaaaggccaagaaagagagaagatgagagggaatggtggatttgcgttgacagattttttaaaaggtgttgccattttggaaataaaagtcccctacaagttaggatctaactgaaagagaatcggtgctaagagcttttaggatcctacaaaagaaacacagttatttgtgaaggtttttctttgccttgttttgaaggtggcctgagaatggagcttctctttttcttgggataatagatacatcaacttttacaagaaaatctctgtctcttcaacaatgatgtccagtgtgtgctgctgagtggtacaaaaggaaatagtacttgattcctgttagaaacaggagtggtagaaccacagtcttcccaggccgcagcctctgtttatagaagcttctgaatgtagaaaagctgttgaatttcatttaaatgtaaataaccttttaaaaagcgtatggagttagccagttccccctagttaatggacataggaagacatttgctgaaatggtagggtggccactttgtgaccatgatgttgcaagttgccctccctggcatggtgagttggcttccagagctgtgggtagaggacatcgcctcacggcactgaggcaccagccgctgcctacccatcaatgcaagcaaaacagctactgactttgtgtagcagggagattggggactctggttccctcgccaagtgtggcagcctgtgcagtgttgggggcttacttggtatctgttggagaatgaggtcctgtcctgctttcacccatgacccatctagcttcagctgtatccattttcttctgagcccatcttccattgtcctcaacgagtttctttggtctttactgaaagaagatagtagaaatttaaaagttgagagaagactagaaatggaactgattagaaggggaggttcaaactgtcaatgcacagacttttcaaagaagttgtttatattttccaatggcaaactgccctttctggaatgttcagagatgatgtgtcatggaaccttcaaacaagtctcttgttcggatgataataggtagtgtccttttagtatgctggttgatctttcatagtgttagtgttttgttacttaaaaaggaaatcagctataaataaaatgtatttttgtaattcccgtgtgtatatatggtatatttctatcaatggccagttgttgtagtccaaaacctaaatcagtttgcaaaacactgtggacagtgcgagattttattgacaggttaacacaatgcctacgtctatccacataggcattcaatgcacttgaatgaacaaagagccaaagaaactcagcctgttcatgcaaatggtatgagtctgataaaatcagctacattgtcctgctttatcaataataatatttcattagtgcaatgatatcaaccagtactttgtctacttggtaaatgcctggaaatactgtatgtgaaaatgatgtttcaagatcttactgtaattgaagtatacgtaaatgtttcagaagacagtgtctgaaatttggctgtttcaatgacttacagagactgagtctacagtttgcagagctatggctccagagtgctaagagggtggagtcacaaatcactgtggtctttacagagccccaggaaatactgagtgagtcaactgagacgactaaaaagatagcatgctaaatcagatactgtcttaaactagacaccatgggttcaagaatagtattaatagatgagaggaaaaccttaagttggaaagaaatcagtctgttcatgttatcccactcatggggagacagagccactctggtcagattttctgtgagtgagatgtggtcccttccctgaagaatctcctaacctcatagaggtgagagagatgactggacagctgactctaagagatggtcaaaagtgcctcaaggaattgaaataaggttcccagagagccctgaggaggcagcaatgaacaaacaccctgttcatcagaaccctctagatagtcacagaagccacaaaaggaccttggttgaccttggaggaggaagcagaagtaccacgaagtggagtgactggcccagtgattcagtcccaacctcctggttcacgaacctgcttgctttccatctcgccatgtggcctgcaggcttgtcagtaacacatttctttagctgtgcctagaggtttaaaaaaaagataagggtcatatgaagaactccataatgttcttgccaagaaaaaagatgattgagtatataacgaacttcagatacagtgtatagaggatgatgcatttgtggcataataaatagttttcagtgctggttttgatatgagttttctgcattcatgaaaaagaaatgcattttggctttttccagaaagagtaccatcaaggaaacggagacctcaactgctgttctagactgtgggggtgcattcctgtctcagcaccaaggatcccaacaggcaggcagggaggcccttgactttgtgtcactgtgaggcagcagagtccatgctctgcatcaggggaggtgcagtaaaggtccattgtgtggcttgagacctatgatctgaggcttgtgcataataagatggcagctgttacctacagagcaaggagtttcctctttcagggtagattatgtaagaatcaattccctggtcccaggagaagttttattgtgagtttgttaatttaagaactcactcagcagaaggacatgtaatgtctgagtaatcttgatggaagaaaggaaatagatctgtgattaaaacacacacacacacacacacacacacacacacacaccctacttcggagagagaatgtagaatggaggaggtgaggaatttaactaatagagatgctttttctaacaggcagaaattagagaaatggatcaaaagatttaaacattgattacatataaacgagtttcctttttttctacatagcacacaggtgctcaacatttaatgaataatataacagatactgtcttaaaagtttaaaaacaggatttgtacttaatcctaaattcctcttatcacacaccagaaaataatttggattttatttacaaactacatccaaatactcttaaggaaagagtgtcatttagcttggagtagggactgactggggtctaagtgttggaaattaaattctgccattcagtccaacctcaaaggtgttccaggcaaggagttttgcaaggactagaaaccctttcacacttgaagtgcaggtgttggctgaaagaatagagggacatttcacaaacacagaacacggctcccctacaggaaagggatggagacagctacctttgctcttgctctcacattctctgtcctcatggactttcttctctgtttccctctgcctatctatctgcctggttctcttgcttctcctggccaaccagctttctcattagtgcatatgtagctgaaaaatccacccctcaagaacccactccacacaacctttccttttcagtacccaccacgctctgactagcatctctgtgatgcctaaggcaaatttttgaggatctgattggtttagttcatctgcctatgggtgagccaccctggggtcaggtgcctgtccaatcacctgttaccaaggaggcagggccgtgtcatttaagcatggccccatggactgaccctttcagcagggacttttattgggggctggtacccagaagaaggagcatgagtgggcaagaccttcaaaaagaacctactacacactggaactgactagtactcctgggatgccatgccacgcagcagccagcactcggagagcagtcccctggatactaccacacagagaaaaggggcatcttcacttgcacatcaggtgagggtgcacacacttgaaactctgctagactggccagagctgccccagccacttctcaccccaccaccagttattgatacagccgctgggtctaggaagcgatttctgaacaaggcccagttagcacaatgtcttgctcagcagacaataaatacttgtaaattgaattgcatgatcttagctcaggtgctactaatgtggctcacggccacacacttgcatggataagaaaaccaatgagcccctcaacagagtcttttgaaacaaaattggtttcaagtgaaacttacattattttttggctgtgaccttctgaatataataacttagtgtcctgagaattgaaaggcctcttgatttcttaggtgaactgttacagaatcctagcctgtggtaaatgctaaaatgtaaggtgtttctgagaaggaatatttaggaaatataattgtgccacacacacattactttagaagatatgcagttgctctgattctgcaggtttaaaaaaaatgggaagtttgtgatatggcagaatctgtctccattggtcaaaccatacttcagtgagagccattataagtgaaatctaaaaattgatcgttttcattctctgactttggtcagacttttgcaaattatggagagaggccatcaacatattttacataaattactgtggccccatcttatttctcctcatttcttccttatgtttaaacacgcccccatctcacacacaaactgagaaaagatttgtatcaaacagaatcagaggcatatgaatggactggaaattgtgaaaaaggtataaatatcctagaccttgatcaactcactttaaactggtctctgattcctcatctgtcaaatgagtataagaccctctgtacttcccatggtgattttgaggagcacatgcataatgtatctgaaaatggcttgacaagcacttgaagccattcttactaaattattagttttgtaattcggttttatccaggaaaatattttagctcctcctatctgctgaattaatttatacagtcacatgttccatgacaccatgttttgccaaggaaaaataaagaaattcctaaatttgaaattgcccacaagatctagcctcatctggagttgctgttattgtccttgttgtctatgatttggaggatatgtaagtacttgtacatgtgctttaactctgggtgaaaaaccccaaccggtgagtctttaaaaccatattagacacattgggcaaagtactgagcagaagctttgaatgtagctgttgttattttaatgcttcgctttctaatgaactttgtacgtccttagcctctgccgggaacagagtgttcatatgctgttagaattttttattgtaaaataaaatgacaaaggctttcataccccaaaa

SEQ ID NO: 5212 - DNA, 4492 bp, Homo sapiens
  source 1..4492: mol_type = unassigned DNA; mol_type = unassigned DNA
tcattccatcatctctgagccagcagagcaatcccccaaagtgctgttagttccccaaacagctccagccgacccctctttaggtcagaacatagctaatcccttaatcccattttctgatgaaatggaccacactgcatcccaaaatgcccaggatctcataggcatccctcatctaggtgtttctggatcctcaacaaaatggcattccgagctgtccccaacagagggtccccattcagcaggttcatccacacctgggtttttgagccccatggcagaactgtcccatccgtctccccctcccccagcacttggaagtcttcttcagcttccagatggaagcccctcatggtcaatgttggaagtggcttcaggtcctgcatccacccagcagatcaaagctggggtgcctggaagagtgcacaatggggtgtctttgccaacttttaagaatacagaaacagcgacccatgaggctgagcctccacttttccagactgcagaatcaggggccatagaaatgaccagcagaaagctagcctctgccactgcaaatgactctgctaacccgctgcatttgtcagcagctccagagaattccagagggcccgccctttcggcagaacacacctcttctttggtgccttctctgcatatcaccacactgggtcaagagcaagccatcctttctggggcggttcccgcatcaccatcaactgggacagccgactttccctccatacttactttcctccagcccacagagaatcatgcctccccatctcctgtgccagaaatgcccactcttccagcagagggcagtgatgggtcccctcctgcaactagagacttgctcctctcaagcaaagttcctaatcttctttccacatcttggacatttccccggtggaaaaaggacagtgtgacagccattttagggaagaatgaagaggcaaatgtgacgattcctctccaggcctttccaaggaaagaggttttgagtcttcacactgtaaatggatttgtctctgatttcagcaccggtagtgtctcatctcccatcattacagcaccaaggacgaatccccttccttcaggaccacctctaccttccatactctccatacaagccacccagactgttttcccatctcttggcttttccagcaccaagccagaggcttatgcagctgctgtggaccattctgggttgccagcttcagcttccaaacaggtgagagcatcgccctcctccatggatgtatatgattccttaacaataggagacatgaaaaagccagcaaccacagatgttttctggagttctctttcagcagaaactggatctctttccacagaatcaataatatctggcttgcagcagcaaacaaattatgatttaaatggacacacaattagcaccacaagttgggaaactcatttagctccaacagctcctcccaatggtttaacttcagctgccgatgccataaaatctcaggatttcaaagatactgctgggcattcagtgactgcagaagggtttagtattcaggatctagtcctcggtacaagcattgagcagcctgtgcaacagtcagacatgaccatggttggaagccatatagacctctggcccacaagcaataacaaccattccagagacttccaaacagctgaagttgcatattactcacccacaactcgacattccgtgtctcatcctcagctacagttgcccaaccagccagcacatcctcttttgctaacctcaccaggaccaacttctacaggtagcttgcaggaaatgctttcagatggaacagatacaggttctgaaatttccagtgacatcaattcatcacctgagagaaatgcttccacaccattccagaacatcttgggatatcactctgctgctgaatcttctatatcgaccagtgtctttcccaggacctcctccagagtgctgcgggcttctcagcaccccaagaaatggacaggtgcagccactaatgcagcggacacagtatcatctaaggtacagccaacagcagcagctgccgtcacattgtttctgaggaaatcaagtccacctgcactgtctgcagccctggttgctaagggcaccagcagcagccctttggccgtggcctcaggaccagctaagagcagttcgatgactactcttgctaaaaatgtcacaaacaaggccgcatctggcccaaagaggacaccaggggcagtccatacagccttcccattcacaccaacctacatgtatgcaagaacaggacataccacgagcacacatacagccatgcaaggaaacatggacactgcctctggcctgttgtctacaacttacctccccaggaaaccacaagccatgcacaccggcctcccaaaccccaccaacctggagatgcccagagcatccacgccacgcccactgacagtcacggccgcgctgacatccattacagcctcagtgaaggccacccggttgccaccattgcgagcagaaaacacagatgctgtccttcctgctgcatcggctgcagtggtcacgactggcaaaatggcatccaacctggagtgtcagatgtccagtaagctcctggtgaagacagttctctttctcacccaaaggagagtgcagatcagtgaatccttgaagttcagtatcgccaaagggctcacacaggcattgcggaaggctttccaccagaacgatgtctcagctcacgtggacattctggaatattctcataatgtcacagttggttattatgctaccaaagggaagttggtgtatttgcctgctgtggtgatcgaaatgctgggtgtgtatggagtcagcaacgtcactgcagacctgaagcaacacaccccacacttacagtctgtggcagtacttgcctccccatggaatccccagcctgcaggctacttccagctaaaaacagtgctgcagtttgtgagccaagcggacaacatacagtcctgcaagtttgctcagacaatggaacagaggctgcagaaggcattccaggatgccgagaggaaagtcctgaataccaaaagcaacttgacaattcagattgtgagcacgtccaatgcctcccaggcagtcaccttggtgtacgtcgtgggcaatcagagcacattcctcaacggcaccgtcgccagcagcctcctcagccagctctcggctgagctggtgggattctacctcacctatccgccgctaaccattgctgaaccactggaatatcccaaccttgacatatcagaaacaaccagagactattgggtaattacagtgctgcagggtgtggacaattcgctggtgggcctgcacaaccagagctttgcccgggtcatggagcagcgcctggcccagctattcatgatgtcccagcaacaaggccggcggtttaaacgggccaccaccctgggaagctacactgtgcagatggtgaagatgcagcgtgtcccaggcccgaaggacccagcggagctgacttactataccctgtacaacgggaagcctttgttggggaccgcagctgccaagatcctgagcaccattgattcccaaaggatggccttgacccttcatcacgttgtccttctgcaagctgaccccgtggtgaagaacccgcccaataacctgtggatcatcgctgcagtgctggcgcccattgccgtggtcacggtcatcatcatcatcatcactgccgtgctctgcaggaagaacaagaacgacttcaagcctgacaccatgataaacctgccgcagagagcaaagcaggtcgcccagtgagaatggctctgtcatcagcaacgaatcagggaagcccagctcagggagacgctcaccccagaatgtaatggcacagcagaaagtgacaaaggaggaggcaaggaagagaaatggtgagaagccttccctccaagaaccacccccagctgctcccacgcgtgcccgcacacacatgcgtgcacacgtgtgcacaaactcacacacagccactgggctctgaccctcagtcgttctttctattctgccccacaagggccaggagtctgtatgtaccccttgggttctcaccttaccccttgtctgaattgtcctgtctcacttcctccgcccctgttcttatgaaatggtgtagttccttaggaaaaaccttttgcggaatgaactgatgtttgcttagaggtttttctaattctctagttagaaatcctctaaaatttctaatttctaatcacatgaattgacgcaatttcttgcaccagttccactaaggcagcagatctctgaaataactgctcatcttggagattcctctcattttcctgccctgactcccctgataagtttcatgggttcagtctgtgccactgagtccagatattgcaactccacttctcccaggaaaaaactaacccaaaacaataaaggaacagatctgtcatc

SEQ ID NO: 5213 - DNA, 2507 bp, Homo sapiens; identical to SEQ ID NO: 5210
  source 1..2507: mol_type = unassigned DNA; mol_type = unassigned DNA

SEQ ID NO: 5214 - DNA, 11678 bp, Homo sapiens; identical to SEQ ID NO: 5211
  source 1..11678: mol_type = unassigned DNA; mol_type = unassigned DNA

SEQ ID NO: 5215 - DNA, 4492 bp, Homo sapiens; identical to SEQ ID NO: 5212
  source 1..4492: mol_type = unassigned DNA; mol_type = unassigned DNA

SEQ ID NO: 5216 - DNA, 440 bp, Homo sapiens
  source 1..440: mol_type = unassigned DNA; mol_type = unassigned DNA
gcttccggttcgagctcccggaaccgccgcctctagggatggacggtcagactctgcgaaaggccgagagaagctggtcctgctcacgagagaaaaaggaggtaaatgtgtccctggcgagggctgatgggaggcaactctatttgaaaggacctgagggagcagggtggcgaataagtgtccctaaatatactcttttctcttggggtcccaagcttgaatcctggagcaaatgatagtgagcaactagacttaccaacccagtgtcacttgtaataatcacttgtaataatcacttgtaataatcatctctgagtgtatcagttaactttgtctgtgtaacaaatcatcccagattttagtggcttaaaacaacaaccatatatttagttctggatttggtgggttagcagtttgggcttatctgggcagttctgctg

SEQ ID NO: 5217 - DNA, 6616 bp, Homo sapiens
  source 1..6616: mol_type = unassigned DNA; mol_type = unassigned DNA
ggaaccgccgcctctagggatggacggtcagactctgcgaaaggccgagagaagctggtcctgctcacgagagaaaaaggagggttacgctaaggacatggtgacagactttgatgagaaacatgatgagtatttaatattgcttcagcagaggaaccggatattaaagcatttgaaaagcaaggaccccgtgcaattgaggctggagcacttggagcaaggtttctctgtctatgtcaacggtgccaattcggagctgaaatcatcaccgcggaaagctattcactctgacttctccagaagtgcctcccacacggaggggacacacgattatggacgaagaactctgtttcgagaagctgaagaagccttaagacgcagttcacggacagcccccagtaaagtccagcgccgaggatggcaccagaaatctgtgcagatcagaacagaagctggcccacggctccacatcgaacctcctgtggactattctgatgattttgagctgtgtggggatgtgactctccaggcaaacaacacttctgaggatcgtccgcaggagctgagaagaagcctggaacttagtgtaaatctacaaaggaaacaaaaggattgttccagcgatgagtatgactctattgaggaagacatactctctgagcctgagccagaggacccggcactggtgggccatcccagacatgaccgccctccttccagtggcgactggactcagaaagatgttcacggggaacaggagacagaaggacgctcttctccaggcccagacaccctcgtggtgctggaatttaacccagcttccaaaagtcataaaagggaaaggaatttgtctgcaaagcggaaggacaatgctgaggttttcgttcccaccaaacctgagccaaacctgactccccaagctcctgctgtattcccagaccaggagaggatgtgctccagacctggaagccggcgagagagacccctgtctgcaacccgcaaaactctttgcgaggctgagtacccagaggaagatgcctctgctgtgctccaagccatccaggtggagaacgcagccctgcagagggcgctcctcagcagaaaggccgagcagccagccagcccactgcaggatgcagaaggaccaccagcaaaaccatggaccagtctgctggaggagaaggaagagacccttgagctgcttcccatcaccacggcgactactactcaggagccggccggggcagcaggaggagccagggccatcaaccaggccatggacagaattgggcttctgggaagcagacaacagcagaagcttctgaaagtcctccaggccgtcgaaagtgactctgcccatctcggcagggtggtttcaccaaccaaggagcaagtatcagacacagaggacaaacagagaatgagggcagacgagatcaaagatgccatctacgtgaccatggagatcctgtccaactggggcaactcgtggtgggtgggtctcacagaagtcgagttctttgacttgaatgacacaaagctttatgtgtcgccccacgatgtggatatccggaacacagccacgcctggggagctgggccgcctcgtcaacaggaacttagctggcaagaaagactcctccccgtggacctgccccttccacccaccactccagctgttttttgttattcgaaacacaagacagctgggggacttccatctggccaagatcaaggttcggaattactggacagctgatggcgatcttgacattggtgccaagaacgtgaagctttacgtcaacagaaacctcatcttcaatggcaagttagacaaaggagatagggaggccccagctgaccacagcatcctggttgaccagaagaacgagaagagcgagcaactagaggaggccatgaacgctcactcggaagaaagcaaaggcacccatgagatggctggtgccagcggggacaaggagcttggtctcggttgctcaccgccagctgaaacattagcggatgcaaagctttcttcacaaggaaatgtgtctggcaaaagaaagaattctactaattgcaggaaagacagtttgtcccagttagaggaatatttgagactgtcggcagtccccacttcgatgggtgacatgcccagtgctcctgccacttccccacctgtgaagtgccctcctgtccatgaggagccctctctcatccaacaactggaaaacctcatgggcagaaaaatctgtgagccacccgggaaaaccccatcctggttacaaccttctcccaccggcaaggacaggaagcagggaggcaggaagccaaaacccctctggcttagtcccgagaagcccctggcctggaagggcaggctcccatcagacgatgtcatcggtgagggtcctggagagaccgaggccagggataaaggcctacggcatgagccagggtgggggaccagccggagtgtcaacaccaaggagagaccccagagggcaaccaccaaagtccacagtgatgactcagacatctttaaccagccccccaacagagagcgccctgctagtgggaggaggggctcaaggaaggatgctggcagcagtagtcatggggacgaccagccagccagcagagaagacacctggtcttccaggacgccgtcacggtcaaggtggcgcagtgagcaggagcacacacttcacgagtcatggagctccctcagtgccttcgaccgctcccaccggggacgcatctccaacacggagctcccgggggacatcctggatgagctcctgcagcaaaagagcagccggcacagcgacttgcccccctccaagaagggggagcagccagggctgtcgagagggcaggatggctactctggagagacagacgctgggggtgactttaaaatccccgtcttgccttatggacagcgcttggtcattgacatcaagtctacctggggggacagacactatgtcggcctcaacggaatagaaatattcagttccaagggtgaaccggtgcagatttcaaacataaaagcagaccctcccgatatcaatattttaccagcctatgggaaagacccccgcgtggtcaccaacctcatcgacggggtgaacaggacccaggatgacatgcatgtctggctggcccccttcacgcggggcagatcccactccatcaccattgacttcacgcacccttgccacgttgccctgatcagaatttggaactacaataaatctcggatacattccttccgaggcgtgaaggacatcacaatgctgttagacacccagtgcatctttgaaggagaaatcgccaaggcctctggaaccctggcgggagccccagagcactttggagacacgatcttattcacaaccgatgatgacattctcgaggccatattctattctgatgagatgtttgacctggatgtggggagcctggacagcctgcaggatgaagaggcaatgaggaggcccagcacggccgacggcgagggggatgagcggcccttcacccaggctggcttgggggctgatgaacggatcccggagctagagctcccatccagttcccctgtcccccaagtcaccacgccagagccaggcatctaccacggaatctgccttcagctgaatttcactgcctcctggggagacttgcactacctggggctcactggcctggaagtggtgggcaaggagggccaggcgctgcccatccacctgcaccagatctctgcttcccccagagacttaaatgagctccccgagtactctgacgactcccgggccctggacaagttaattgatggcaccaacatcaccatggaggatgagcatatgtggctgatccccttctcgccggggctggaccatgtggtcacgatccgcctggacagggccgaaagcatcgcaggcctgcgcttctggaactacaataaatctcccgaggacacctatcgcggggccaagattgtccacgtctccctggatggcctgtgcgtctccccgccagagggctttctcatccggaaggggccaggcaactgccactttgattttgctcaagaaatcctcttcgtggactacctacgggctcagctgctgccccagccggccaggaggctggacatgagaagcctggagtgtgcaagcatggactacgaggcaccgctgatgccctgtggcttcattttccagtttcagcttctcaccagctggggcgacccctactacatcggcctcaccggcctggagctgtatgacgagcgaggagaaaaaatccccttgtcggaaaacaatattgcggccttccccgacagcgtgaactccctggagggtgtgggcggggacgtccgcaccccagacaagctcatcgaccaagtgaacgacaccagtgatggccggcacatgtggctggctcccatcctgccgggcctggtgaaccgggtttatgtgattttcgatctgcctaccaccgtgtcaatgatcaaactgtggaattatgcgaaaacaccccatcgaggggtgaaggagtttggcctcctggtggacgacctgcttgtgtacaatgggatcctggccatggtgagccacctggtggggggcatcctgcccacatgtgagcccaccgtgccctaccacaccatcctcttcaccgaggacagggacatccgccaccaggagaaacacaccaccatcagtaatcaggccgaggatcaagatgtccagatgatgaatgaaaaccaaatcattaccaacgcgaaacggaagcagagcgttgttgacccagccttacgtcccaaaacctgcatcagcgagaaggagacgagacgacggcgctgctgactggtgaaggagggagagctggtcctcccactatggtgggctccgtcagcagccccactcagtgcctgcgtccctcaccctcagtcccaggagctggaagcgaaccacagtgttgaggggagcccgctgggaagaggggactcgggaggacagccctggatactaccagagtgacagatggctgtggctgcagggcaaagagatcccctgcagttctgggttggccacagggagcccaggacacccgccttcatgcctctgctgtgagacccagcaaagcagggcccatgaccactagggcctgggctgaccctgactcagaacaggacaatgacggggtggggaggcatcccatccagcctcagagggcccagagaatggctgagcaggacagtgggagaccagaccctaccccgcaactccagtaagcagggcactgcccagggagactgccttcagaaacctgagcttcagcggccaacaccccccatcccctgcgcatccttgtctcatttggggactggtggagctggctgagaggttggggtagtttcctggttacaggggtccacaagaccctctctcatcccggtataggggcctctctcctctcatcgggcctgataagggattggccaaggctgtgtgcatcctgcagagggaaggaagtcagctgggccacccgccatccaccttggcaagagctgggcccactctggcaggccagggtatcatctgcgtgctgctgccgggccaggaagggtgggtgggtggccagcaggctggcagctccagaccccagagggccagaagaactcaccccagtgccctctggatgcaggtgttggggaacactgaggacaatcccccatctcccctcacccttgagcaggccctccctgcactctctgccacatgtccctcctggtctgatcacggctgtgctcactgatgtggctgctttctgtctctgcccctgtgcccttggaggcaggcagtgaggtgctcctttcccaggcccccaccccttctcccccttcagccacttcccagcgagttggaaatgtgccttgcacccccagccgagtgaagcccagaacgcatctatatgcatcgatgtaacaagctcggatcagggacctaattggtttcccagtagtgggtaatttctcgttgcaaatattaatccgttgtttttctggcgcccagcccggcccgccgcagtactgtactcgaggtacgttcctatgcaaccgagagccccggcaaatacttcatgagcttagcagcctgggctcgagcagctatgcaaacgcgcttttcatttggagcacggggctgatgtgaagataagaattgtttctcctggagaaagatccatcatttctccagcttccaagcccccggcacctctgctcagctcccagatgtgacgagcacctcccgccagggggagtcaggggttgatcaaaccagctcttgtgacccaaaccagtgccgctgcattaaagggaggcccagctactccttcccagctgagatgtgggtacaggtcagatttgtcagggagatggcactaacacgacacaagctcactcccagaaccgcagctgatgtttataataatcgtatgtactgtgcaatttaggaggggaaaaaaaggctgtacaagctttaactctaaaataaatttctatttttttcctcttgcaaaattaataaaagatgttattaagaata

SEQ ID NO: 5218 - DNA, 746 bp, Homo sapiens
  source 1..746: mol_type = unassigned DNA; mol_type = unassigned DNA
ctctgcgaaaggccgagagaagctggtcctgctcacgagagaaaaaggagggttacgctaaggacatggtgacagactttgatgagaaacatgatgagtatttaatattgcttcagcagaggaaccggatattaaagcatttgaaaagcaaggaccccgtgcaattgaggctggagcacttggagcaaggtttctctgtctatgtcaacggtgccaattcggagctgaaatcatcaccgcggaaagctattcactctgacttctccagaagtgcctcccacacggaggggacacacgattatggacgaagaactctgtttcgagaagctgaagaagccttaagacgcagttcacggacagcccccagtaaagtccagcgccgaggatggcaccagaaatctgtgcagatcagaacagaagctggcccacggctccacatcgaacctcctgtggactattctgatgattttgagctgtgtggggatgtgactctccaggcaaacaacacttctgaggatcgtccgcaggataccaaatctcccaccagtaccaagccctgtggttttaacttctcccttctgaatgcatgtggacattctgacccttcaagcagcgtggacaaagaaaggatcctcttaactattcaggatgtgatggagctgagaagaagcctggaacttagtgtaaatctacaaaggaaacaaaaggattgttccagcgatgagtatgactctattgaggaagac

SEQ ID NO: 5219 - DNA, 767 bp, Homo sapiens
  source 1..767: mol_type = unassigned DNA; mol_type = unassigned DNA
agagaagctggtcctgctcacgagagaaaaaggaggatattaaagcatttgaaaagcaaggaccccgtgcaattgaggctggagcacttggagcaaggtttctctgtctatgtcaacggtgccaattcggagctgaaatcatcaccgcggaaagctattcactctgacttctccagaagtgcctcccacacggaggggacacacgattatggacgaagaactctgtttcgagaagctgaagaagccttaagacgcagttcacggacagcccccagtaaagtccagcgccgaggatggcaccagaaatctgtgcagatcagaacagaagctggcccacggctccacatcgaacctcctgtggactattctgatgattttgagctgtgtggggatgtgactctccaggcaaacaacacttctgaggatcgtccgcaggataccaaatctcccaccagtaccaagccctgtggttttaacttctcccttctgaatgcatgtggacattctgacccttcaagcagcgtggacaaagaaaggatcctcttaactattcaggatgtgatggagctgagaagaagcctggaacttagtgtaaatctacaaaggaaacaaaaggattgttccagcgatgagtatgactctattgaggaagacatactctctgagcctgagccagaggacccggcactggtgggccatcccagacatgaccgccctccttccagtggcgactggactcagaaagatgttcacggggaacaggagac

SEQ ID NO: 5220 - DNA, 392 bp, Homo sapiens
  source 1..392: mol_type = unassigned DNA; mol_type = unassigned DNA
gagtatttaatattgcttcagcagaggaaccggatattaaagcatttgaaaagcaaggaccccgtgcaattgaggctggagcacttggagcaaggtttctctgtctatgtcaacggtgccaattcggagctgaaatcatcaccgcggaaagctattcactctgacttctccagaagtgcctcccacacggaggggacacacgattatggacgaagaactctgtttcgagaagctgaagaagccttaagacgcagttcacggacagcccccagtaaagtccagcgccgaggatggcaccaggtctggagactgtggccccagcccacgctttagaatacagagtgtgggtggctgtgggaatagaaatacaatcagagcatttaaaaccccca

SEQ ID NO: 5221 - DNA, 564 bp, Homo sapiens
  source 1..564: mol_type = unassigned DNA; mol_type = unassigned DNA
actcctggcttgggggtacagcagcccagactctcaaatgatgaggaggaacaacccaccgtttctctttcaggatattaaagcatttgaaaagcaaggaccccgtgcaattgaggctggagcacttggagcaaggtttctctgtctatgtcaacggtgccaattcggagctgaaatcatcaccgcggaaagctattcactctgacttctccagaagtgcctcccacacggaggggacacacgattatggacgaagaactctgtttcgagaagctgaagaagccttaagacgcagttcacggacagcccccagtaaagtccagcgccgaggatggcaccagaaatctgtgcagatcagaacagaagctggcccacggctccacatcgaacctcctgtggactattctgatgattttgagctgtgtggggatgtgactctccaggcaaacaacacttctgaggatcgtccgcaggataccaaatctcccaccagtaccaagccctgtggttttaacttctcccttctgaatgcatgtggacattctgacccttcaagcagcgtgg

SEQ ID NO: 5222 - DNA, 2262 bp, Homo sapiens
  source 1..2262: mol_type = unassigned DNA; mol_type = unassigned DNA
atggatcccatcgtcaaaaaatggcggcattagcaggatctgagggtggaggttttggccttctgatgtcaaaaggcgaatcgggagacacggaaaccctcactgtgcatcctctatagaggggtcagaaccactccatgaaatctgtgcagatcagaacagaagctggcccacggctccacatcgaacctcctgtggactattctgatgattttgagctgtgtggggatgtgactctccaggcaaacaacacttctgaggatcgtccgcaggataccaaatctcccaccagtaccaagccctgtggttttaacttctcccttctgaatgcatgtggacattctgacccttcaagcagcgtggacaaagaaaggatcctcttaactattcaggatgtgatggagctgagaagaagcctggaacttagtgtaaatctacaaaggaaacaaaaggattgttccagcgatgagtatgactctattgaggaagacatactctctgagcctgagccagaggacccggcactggtgggccatcccagacatgaccgccctccttccagtggcgactggactcagaaagatgttcacggggaacaggagacagaaggacgctcttctccaggcccagacaccctcgtggtgctggaatttaacccagcttccaaaagtcataaaagggaaaggaatttgtctgcaaagcggaaggacaatgctgaggttttcgttcccaccaaacctgagccaaacctgactccccaagctcctgctgtattcccagaccaggagaggatgtgctccagacctggaagccggcgagagagacccctgtctgcaacccgcaaaactctttgcgaggctgagtacccagaggaagatgcctctgctgtgctccaagccatccaggtggagaacgcagccctgcagagggcgctcctcagcagaaaggccgagcagccagccagcccactgcaggatgcagaaggaccaccagcaaaaccatggaccagtctgctggaggagaaggaagagacccttgagctgcttcccatcaccacggcgactactactcaggagccggccggggcagcaggaggagccagggccatcaaccaggccatggacagaattgggcttctgggaagcagacaacagcagaagcttctgaaagtcctccaggccgtcgaaagtgactctgcccatctcggcagggtggtttcaccaaccaaggagcaagtatcagacacagaggacaaacagagaatgagggcagacgagatcaaagatgccatctacgtgaccatggagatcctgtccaactggggcaactcgtggtgggtgggtctcacagaagtcgagttctttgacttgaatgacacaaagctttatgtgtcgccccacgatgtggatatccggaacacagccacgcctggggagctgggccgcctcgtcaacaggaacttagctggcaagaaagactcctccccgtggacctgccccttccacccaccactccagctgttttttgttattcgaaacacaagacagctgggggacttccatctggccaagatcaaggttcggaattactggacagctgatggctctctctctgctgcccaggctggagtgcagtggcgtgatcatggctcactgtagcctcgacctcctgggctcaagcgttcctcccacctcagcctcccaagtagctgggactccaggtgtgcacaccacacacagctagtttttttattttttgtagagataggctggtctcaaactcttgacctcaagtcatcctcccgcctcagcttcccaaagtgctgggattacaggcgtgagccaccacgcccggtcctgattgaggaatttaaaagactactctggttgatttggagaatggatcagggggcagagggagccccgagagaggaggctcaaggcatagaacagcctaagaacagcctcgctgaagatggtggtggcctggatgagggtgtcagtgctcttggggtgcactttaggtgggctcaactcatcctatgaccatttgcattttcagcaatgcctttttctggaaagaagttttcaaatgaatgcaaaagtgaagagattagttcagtaatgaggcgtgtatccatcacctgcttcaataattacaaacattctgctattgttgtttcacgtatccccttaacatttgaaagtaaattgtagctatcacactatttcactcataaatccttcagtatacatctctaac

SEQ ID NO: 5223 - DNA, 3237 bp, Homo sapiens
  source 1..3237: mol_type = unassigned DNA; mol_type = unassigned DNA
gacctggaagccggcgagagagacccctgtctgcaacccgcaaaactctttgcgaggctgagtacccagaggaagatgcctctgctgtgctccaagccatccaggtggagaacgcagccctgcagagggcgctcctcagcagaaaggccgagcagccagccagcccactgcagctgcttcccatcaccacggcgactactactcaggagccggccggggcagcaggaggagccagggccatcaaccaggccatggacagaattgggcttctgggaagcagacaacagcagaagcttctgaaagtcctccaggccgtcgaaagtgactctgcccatctcggcagggtggtttcaccaaccaaggagcaagtatcagacacagagagaatgagggcagacgagatcaaagatgccatctacgtgaccatggagatcctgtccaactggggcaactcgtggtgggtgggtctcacagaagtcgagttctttgacttgaatgacacaaagctttatgtgtcgccccacgatgtggatatccggaacacagccacgcctggggagctgggccgcctcgtcaacaggaacttagctggcaagaaagactcctccccgtggacctgccccttccacccaccactccagctgttttttgttattcgaaacacaagacagctgggggacttccatctggccaagatcaaggttcggaattactggacagctgatggcaagacacctggtcttccaggacgccgtcacggtcaaggtggcgcagtgagcaggagcacacacttcacgagtcatggagctccctcagtgccttcgaccgctcccaccggggacgcatctccaacacggagctcccgggggacatcctggatgagctcctgcagcaaaagagcagccggcacagcgacttgcccccctccaagaagggggagcagccagggctgtcgagagggcaggatggctactctggagagacagacgctgggggtgactttaaaatccccgtcttgccttatggacagcgcttggtcattgacatcaagtctacctggggggacagacactatgtcggcctcaacggaatagaaatattcagttccaagggtgaaccggtgcagatttcaaacataaaagcagaccctcccgatatcaatattttaccagcctatgggaaagacccccgcgtggtcaccaacctcatcgacggggtgaacaggacccaggatgacatgcatgtctggctggcccccttcacgcggggcagatcccactccatcaccattgacttcacgcacccttgccacgttgccctgatcagaatttggaactacaataaatctcggatacattccttccgaggcgtgaaggacatcacaatgctgttagacacccagtgcatctttgaaggagaaatcgccaaggcctctggaaccctggcgggagccccagagcactttggagacacgatcttattcacaaccgatgatgacattctcgaggccatattctattctgatgagatgtttgacctggatgtggggagcctggacagcctgcaggatgaagaggcaatgaggaggcccagcacggccgacggcgagggggatgagcggcccttcacccaggctggcttgggggctgatgaacggatcccggagctagagctcccatccagttcccctgtcccccaagtcaccacgccagagccaggcatctaccacggaatctgtgagtagctctcctggagcagtgttgggtggaaggaggaccttccagggacagggggagttgtggccacttgggacagggtttcgctggacaatcgggtgggttggacactgtacagagacaccaggccatggggcaagtggaggctgaaaccagcctgcgctcagctccctggccctagcagggccacctcactccagaggaggggcatctcttagcattttgccttccctgaggggcatttttgcatgcagacaccctatgtgttagctgtgaccatgaccctgacccaggaggtgtagttggcacccagaaagtgtagaacaagaggacattagagcctgaagagacccaaggcatctgttggtgcagtgccccgagctgtctcttccaactccaccaaagagtagatgcacaggcagagaaaacctgcatccactctgccccgggggtgggggcaggtgcacaggcccagggtaccaggtcttctgacttttcagaagaagtcggaaatctagagtcttacgtgaagtctccagattctcaaatgtgtgtaacgaattttctcatgttttaaaatatcacatgagccaaataaaacacttattgtgtatctggccagctggctgccagtttgtgacttctgagcaaatcccaggggttttctgctgggcctgttcctcacccttcttttccattgatccttccagccagttcctctcttcatccatgcgtgtccacatcagcccctccccgtcctggggaatcttcaagcccaaggtcactgctgattgtgatctcctccctcctgcaccctgctaaccaggttcctggcagcctcacttcctgctctctcctgccccctgtgaatgtgacccgcttctactttatcttctgagacaaaagatgtgacactgtcaggatcccctccccacctccccatcctcatctccaaaatgaagctggagcctctccgaatcctggtgtcagcccttccgggacctccccatgccatctctggagtccacctgcaggcacctgtgcaagccacaccttccacctaggatgcctccctgctccatctctgccttctgacgaccacctgtcgctggctaggttccctagacacagaccctgagatggagtttcctggggtgtgctcttgtcagggaagggtaggaggcaggattgggcagagggagaagctggtctgcggttcagccacttcaaggcctcagcctgctccacagggagctcggaacctgggatggccctttggggtcatcctgagttgagtgaggggccatgtctttatctgtatcaacatggcactggctatgggctgcccctggggaggggcatggctttttattttactttttaatttgtatttatttattttgacacagttttactctgtcgctcaggctggaatgcagtggcatgatctcagctcactgcaacctccgcctcccaggttcaagagagctcctgcctcagc

SEQ ID NO: 5224 - DNA, 321 bp, Homo sapiens
  source 1..321: mol_type = unassigned DNA; mol_type = unassigned DNA
gctccaggcagttgctgtcaccctcacattcctgttcctgttttctacaaagggactgtcagcctgagcatgcctgcccttgaccgtgaccctgctgtgtcttaggccaggagtgttgcctgagacatctgtttaataagcctttccatcctcagctgcttcccatcaccacggcgactactactcaggagccggccggggcagcaggaggagccagggccatcaaccaggccatggacagaattgggcttctgggaagcagacaacagcagaagcttctgaaagtcctccaggccgtcgaaagtgactctgcccatctcg

SEQ ID NO: 5225 - DNA, 570 bp, Homo sapiens
  source 1..570: mol_type = unassigned DNA; mol_type = unassigned DNA
agcccagccaagcgcctctgtttccaaacatgcctgttttaattagtgccgctctctgacaggtgaaccgggtttatgtgattttcgatctgcctaccaccgtgtcaatgatcaaactgtggaattatgcgaaaacaccccatcgaggggtgaaggagtttggcctcctggtggacgacctgcttgtgtacaatgggatcctggccatggtgagccacctggtggggggcatcctgcccacatgtgagcccaccgtgccctaccacaccatcctcttcaccgaggacagggacatccgccaccaggagaaacacaccaccatcagtaatcaggccgaggatcaagatgtccagatgatgaatgaaaaccaaatcattaccaacgcgaaacggaagcagagcgttgttgacccagccttacgtcccaaaacctgcatcagcgagaaggagacgagacgacggcgctgctgactggtgaaggagggagagctggtcctcccactatggtgggctccgtcagcagccccactcagtgcctgcgtccctcaccctcagtcccaggagctggaag

SEQ ID NO: 5226 - DNA, 816 bp, Homo sapiens
  source 1..816: mol_type = unassigned DNA; mol_type = unassigned DNA
agacccatatatccaaatcgtagagaacgagaagctatgattttatcatcttatgctggaatcttaatgaacagtatcccgattgaggaagtctttaaaatttatggggctgattcttctgccgattctggtaccatcaaggttccccgagtttcatctctctgcctctccttgcacccctttgccatgttaacagcacccaaagcagcagcatacgcccgcaaacagatagagacggggtttcaccgtggtctcgatctcctgacctcgcgatctgcccgccttggcctcccaaagcgctgggattacaggcttgagccaccgcgcccggcccaactcttgggtcacttagaaaattggaattgtaccatggaacttcataatagattctctgggagcagacgagaagcatcatcttaaaaccacagctcttgccagtacatttttctttacaactgtttttggtacaactgcactgaagtgttatttttgatgttgagctttcttcttttagaagcatattgcatggctacattttcttaaaaaaaaaaactgtgaccttatgctacttcattgtgactggaagactgctggagaattcagaaagtatatagtatttctgtgttagagcaagctggctttgtagcacattttacaaatgtgtggcattgaatattgcacagtgatggagtgggaggcagatttccaaagagttaatccaaaataaaattaatctgtcattgattgcctttactgtgttctcatatgaaaagaatgtttaaatcatttcaataaagcattaaaaaaatgaataca

SEQ ID NO: 5227 - DNA, 1238 bp, Homo sapiens
  source 1..1238: mol_type = unassigned DNA; mol_type = unassigned DNA
agcaaccaggaaaaagcatgtgttcctgatgtctgtgagcaccagtctgagatgcgcggatgcttcagcatgcctccagaagcagagaaagaacaaaagcactggaaccggtctccggttgcctctagactcagagaagctgggtctaagtgtagtgttagctgcagatacctgctcagctggctaagcctttaacatggaaagaaggctcataaagaaggaaatgaaaaagctcttgggagattatattggcatcagacttcgggaaaatgaatttgacccaaaaggaagacggcaactcacctttctagatgatatggcacactatgacttggccatcagtgttgctttgcaatggctggatccctcagaagacttaacttggctggagtgggaggaactgaaaataccactccatggcagacccatatatccaaatcgtagagaacgagaagctatgattttatcatcttatgctggaatcttaatgaacagtatcccgattgaggaagtctttaaaatttatggggctgattcttctgccgattctggtaccatcaaggttccccgagtttcatctctctgcctctccttgcacccctttgccatgttaacagcacccaaagcagcagcatacgcccgcaaacagagtgtcaagtcaagaaaggtaacaacaaataaaaatgccaccagcatctctgcaaaggaagcaaatgccacagaatggaaatcatcacaaaggttttcagacacacagccaaagcacaaagtcacttagaaaattggaattgtaccatggaacttcataatagattctctgggagcagacgagaagcatcatcttaaaaccacagctcttgccagtacatttttctttacaactgtttttggtacaactgcactgaagtgttatttttgatgttgagctttcttcttttagaagcatattgcatggctacattttcttaaaaaaaaaaactgtgaccttatgctacttcattgtgactggaagactgctggagaattcagaaagtatatagtatttctgtgttagagcaagctggctttgtagcacattttacaaatgtgtggcattgaatattgcacagtgatggagtgggaggcagatttccaaagagttaatccaaaataaaattaatctgtcattgattgcctttactgtgttctcatatgaaaagaatgtttaaatcatttcaataaagcattaaaaaaatgaa

SEQ ID NO: 5228 - DNA, 979 bp, Homo sapiens
  source 1..979: mol_type = unassigned DNA
agatgcgcggatgcttcagcatgcctccagaagcagagaaagaacaaaagcactggaaccggtctccggcacactatgacttggccatcagtgttgctttgcaatggctggatccctcagaagacttaacttggctggagtgggaggaactgaaaataccactccatggcagacccatatatccaaatcgtagagaacgagaagctatgattttatcatcttatgctggaatcttaatgaacagtatcccgattgaggaagtctttaaaatttatggggctgattcttctgccgattctggtaccatcaaggttccccgagtttcatctctctgcctctccttgcacccctttgccatgttaacagcacccaaagcagcagcatacgcccgcaaacagagtgtcaagtcaagaaaggtaacaacaaataaaaatgccaccagcatctctgcaaaggaagcaaatgccacagaatggaaatcatcacaaaggttttcagacacacagccaaagcacaaagtcacttagaaaattggaattgtaccatggaacttcataatagattctctgggagcagacgagaagcatcatcttaaaaccacagctcttgccagtacatttttctttacaactgtttttggtacaactgcactgaagtgttatttttgatgttgagctttcttcttttagaagcatattgcatggctacattttcttaaaaaaaaaaactgtgaccttatgctacttcattgtgactggaagactgctggagaattcagaaagtatatagtatttctgtgttagagcaagctggctttgtagcacattttacaaatgtgtggcattgaatattgcacagtgatggagtgggaggcagatttccaaagagttaatccaaaataaaattaatctgtcattgattgcctttactgtgttctcatatgaaaagaatgtttaaatcatttcaataaagcattaaa

SEQ ID NO: 5229 - DNA, 748 bp, Homo sapiens
  source 1..748: mol_type = unassigned DNA
tgttgctttgcaatggctggatccctcagaagacttaacttggctggagtgggaggaactgaaaataccactccatggcagacccatatatccaaatcgtagagaacgagaagctatgattttatcatcttatgctggaatcttaatgaacagtatcccgattgaggaagtctttaaaatttatggggctgattcttctgccgattctggtaccatcaaggttccccgagtttcatctctctgcctctccttgcacccctttgccatgttaacagcacccaaagcagcagcatacgcccgcaaacagagtcacttagaaaattggaattgtaccatggaacttcataatagattctctgggagcagacgagaagcatcatcttaaaaccacagctcttgccagtacatttttctttacaactgtttttggtacaactgcactgaagtgttatttttgatgttgagctttcttcttttagaagcatattgcatggctacattttcttaaaaaaaaaaactgtgaccttatgctacttcattgtgactggaagactgctggagaattcagaaagtatatagtatttctgtgttagagcaagctggctttgtagcacattttacaaatgtgtggcattgaatattgcacagtgatggagtgggaggcagatttccaaagagttaatccaaaataaaattaatctgtcattgattgcctttactgtgttctcatatgaaaagaatgtttaaa

SEQ ID NO: 5230 - DNA, 722 bp, Homo sapiens
  source 1..722: mol_type = unassigned DNA
gctggctaagcctttaacatggaaagaaggctcataaagaaggaaatgaaaaagctcttgggagattatattggcatcagacttcgggaaaatgaatttgacccaaaaggaagacggcaactcacctttctagatgatatggcacactatgacttggccatcagtgttgctttgcaatggctggatccctcagaagacttaacttggctggagtgggaggaactgaaaataccactccatggcagacccatatatccaaatcgtagagaacgagaagctatgattttatcatcttatgctggaatcttaatgaacagtatcccgattgaggaagtctttaaaatttatggggctgattcttctgccgattctggtaccatcaaggtcacttagaaaattggaattgtaccatggaacttcataatagattctctgggagcagacgagaagcatcatcttaaaaccacagctcttgccagtacatttttctttacaactgtttttggtacaactgcactgaagtgttatttttgatgttgagctttcttcttttagaagcatattgcatggctacattttcttaaaaaaaaaaactgtgaccttatgctacttcattgtgactggaagactgctggagaattcagaaagtatatagtatttctgtgttagagcaagctggctttgtagcacattttacaaatgtgtggcattgaatattgcac

SEQ ID NO: 5231 - DNA, 460 bp, Homo sapiens
  source 1..460: mol_type = unassigned DNA
gatacctgctcagctggctaagcctttaacatggaaagaaggctcataaagaaggaaatgaaaaagctcttgcacactatgacttggccatcagtgttgctttgcaatggctggatccctcagaagacttaacttggctggagtgggaggaactgaaaataccactccatggcagacccatatatccaaatcgtagagaacgagaagctatgattttatcatcttatgctggaatcttaatgaacagtatcccgattgaggaagtctttaaaatttatggggctgattcttctgccgattctggtaccatcaaggttccccgagtttcatctctctgcctctccttgcacccctttgccatgttaacagcacccaaagcagcagcatacgcccgcaaacagagtgtcaagtcaagaaaggtaacaacaaataaaaatgccaccagcatctctgcaaagga

SEQ ID NO: 5232 - DNA, 386 bp, Homo sapiens
  source 1..386: mol_type = unassigned DNA
aagaacaaaagcactggaaccggtctccggttggtgagcgattctcaaaggggaatttgttaagagcaggcacttaatagaacagcccgagagacctgtaccacgattgcagcctctagactcagagaagctgggtctaagtgtagtgttagctgcagatacctgctcagctggctaagcctttaacatggaaagaaggctcataaagaaggaaatgaaaaagctcttgggagattatattggcatcagacttcgggaaaatgaatttgacccaaaaggaagacggcaactcacctttctagatgatatggcacactatgacttggccatcagtgttgctttgcaatggctggatccctcagaagacttaacttggctggagtggg

SEQ ID NO: 5233 - DNA, 1595 bp, Homo sapiens
  source 1..1595: mol_type = unassigned DNA
cttggagtggttcttttccattggaaaacacagaattggcaaatgtgggagctaaccaagtcactgtaagaaaaggggaaaaggaccatacaactcattgtcacgccagcgatcatgccaaccaactgtccattcacattcctggctggagttacagggcaggagattacacatgctgtgacttggttgtaaaaataaaggaatgtaagaagagtgaggaccccaccacacctgagccctccccagcagcaccctcgccagcaccccgcgatggagcagggagccctggcctgtccgaagactgttctgagtctcagcaaacgcctgcaagatctttgaccttgcaagaagcactggaagttcgtaagcctcagttcatttctcgctcacaagaacggctgaagaagcttgaacacatggtccagcagaggaaagcccagcggaaggaggacctgaggcagaagcagagcctccttcccatccgcaccagcaagaagcagttcacgattccccatcctctgagtgataacttgttcaaacccaaagaacggtgcatttcagagaaggagatgcatatgcgatctaagagaatctatgataacttgccggaagttaaaaagaaaaaagaagaacaaaggaaaagggtgatcttacaaagtaacagactccgtgccgaagtcttcaaaaagcaattactggaccagctccttcaaaggaatgcggtctaaccacaggctgccctgctgaccacactacctggacctgggaggacttcgaatgctggataagccattaaacttagcattatcttcatcatgggaaaacacttattttactttcgattttttttttccataaaggaaaacatcacttcctgaattactgacccaagccaaacagaaacaataaccctcgagaaaataggtcaacaatctgttgtggggaaaccacctccatgtaacccactggatacagtccccttaatgtttttgcttctaaattgtaccttttgcttctgatttcttctcccctgctgtttcctgcccatcagagaggcctgatacaagcaagtttgtttacatccctggggaatcttttacatcaaacttttgggatccaaatccatctccttttaaatttcaatctcagcacctgccagttatgcaaatgccaaaatgtgggtcatcatatagtatatttgaaacctttctgaacatgtacaccacccaatgctagaggctgacttggaaaccggtgggtgcaatgcccgaggctgtggaacaatcagcccatctctttgtgacctggagcagtcagagggccctcagtcaccccgccccattcctcaccagagaaaagaatccatttctatggaagctctgacgtaacttcagtgttttctacaatactcctcctgccccgccccattaaaacagttcttttgttaagaaatagcctaatggtccaactttgctgtctgttcttccaaatgtttataatacacattatttataaatatgtctgtttgggaagctaagaacaagctagtttttacaacacaaatggaaataaatgcaattattataaaaattcaa

SEQ ID NO: 5234 - DNA, 1012 bp, Homo sapiens
  source 1..1012: mol_type = unassigned DNA
gaggacagatgggagaggagcacggctgggggctgaggcccagccggcaaggagagcgtggagtcactgtgaaggaggggctgcggctgcagagacgctcaggatccagggatgggtctttgagcagtgaagaggagattacacatgctgtgacttggttgtaaaaataaaggaatgtaagaagagtgaggaccccaccacacctgagccctccccagcagcaccctcgccagcaccccgcgatggagcagggagccctggcctgtccgaagactgttctgagtctcagcaaacgcctgcaagatctttgaccttgcaagaagcactggaagttcgtaagcctcagttcatttctcgctcacaagaacggctgaagaagcttgaacacatggtccagcagaggaaagcccagcggaaggaggacctgaggcagaagcagagcctccttcccatccgcaccagcaagaagcagttcacgattccccatcctctgagtgataacttgttcaaacccaaagaacggtgcatttcagagaaggagatgcatatgcgatctaagagaatctatgataacttgccggaagttaaaaagaaaaaagaagaacaaaggaaaagggtgatcttacaaagtaacagactccgtgccgaagtcttcaaaaagcaattactggaccagctccttcaaaggaatgcggtctaaccacaggctgccctgctgaccacactacctggacctgggaggacttcgaatgctggataagccattaaacttagcattatcttcatcatgggaaaacacttattttactttcgattttttttttccataaaggaaaacatcacttcctgaattactgacccaagccaaacagaaacaataaccctcgagaaaataggtcaacaatctgttgtggggaaaccacctccatgtaacccactggatacagtccccttaatgtttttgcttctaaattgtaccttttgcttctgatttcttctcccctgctgtttc

SEQ ID NO: 5235 - DNA, 2995 bp, Homo sapiens
  source 1..2995: mol_type = unassigned DNA
gggaagatggccatgtgcaggtggaggcagagattagagaggggctgtcccaagccgagggacacagaggatgccagacaccacgggacactgagaagggcaaggaagggtcctcccctagggccttcagagggagcacggtcctgacacctggatttctggcctccagaactgggaaggagtaaatccctgttgtatccagctgctccctttgtagtcacttttcacagcagcgctgggaacgaacgcaggcaccaatccagcttgggggccatgtggggtagcagcggatcgggacttccttctaagagaagcgatcttgagccgtgtcacgggtgaggagttaggagttagctcagtggggaaaaggtgaaggcagcactcacggtcatcaagccagcccctgtgggaagcaggctgggtttaaggatttctaacctgggctccttgaactcccagggtccccctacatgtgtgcttcaattttgcaccttttcttggggagaaacgaatcccttgcatttgagttttggaggaccatgtggccttcacggtcacaaactggcaatgtcaagaaggtttggcaggaccggctgggagatgaggctggtggggtcaccagcttgattgtgaccttgctgacaccagcagggcagggaggtgaactgacgcaatggagcagagcctttgtctcaggagcaaaccagccttggctttcagttggatgttggaggattacgggacagctaccacagtagaagagatcaaattgcccttaaaaatctccagtctgatgtcacagaggcaaaatctgacttcaccaaggagaccctggcatcacaaaacacaaaaatgatttcatccatagtcatctcccagatgattgatgagaataagtcaagagaaaacagggcctccttgcccctaccgtgtgccattgctcagtctcgtgcacatcacgccaagcaatctctggctaaccgcagcggagtcaacattcacagagcatttgcgttacttccgggcagattaggaatcccggcaccgtcagatgagcgaggacctgaggcagagctgccgcccaaagaggagagaccctgtgggggcccccgcagagggtttgcatccatcaccatcacggccagacgcgtgggccccccagcccgcgccctggtgtgggggactgctggggactctctgtgccccaagtgcagggctgaggacacactgttccaggcgcccccggctctggccaatggcgcccatccaggtcggcatcagagatcttttgcctgcacagagttctccagaaacagctccgtggtgcggctgaaggttcccgaggcccacactgggttgtgtgagagacgcaagtactgggtcacccatgcagacgacaaagagaccagtttttctccagacaccccactgtcaggaaagagcccgctggtgttcagttcctgtgtccacctcagggtgtctcagcagtgtccagattcaatctattacgtagacaagtctctctccgtccccattgagccacctcaaattgccagccccaaaatgcacagatccgtcctgtcgctcaacctcaattgtagttcccacagattaacagcagatggagtagatggcctagtgaacagagagccaataagcgaagccctgaagcaggagctcctggagggagaccaggacctcgtaggccagcgctggaacccaggtttacaagaaagtcacttgaaggaaaccccatcgttgaggcgggtgcatttggggaccggcgcttgtccttggagtggttcttttccattggaaaacacagaattggcaaatgtgggagctaaccaagtcactgtaagaaaaggggaaaaggaccatacaactcattgtcacgccagcgatcatgccaaccaactgtccattcacattcctggctggagttacagggcagtacacacaaaagtattttctggaagcagcaagaggcaacaaggagaagtatgtatgactgtgtctgctcctccagtggaacagaagcccactagacatttccttcccattggggatagctctccaagcgatgactgtctgtctagagacctttctgagcccacagagagacgacatcaaagcttcctgaaacccagaatcctttttcctgggtttctttgccccttacaagatgtatgtgcatctctgcaggaagacaatggtgttcagatagaaagcaagttccccaaaggagattacacatgctgtgacttggttgtaaaaataaaggaatgtaagaagagtgaggaccccaccacacctgagccctccccagcagcaccctcgccagcaccccgcgatggagcagggagccctggcctgtccgaagactgttctgagtctcagcaaacgcctgcaagatctttgaccttgcaagaagcactggaagttcgtaagcctcagttcatttctcgctcacaagaacggctgaagaagcttgaacacatggtccagcagaggaaagcccagcggaaggaggacctgaggcagaagcagagcctccttcccatccgcaccagcaagaagcagttcacgattccccatcctctgagtgataacttgttcaaacccaaagaacggtgcatttcagagaaggagatgcatatgcgatctaagagaatctatgataacttgccggaagttaaaaagaaaaaagaagaacaaaggaaaagggtgatcttacaaagtaacagactccgtgccgaagtcttcaaaaaggtaatggcctcgtcaccagcaggtgtgatgtgtgtggtgcacagatgccgaatctcaacttgacatctttgtttcccttttcctctagcaattactggaccagctccttcaaaggaatgcggtctaaccacaggctgccctgctgaccacactacctggacctgggaggacttcgaatgctggataagccattaaacttagcattatcttcatcatgggaaaa

SEQ ID NO: 5236 - DNA, 2107 bp, Homo sapiens
  source 1..2107: mol_type = unassigned DNA
attctgagcctagccacagaggtaaactccggacatttttttctttcatgtcgccaaatacatccttgtcattaaaagacctttgaaactgagtaaaatggctttgaaacctcagtagaatatgctcaaactgtctggagaaggattacgggacagctaccacagtagaagagatcaaattgcccttaaaaatctccagtctgatgtcacagaggcaaaatctgacttcaccaaggagaccctggcatcacaaaacacaaaaatgatttcatccatagtcatctcccagatgattgatgagaataagtcaagagaaaacagggcctccttgcccctaccgtgtgccattgctcagtctcgtgcacatcacgccaagcaatctctggctaaccgcagcggagtcaacattcacagagcatttgcgttacttccgggcagattaggaatcccggcaccgtcagatgagcgaggacctgaggcagagctgccgcccaaagaggagagaccctgtgggggcccccgcagagggtttgcatccatcaccatcacggccagacgcgtgggccccccagcccgcgccctggtgtgggggactgctggggactctctgtgccccaagtgcagggctgaggacacactgttccaggcgcccccggctctggccaatggcgcccatccaggtcggcatcagagatcttttgcctgcacagagttctccagaaacagctccgtggtgcggctgaaggttcccgaggcccacactgggttgtgtgagagacgcaagtactgggtcacccatgcagacgacaaagagaccagtttttctccagacaccccactgtcaggaaagagcccgctggtgttcagttcctgtgtccacctcagggtgtctcagcagtgtccagattcaatctattacgtagacaagtctctctccgtccccattgagccacctcaaattgccagccccaaaatgcacagatccgtcctgtcgctcaacctcaattgtagttcccacagattaacagcagatggagtagatggcctagtgaacagagagccaataagcgaagccctgaagcaggagctcctggagggagaccaggacctcgtaggccagcgctggaacccaggtttacaagaaagtcacttgaaggaaaccccatcgttgaggcgggtgcatttggggaccggcgcttgtccttggagtggttcttttccattggaaaacacagaattggcaaatgtgggagctaaccaagtcactgtaagaaaaggggaaaaggaccatacaactcattgtcacgccagcgatcatgccaaccaactgtccattcacattcctggctggagttacagggcagtacacacaaaagtattttctggaagcagcaagaggcaacaaggagaagtatgtatgactgtgtctgctcctccagtggaacagaagcccactagacatttccttcccattggggatagctctccaagcgatgactgtctgtctagagacctttctgagcccacagagagacgacatcaaagcttcctgaaacccagaatcctttttcctgggtttctttgccccttacaagatgtatgtgcatctctgcaggaagacaatggtgttcagatagaaagcaagttccccaaaggagattacacatgctgtgacttggttgtaaaaataaaggaatgtaagaagagtgaggaccccaccacacctgagccctccccagcagcaccctcgccagcaccccgcgatggagcagggagccctggcctgtccgaagactgttctgagtctcagcaaacgcctgcaagatctttgaccttgcaagaagcactggaagttcgtaagcctcagttcatttctcgctcacaagaacggctgaagaagcttgaacacatggtccagcagaggaaagcccagcggaaggaggacctgaggcagaagcagagcctccttcccatccgcaccagcaagaagcagttcacgattccccatcctctgagtgataacttgttcaaacccaaagaacggtgcatttcagagaaggagatgcatatgcgatctaagagaatctatgataacttgccggaagtt

SEQ ID NO: 5237 - DNA, 2035 bp, Homo sapiens
  source 1..2035: mol_type = unassigned DNA
ctctcacacatgccctccctcgatggcccccagctcttgtaggacaagccctcatggcagagctagatggcaccctaggggccatacaggtgcgtgcactccttgcctcgcggatgaggaagatgagcccagaggaggagctgacatggctgagtggccaggtgggatctggagcctagtgtccttgccgtctggacccctcccagcatatcatgctgtgtcctactaaggctcccaaaatggggacaaacttttcatctttcagcttctcccagtgcaccttcttgctgcctaagccctgactctctgcttaggtttcaaaaaatgagacaactcatgagagaaaagaaaatggtcagatccgcaatgcatggaaaaatatctctttatgtgtgtcatctcctcaagactcccaacaaagcctatgccagcctctctcttacagaggaacaaacagaggccaggaggttacgtggctcgtccaaggctagacagcattaaaatgtggtggcaccaagagtcaacctggaccaggcgtcaaaactcaagctgttctacttttaccttctcctaatcatgtacagtgattattcatattgcaaactcgcagctttagtcttactggaggggtgacacctggattacgggacagctaccacagtagaagagatcaaattgcccttaaaaatctccagtctgatgtcacagaggcaaaatctgacttcaccaaggagaccctggcatcacaaaacacaaaaatgatttcatccatagtcatctcccagatgattgatgagaataagtcaagagaaaacagggcctccttgcccctaccgtgtgccattgctcagtctcgtgcacatcacgccaagcaatctctggctaaccgcagcggagtcaacattcacagagcatttgcgttacttccgggcagattaggaatcccggcaccgtcagatgagcgaggacctgaggcagagctgccgcccaaagaggagagaccctgtgggggcccccgcagagggtttgcatccatcaccatcacggccagacgcgtgggccccccagcccgcgccctggtgtgggggactgctggggactctctgtgccccaagtgcagggctgaggacacactgttccaggcgcccccggctctggccaatggcgcccatccaggtcggcatcagagatcttttgcctgcacagagttctccagaaacagctccgtggtgcggctgaaggttcccgaggcccacactgggttgtgtgagagacgcaagtactgggtcacccatgcagacgacaaagagaccagtttttctccagacaccccactgtcaggaaagagcccgctggtgttcagttcctgtgtccacctcagggtgtctcagcagtgtccagattcaatctattacgtagacaagtctctctccgtccccattgagccacctcaaattgccagccccaaaatgcacagatccgtcctgtcgctcaacctcaattgtagttcccacagattaacagcagatggagtagatggcctagtgaacagagagccaataagcgaagccctgaagcaggagctcctggagggagaccaggacctcgtaggccagcgctggaacccaggtttacaagaaagtcacttgaaggaaaccccatcgttgaggcgggtgcatttggggaccggcgcttgtccttggagtggttcttttccattggaaaacacagaattggcaaatgtgggagctaaccaagtcactgtaagaaaaggggaaaaggaccatacaactcattgtcacgccagcgatcatgccaaccaactgtccattcacattcctggctggagttacagggcagacttattacaagaaggacaacataagcagctatcaatgttccaaagataaatcccactttagtggttaaagagattgctcaagctaagcacttcgtcttccttattgatgatgattccagaaatacaccactgcattgttgtatgttaccccagttaaagcacatcctcattttt

SEQ ID NO: 5238 - DNA, 1025 bp, Homo sapiens
  source 1..1025: mol_type = unassigned DNA
cgcaggggtatgctgcccgctacacagaaacggccgtgcatcggactttccagataaaaacatttagtacagagttgaaaaaccatgtgatggtcatggattttgtgaagagtaactggtttccctcccagagaagagccaaagtttgtatcatccatatgtgtcaaggcttgaagacggctgagcagacagccagcagatatgagatccacagtcgactcttctcatcccccaaagatcattctgcctgggaaagaaatgaaagtctttccaatgcaggattacgggacagctaccacagtagaagagatcaaattgcccttaaaaatctccagtctgatgtcacagaggcaaaatctgacttcaccaaggagaccctggcatcacaaaacacaaaaatgatttcatccatagtcatctcccagatgattgatgagaataagtcaagagaaaacagggcctccttgcccctaccgtgtgccattgctcagtctcgtgcacatcacgccaagcaatctctggctaaccgcagcggagtcaacattcacagagcatttgcgttacttccgggcagattaggaatcccggcaccgtcagatgagcgaggacctgaggcagagctgccgcccaaagaggagagaccctgtgggggcccccgcagagggtttgcatccatcaccatcacggccagacgcgtgggccccccagcccgcgccctggtgtgggggactgctggggactctctgtgccccaagtgcagggctgaggacacactgttccaggcgcccccggctctggccaatggcgcccatccaggtcggcatcagagatcttttgcctgcacagagttctccagaaacagctccgtggtgcggctgaaggttcccgaggcccacactgggttgtgtgagagacgcaagtactgggtcacccatgcagacgacaaagagaccagtttttctccagacaccccactgtcaggaaagagcccgctggtgttcagttcctgtgtccacctcagggtg

SEQ ID NO: 5239 - DNA, 566 bp, Homo sapiens
  source 1..566: mol_type = unassigned DNA
aggctggaaggtggaagcctgactcattctgagcctagccacagaggtaaactccggacatttttttctttcatgtcgccaaatacatccttgtcattaaaagacctttgaaactgagtaaaatggctttgaaacctcagtagaatatgctcaaactgtctggagaaggattacgggacagctaccacagtagaagagatcaaattgcccttaaaaatctccagtctgatgtcacagaggcaaaatctgacttcaccaaggtttagagcttgtccctgggcgtgcgctagaaggctgccataagatgatgaaacactccagggactgccctgctgccctgtgactgtggctgccgagaccctggcatcacaaaacacaaaaatgatttcatccatagtcatctcccagatgattgatgagaataagtcaagagaaaacagggcctccttgcccctaccgtgtgccattgctcagtctcgtgcacatcacgccaagcaatctctggctaaccgcagcggagtcaacattcacagagcatttgcgttacttccgggcagattaggaat

SEQ ID NO: 5240 - DNA, 3076 bp, Homo sapiens
  source 1..3076: mol_type = unassigned DNA
attctgagcctagccacagaggtaaactccggacatttttttctttcatgtcgccaaatacatccttgtcattaaaagacctttgaaactgagtaaaatggctttgaaacctcagtagaatatgctcaaactgtctggagaaggattacgggacagctaccacagtagaagagatcaaattgcccttaaaaatctccagtctgatgtcacagaggcaaaatctgacttcaccaaggagaccctggcatcacaaaacacaaaaatgatttcatccatagtcatctcccagatgattgatgagaataagtcaagagaaaacagggcctccttgcccctaccgtgtgccattgctcagtctcgtgcacatcacgccaagcaatctctggctaaccgcagcggagtcaacattcacagagcatttgcgttacttccgggcagattaggaatcccggcaccgtcagatgagcgaggacctgaggcagagctgccgcccaaagaggagagaccctgtgggggcccccgcagagggtttgcatccatcaccatcacggccagacgcgtgggccccccagcccgcgccctggtgtgggggactgctggggactctctgtgccccaagtgcagggctgaggacacactgttccaggcgcccccggctctggccaatggcgcccatccaggtcggcatcagagatcttttgcctgcacagagttctccagaaacagctccgtggtgcggctgaaggttcccgaggcccacactgggttgtgtgagagacgcaagtactgggtcacccatgcagacgacaaagagaccagtttttctccagacaccccactgtcaggaaagagcccgctggtgttcagttcctgtgtccacctcagggtgtctcagcagtgtccagattcaatctattacgtagacaagtctctctccgtccccattgagccacctcaaattgccagccccaaaatgcacagatccgtcctgtcgctcaacctcaattgtagttcccacagattaacagcagatggagtagatggcctagtgaacagagagccaataagcgaagccctgaagcaggagctcctggagggagaccaggacctcgtaggccagcgctggaacccaggtttacaagaaagtcacttgaaggaaaccccatcgttgaggcgggtgcatttggggaccggcgcttgtccttggagtggttcttttccattggaaaacacagaattggcaaatgtgggagctaaccaagtcactgtaagaaaaggggaaaaggaccatacaactcattgtcacgccagcgatcatgccaaccaactgtccattcacattcctggctggagttacagggcagtacacacaaaagtattttctggaagcagcaagaggcaacaaggagaagtatgtatgactgtgtctgctcctccagtggaacagaagcccactagacatttccttcccattggggatagctctccaagcgatgactgtctgtctagagacctttctgagcccacagagagacgacatcaaagcttcctgaaacccagaatcctttttcctgggtttctttgccccttacaagatgtatgtgcatctctgcaggaagacaatggtgttcagatagaaagcaagttccccaaaggagattacacatgctgtgacttggttgtaaaaataaaggaatgtaagaagagtgaggaccccaccacacctgagccctccccagcagcaccctcgccagcaccccgcgatggagcagggagccctggcctgtccgaagactgttctgagtctcagcaaacgcctgcaagatctttgaccttgcaagaagcactggaagttcgtaagcctcagttcatttctcgctcacaagaacggctgaagaagcttgaacacatggtccagcagaggaaagcccagcggaaggaggacctgaggcagaagcagagcctccttcccatccgcaccagcaagaagcagttcacgattccccatcctctgagtgataacttgttcaaacccaaagaacggtgcatttcagagaaggagatgcatatgcgatctaagagaatctatgataacttgccggaagttaaaaagaaaaaagaagaacaaaggaaaagggtgatcttacaaagtaacagactccgtgccgaagtcttcaaaaagcaattactggaccagctccttcaaaggaatgcggtctaaccacaggctgccctgctgaccacactacctggacctgggaggacttcgaatgctggataagccattaaacttagcattatcttcatcatgggaaaacacttattttactttcgattttttttttccataaaggaaaacatcacttcctgaattactgacccaagccaaacagaaacaataaccctcgagaaaataggtcaacaatctgttgtggggaaaccacctccatgtaacccactggatacagtccccttaatgtttttgcttctaaattgtaccttttgcttctgatttcttctcccctgctgtttcctgcccatcagagaggcctgatacaagcaagtttgtttacatccctggggaatcttttacatcaaacttttgggatccaaatccatctccttttaaatttcaatctcagcacctgccagttatgcaaatgccaaaatgtgggtcatcatatagtatatttgaaacctttctgaacatgtacaccacccaatgctagaggctgacttggaaaccggtgggtgcaatgcccgaggctgtggaacaatcagcccatctctttgtgacctggagcagtcagagggccctcagtcaccccgccccattcctcaccagagaaaagaatccatttctatggaagctctgacgtaacttcagtgttttctacaatactcctcctgccccgccccattaaaacagttcttttgttaagaaatagcctaatggtccaactttgctgtctgttcttccaaatgtttataatacacattatttataaatatgtctgtttgggaagctaagaacaagctagtttttacaacacaaatggaaataaatgcaattatt

SEQ ID NO: 5241 - DNA, 5017 bp, Homo sapiens
  source 1..5017: mol_type = unassigned DNA
agcgagctagcggcgagcgcggcgagcaacggagaggagcgcgagcagcagcatggcggggctccgacgcccgcagcccggctgctactgccgcaccgcggcggccgtgaacctcctgctgggcgtcttccaggtcctgctgccctgctgtcgcccgggaggggctcagggacaagcgattgagccgttgccgaacgtggtggagctgtggcaggcagaagaaggggaactcctgctgcccactcagggtgattctgaagagggtctggaggagccttctcaagaacagagcttctcggacaaactatttagtggaaaaggcttacattttcagccatcagttttagattttggaatacagttcctgggacatcctgtagcaaagattctccatgcttacaaccctagtagggacagcgaggttgtggtgaattcagtgtttgcagctgctggacatttccatgtaccgccagttccctgcagggtaattccagcaatggggaaaacttccttcagaattattttcttacctactgaagaaggaagcattgaaagttccttatttattaatacctcttcgtatggagtcctttcctatcatgtatctggaattggcactcgtagaatctctacagaagggtctgcaaagcagctaccaaatgcttattttctgcttccaaaggtccagagcattcagctgtctcaaatgcaggcagaaaccactaatactagcctcttgcaggtgcaactggaatgcagtttacataataaagtgtgtcagcaattaaagggttgttatctggaatctgatgatgttttgcgtctacaaatgagcataatggtaacaatggaaaacttttcaaaagaatttgaagaaaacacacaacatttgttagatcatctctctattgtttacgtagctacagatgaatctgagacctcagatgattcagcagtaaatatgtatatattacattcaggaaacagccttatatggatacaggatatacgccatttctcacagagagatgctctgtctctgcagtttgaaccagtactactacctacttctacaacaaactttacaaaaattgcttcttttacctgcaaagctacatcatgtgacagtggaattatagaagatgtgaagaaaacaacacacactccaacactaaaagcatgcctcttctcttctgtggctcaggggtattttagaatggactcttctgcaacccagtttcacatagagactcatgagaacacatcaggactttggtcaatatggtaccgcaaccattttgaccgtagtgttgtattaaatgatgtgtttctttccaaggagaccaagcacatgttaaagattctgaatttcactggccctttatttctacctccaggctgttggaatatattttctttgaaacttgctgttaaagacattgccataaatctattcaccaatgtatttttgactacaaacataggtgccatttttgcaatacctctacagatttattcagcaccaaccaaggaagggagtctgggttttgaagtgatagcacattgtggcatgcattatttcatgggaaaatcaaaagcaggaaatcctaattggaatgggagcctttctctggatcaatctacctggaatgtggattctgaacttgcaaataaattgtatgaaagatggaagaaatataaaaatggtgacgtctgcaagaggaatgttttgggaacaactcgatttgctcacttgaagaaatccaaggagtcagagtcctttgttttctttttgcctcgtttgatcgcagagcctggcctcatgttaaacttcagcgcaactgcccttaggagcaggatgatcaagtactttgtggtgcagaacccgtcctcttggccggtctccttgcagctcctgcctctctccttgtaccctaaacccgaagccctagtgcacctgctccacagatggtttggcactgatatgcagatgattaatttcacaactggtgaattccagctcaccgaagcttgcccttacctgggtacgcattctgaggaatccaggtttggcatcctccacttacatctgcagcctttggaaatgaaaagggttggcgtagttttcacacctgctgactatggaaaagttacctcactcatactaatccggaataacttgactgttattgacatgattggcgtggaaggatttggagcaagagagttattaaaagtgggtggaagacttcctggtgcaggaggctcactccgatttaaggtgcccgagtccacgctgatggactgccgtagacaactgaaagacagtaagcaaattttatctattacaaagaactttaaagttgagaatattggacctcttcctataactgtttcgtctctgaaaattaatgggtataactgccaaggttatggattcgaggtgctggattgtcatcagttttccctggacccaaacacatcccgcgatatcagcattgtgttcactccagactttacctcctcctgggtaattcgggacctaagtcttgtaaccgcagcggacctagaatttcgcttcactctcaatgtgactctccctcatcacctgttgcccttgtgtgcagacgtggttccaggacccagctgggaggagtcattttggaggctcacggtcttctttgtcagtttgtccctgttgggtgtgattttaatagccttccaacaagcacagtacattctcatggaattcatgaaaacaagacagaggcaaaatgctagctcctcttcacagcaaaacaatggtcctatggatgtaatcagcccccattcttacaaaagcaattgcaagaactttctcgatacatatggcccctctgataaaggcagggggaagaactgccttccagtgaacactccccaaagcaggatccagaatgctgcaaagaggagcccagccacctatggtcattctcagaagaagcacaaatgctcagtgtattacagtaaacacaaaaccagcacagctgcggccagcagcaccagcacgactactgaggaaaaacagacttcacccctgggcagctcactgcctgctgctaaagaggacatttgcactgatgccatgcgtgagaactggatcagcctcagatatgcaagtggcataaatgtcaacctgcagaagaatttaacccttcccaaaaacttactgaataaagaagaaaacacactgaaaaacacaattgttttcagtaatccttcttcagaatgtagtatgaaggagggaatacagacatgtatgtttcctaaggaaactgacattaaaacttcagagaacacagccgagttcaaggaacgggagctctgtccactgaagacctccaagaaactacctgaaaaccatttaccaagaaactcacctcagtaccaccagccagacttgccagaaatttccaggaaaaataatgggaataaccagcaagtacctgtcaagaatgaagtagatcattgtgaaaatttgaagaaggtggacacaaagccttcttcagaaaagaagattcacaaaacatctagagaagacatgttttctgagaaacaggacatacctttcgtagagcaagaagatccttataggaagaaaaagcttcaggagaaaagagaaggaaatttacaaaatttaaattggagtaaaagtcgaacatgtagaaagaacaagaaaaggggtgttgctccagtctcaaggcctcctgaacagagtgatctaaagcttgtgtgcagtgactttgagaggtctgagctgagcagtgacatcaatgtaagaagctggtgtatacaggaaagcactagggaggtttgtaaagcagatgccgaaattgcaagcagtttacctgctgcccagagagaggcagaaggttactaccagaagcctgagaagaaatgtgtggacaagttctgctccgattccagctctgactgtgggagctcctctggcagcgtgcgtgccagccggggcagctgggggagctggagcagcaccagcagctccgacggggataagaagcccatggtggacgcccagcacttcctgccggccggagacagtgtttcacaaaatgattttccttctgaagctcccatctccttgaatctttctcataacatctgcaatcccatgaccgtgaatagtctcccacaatacgcagagccttcctgtcccagccttcctgccgggcccacaggtgttgaagaagataaaggtctttactcacctggagacctgtggcccactccgccagtgtgtgtgacaagcagcttaaactgcaccctggagaacggcgtgccttgtgtgattcaggagtcggccccggttcataatagtttcattgattggagtgcaacatgcgaaggccagttttccagcgcatactgtccattggaattgaacgattacaatgcctttccagaagaaaacatgaactatgccaatggcttcccctgtcctgcagatgttcagacagactttattgatcacaactctcagtctacctggaacaccccacccaacatgcctgctgcctggggacatgccagtttcatcagctctccgccctacctcacaagcacccgaagcttgtctccaatgtctggactttttggttccatctgggccccgcaaagcgatgtgtatgaaaattgctgccccatcaaccccaccacggaacattcgacccacatggaaaaccaagcggtcgtgtgcaaggaatactacccggggttcaacccgtttcgcgcctatatgaacctggacatatggactaccacagcgaataggaatgcaaatttcccactgtctagagactcgagttactgtgggaatgtgtgaaaataattggatttttaaacaatgtgaataaagaggcttgtgttttgattactagtgtaaactggttattgagatagattatgacattggtggatattttggcacttttatatgaaaataaattttttaatgaaa

SEQ ID NO: 5242 - DNA, 538 bp, Homo sapiens
  source 1..538: mol_type = unassigned DNA
cgagctagcggcgagcgcggcgagcaacggagaggagcgcgagcagcagcatggcggggctccgacgcccgcagcccggctgctactgccgcaccgcggcggccgtgaacctcctgctgggcgtcttccaggtcctgctgccctgctgtcgcccgggaggggctcagggacaagcgattgagccgttgccgaacgtggtggagctgtggcaggcagaagaaggggaactcctgctgcccactcagcttctcggacaaactatttagtggaaaaggcttacattttcagccatcagttttagattttggaatacagttcctgggacatcctgtagcaaagattctccatgcttacaaccctagtagggacagcgaggttgtggtgaattcagtgtttgcagctgctggacatttccatgtaccgccagttccctgcagggtaattccagcaatggggaaaacttccttcagaattattttcttacctactgaagaaggaagcattgaaagttccttatttattaatacctcttcgtatg

SEQ ID NO: 5243 - DNA, 5017 bp, Homo sapiens
  source 1..5017: mol_type = unassigned DNA
gagctagcggcgagcgcggcgagcaacggagaggagcgcgagcagcagcatggcggggctccgacgcccgcagcccggctgctactgccgcaccgcggcggccgtgaacctcctgctgggcgtcttccaggtcctgctgccctgctgtcgcccgggaggggctcagggacaagcgattgagccgttgccgaacgtggtggagctgtggcaggcagaagaaggggaactcctgctgcccactcagggtgattctgaagagggtctggaggagccttctcaagaacagagcttctcggacaaactatttagtggaaaaggcttacattttcagccatcagttttagattttggaatacagttcctgggacatcctgtagcaaagattctccatgcttacaaccctagtagggacagcgaggttgtggtgaattcagtgtttgcagctgctggacatttccatgtaccgccagttccctgcagggtaattccagcaatggggaaaacttccttcagaattattttcttacctactgaagaaggaagcattgaaagttccttatttattaatacctcttcgtatggagtcctttcctatcatgtatctggaattggcactcgtagaatctctacagaagggtctgcaaagcagctaccaaatgcttattttctgcttccaaaggtccagagcattcagctgtctcaaatgcaggcagaaaccactaatactagcctcttgcaggtgcaactggaatgcagtttacataataaagtgtgtcagcaattaaagggttgttatctggaatctgatgatgttttgcgtctacaaatgagcataatggtaacaatggaaaacttttcaaaagaatttgaagaaaacacacaacatttgttagatcatctctctattgtttacgtagctacagatgaatctgagacctcagatgattcagcagtaaatatgtatatattacattcaggaaacagccttatatggatacaggatatacgccatttctcacagagagatgctctgtctctgcagtttgaaccagtactactacctacttctacaacaaactttacaaaaattgcttcttttacctgcaaagcagctacatcatgtgacagtggaattatagaagatgtgaagaaaacaacacacactccaacactaaaagcatgcctcttctcttctgtggctcaggggtattttagaatggactcttctgcaacccagtttcacatagagactcatgagaacacatcaggactttggtcaatatggtaccgcaaccattttgaccgtagtgttgtattaaatgatgtgtttctttccaaggagaccaagcacatgttaaagattctgaatttcactggccctttatttctacctccaggctgttggaatatattttctttgaaacttgctgttaaagacattgccataaatctattcaccaatgtatttttgactacaaacataggtgccatttttgcaatacctctacagatttattcagcaccaaccaaggaagggagtctgggttttgaagtgatagcacattgtggcatgcattatttcatgggaaaatcaaaagcaggaaatcctaattggaatgggagcctttctctggatcaatctacctggaatgtggattctgaacttgcaaataaattgtatgaaagatggaagaaatataaaaatggtgacgtctgcaagaggaatgttttgggaacaactcgatttgctcacttgaagaaatccaaggagtcagagtcctttgttttctttttgcctcgtttgatcgcagagcctggcctcatgttaaacttcagcgcaactgcccttaggagcaggatgatcaagtactttgtggtgcagaacccgtcctcttggccggtctccttgcagctcctgcctctctccttgtaccctaaacccgaagccctagtgcacctgctccacagatggtttggcactgatatgcagatgattaatttcacaactggtgaattccagctcaccgaagcttgcccttacctgggtacgcattctgaggaatccaggtttggcatcctccacttacatctgcagcctttggaaatgaaaagggttggcgtagttttcacacctgctgactatggaaaagttacctcactcatactaatccggaataacttgactgttattgacatgattggcgtggaaggatttggagcaagagagttattaaaagtgggtggaagacttcctggtgcaggaggctcactccgatttaaggtgcccgagtccacgctgatggactgccgtagacaactgaaagacagtaagcaaattttatctattacaaagaactttaaagttgagaatattggacctcttcctataactgtttcgtctctgaaaattaatgggtataactgccaaggttatggattcgaggtgctggattgtcatcagttttccctggacccaaacacatcccgcgatatcagcattgtgttcactccagactttacctcctcctgggtaattcgggacctaagtcttgtaaccgcagcggacctagaatttcgcttcactctcaatgtgactctccctcatcacctgttgcccttgtgtgcagacgtggttccaggacccagctgggaggagtcattttggaggctcacggtcttctttgtcagtttgtccctgttgggtgtgattttaatagccttccaacaagcacagtacattctcatggaattcatgaaaacaagacagaggcaaaatgctagctcctcttcacagcaaaacaatggtcctatggatgtaatcagcccccattcttacaaaagcaattgcaagaactttctcgatacatatggcccctctgataaaggcagggggaagaactgccttccagtgaacactccccaaagcaggatccagaatgctgcaaagaggagcccagccacctatggtcattctcagaagaagcacaaatgctcagtgtattacagtaaacacaaaaccagcacagctgcggccagcagcaccagcacgactactgaggaaaaacagacttcacccctgggcagctcactgcctgctgctaaagaggacatttgcactgatgccatgcgtgagaactggatcagcctcagatatgcaagtggcataaatgtcaacctgcagaagaatttaacccttcccaaaaacttactgaataaagaagaaaacacactgaaaaacacaattgttttcagtaatccttcttcagaatgtagtatgaaggagggaatacagacatgtatgtttcctaaggaaactgacattaaaacttcagagaacacagccgagttcaaggaacgggagctctgtccactgaagacctccaagaaactacctgaaaaccatttaccaagaaactcacctcagtaccaccagccagacttgccagaaatttccaggaaaaataatgggaataaccagcaagtacctgtcaagaatgaagtagatcattgtgaaaatttgaagaaggtggacacaaagccttcttcagaaaagaagattcacaaaacatctagagaagacatgttttctgagaaacaggacatacctttcgtagagcaagaagatccttataggaagaaaaagcttcaggagaaaagagaaggaaatttacaaaatttaaattggagtaaaagtcgaacatgtagaaagaacaagaaaaggggtgttgctccagtctcaaggcctcctgaacagagtgatctaaagcttgtgtgcagtgactttgagaggtctgagctgagcagtgacatcaatgtaagaagctggtgtatacaggaaagcactagggaggtttgtaaagcagatgccgaaattgcaagcagtttacctgctgcccagagagaggcagaaggttactaccagaagcctgagaagaaatgtgtggacaagttctgctccgattccagctctgactgtgggagctcctctggcagcgtgcgtgccagccggggcagctgggggagctggagcagcaccagcagctccgacggggataagaagcccatggtggacgcccagcacttcctgccggccggagacagtgtttcacaaaatgattttccttctgaagctcccatctccttgaatctttctcataacatctgcaatcccatgaccgtgaatagtctcccacaatacgcagagccttcctgtcccagccttcctgccgggcccacaggtgttgaagaagataaaggtctttactcacctggagacctgtggcccactccgccagtgtgtgtgacaagcagcttaaactgcaccctggagaacggcgtgccttgtgtgattcaggagtcggccccggttcataatagtttcattgattggagtgcaacatgcgaaggccagttttccagcgcatactgtccattggaattgaacgattacaatgcctttccagaagaaaacatgaactatgccaatggcttcccctgtcctgcagatgttcagacagactttattgatcacaactctcagtctacctggaacaccccacccaacatgcctgctgcctggggacatgccagtttcatcagctctccgccctacctcacaagcacccgaagcttgtctccaatgtctggactttttggttccatctgggccccgcaaagcgatgtgtatgaaaattgctgccccatcaaccccaccacggaacattcgacccacatggaaaaccaagcggtcgtgtgcaaggaatactacccggggttcaacccgtttcgcgcctatatgaacctggacatatggactaccacagcgaataggaatgcaaatttcccactgtctagagactcgagttactgtgggaatgtgtgaaaataattggatttttaaacaatgtgaataaagaggcttgtgttttgattactagtgtaaactggttattgagatagattatgacattggtggatattttggcacttttatatgaaaataaattttttaatgaaa

SEQ ID NO: 5244 - DNA, 806 bp, Homo sapiens
  source 1..806: mol_type = unassigned DNA; mol_type = unassigned DNA
atttaattttaattgtgggaagaaaggcagatacaagcccactgctctgaggttcctgggacatcctgtagcaaagattctccatgcttacaaccctagtagggacagcgaggttgtggtgaattcagtgtttgcagctgctggacatttccatgtaccgccagttccctgcagggtaattccagcaatggggaaaacttccttcagaattattttcttacctactgaagaaggaagcattgaaagttccttatttattaatacctcttcgtatggagtcctttcctatcatgtatctggaattggcactcgtagaatctctacagaagggtctgcaaagcagctaccaaatgcttattttctgcttccaaaggtccagagcattcagctgtctcaaatgcaggtcattttaatagatttactttgaatgctggtggccaccaaactttgtaaccttctcagaattggttattttactattttctgctttttgaaaaaattatatagaagtaatatacatatataaaatatcagtggattccacctaacttctttttaatggctgtggagttcacagtgttgatattccagagtttgcttaatcttattgttggtcttttgaaatgtttcctgtttttcactgttattaccgttaggccatatacctattttataagtttctttaattttccttctgaatcctctgtttccttggggcatgtttcataaagaggagagattctttagttaaagactgtgaacgattttgtagagcttgttaaatcttaccagcttgcttttcaggg

SEQ ID NO: 5245 - DNA, 4299 bp, Homo sapiens
  source 1..4299: mol_type = unassigned DNA; mol_type = unassigned DNA
ccagttccctgcagggtaattccagcaatggggaaaacttccttcagaattattttcttacctactgaagaaggaagcattgaaagttccttatttattaatacctcttcgtatggagtcctttcctatcatgtatctggaattggcactcgtagaatctctacagaagggtctgcaaagcagctaccaaatgcttattttctgcttccaaaggtccagagcattcagctgtctcaaatgcaggcagaaaccactaatactagcctcttgcaggtgcaactggaatgcagtttacataataaagtgtgtcagcaattaaagggttgttatctggaatctgatgatgttttgcgtctacaaatgagcataatggtaacaatggaaaacttttcaaaagaatttgaagaaaacacacaacatttgttagatcatctctctattgtttacgtagctacagatgaatctgagacctcagatgattcagcagtaaatatgtatatattacattcaggaaacagccttatatggatacaggatatacgccatttctcacagagagatgctctgtctctgcagtttgaaccagtactactacctacttctacaacaaactttacaaaaattgcttcttttacctgcaaagcagctacatcatgtgacagtggaattatagaagatgtgaagaaaacaacacacactccaacactaaaagcatgcctcttctcttctgtggctcaggggtattttagaatggactcttctgcaacccagtttcacatagagactcatgagaacacatcaggactttggtcaatatggtaccgcaaccattttgaccgtagtgttgtattaaatgatgtgtttctttccaaggagaccaagcacatgttaaagattctgaatttcactggccctttatttctacctccaggctgttggaatatattttctttgaaacttgctgttaaagacattgccataaatctattcaccaatgtatttttgactacaaacataggtgccatttttgcaatacctctacagatttattcagcaccaaccaaggaagggagtctgggttttgaagtgatagcacattgtggcatgcattatttcatgggaaaatcaaaagcaggaaatcctaattggaatgggagcctttctctggatcaatctacctggaatgtggattctgaacttgcaaataaattgtatgaaagatggaagaaatataaaaatggtgacgtctgcaagtttggcactgatatgcagatgattaatttcacaactggtgaattccagctcaccgaagcttgcccttacctgggtacgcattctgaggaatccaggtttggcatcctccacttacatctgcagcctttggaaatgaaaagggttggcgtagttttcacacctgctgactatggaaaagttacctcactcatactaatccggaataacttgactgttattgacatgattggcgtggaaggatttggagcaagagagttattaaaagtgggtggaagacttcctggtgcaggaggctcactccgatttaaggtgcccgagtccacgctgatggactgccgtagacaactgaaagacagtaagcaaattttatctattacaaagaactttaaagttgagaatattggacctcttcctataactgtttcgtctctgaaaattaatgggtataactgccaaggttatggattcgaggtgctggattgtcatcagttttccctggacccaaacacatcccgcgatatcagcattgtgttcactccagactttacctcctcctgggtaattcgggacctaagtcttgtaaccgcagcggacctagaatttcgcttcactctcaatgtgactctccctcatcacctgttgcccttgtgtgcagacgtggttccaggacccagctgggaggagtcattttggaggctcacggtcttctttgtcagtttgtccctgttgggtgtgattttaatagccttccaacaagcacagtacattctcatggaattcatgaaaacaagacagaggcaaaatgctagctcctcttcacagcaaaacaatggtcctatggatgtaatcagcccccattcttacaaaagcaattgcaagaactttctcgatacatatggcccctctgataaaggcagggggaagaactgccttccagtgaacactccccaaagcaggatccagaatgctgcaaagaggagcccagccacctatggtcattctcagaagaagcacaaatgctcagtgtattacagtaaacacaaaaccagcacagctgcggccagcagcaccagcacgactactgaggaaaaacagacttcacccctgggcagctcactgcctgctgctaaagaggacatttgcactgatgccatgcgtgagaactggatcagcctcagatatgcaagtggcataaatgtcaacctgcagaagaatttaacccttcccaaaaacttactgaataaagaagaaaacacactgaaaaacacaattgttttcagtaatccttcttcagaatgtagtatgaaggagggaatacagacatgtatgtttcctaaggaaactgacattaaaacttcagagaacacagccgagttcaaggaacgggagctctgtccactgaagacctccaagaaactacctgaaaaccatttaccaagaaactcacctcagtaccaccagccagacttgccagaaatttccaggaaaaataatgggaataaccagcaagtacctgtcaagaatgaagtagatcattgtgaaaatttgaagaaggtggacacaaagccttcttcagaaaagaagattcacaaaacatctagagaagacatgttttctgagaaacaggacatacctttcgtagagcaagaagatccttataggaagaaaaagcttcaggagaaaagagaaggaaatttacaaaatttaaattggagtaaaagtcgaacatgtagaaagaacaagaaaaggggtgttgctccagtctcaaggcctcctgaacagagtgatctaaagcttgtgtgcagtgactttgagaggtctgagctgagcagtgacatcaatgtaagaagctggtgtatacaggaaagcactagggaggtttgtaaagcagatgccgaaattgcaagcagtttacctgctgcccagagagaggcagaaggttactaccagaagcctgagaagaaatgtgtggacaagttctgctccgattccagctctgactgtgggagctcctctggcagcgtgcgtgccagccggggcagctgggggagctggagcagcaccagcagctccgacggggataagaagcccatggtggacgcccagcacttcctgccggccggagacagtgtttcacaaaatgattttccttctgaagctcccatctccttgaatctttctcataacatctgcaatcccatgaccgtgaatagtctcccacaatacgcagagccttcctgtcccagccttcctgccgggcccacaggtgttgaagaagataaaggtctttactcacctggagacctgtggcccactccgccagtgtgtgtgacaagcagcttaaactgcaccctggagaacggcgtgccttgtgtgattcaggagtcggccccggttcataatagtttcattgattggagtgcaacatgcgaaggccagttttccagcgcatactgtccattggaattgaacgattacaatgcctttccagaagaaaacatgaactatgccaatggcttcccctgtcctgcagatgttcagacagactttattgatcacaactctcagtctacctggaacaccccacccaacatgcctgctgcctggggacatgccagtttcatcagctctccgccctacctcacaagcacccgaagcttgtctccaatgtctggactttttggttccatctgggccccgcaaagcgatgtgtatgaaaattgctgccccatcaaccccaccacggaacattcgacccacatggaaaaccaagcggtcgtgtgcaaggaatactacccggggttcaacccgtttcgcgcctatatgaacctggacatatggactaccacagcgaataggaatgcaaatttcccactgtctagagactcgagttactgtgggaatgtgtgaaaataattggatttttaaacaatgtgaataaagaggcttgtgttttgattactagtgtaaactggttattgagatagattatgacattggtggatattttggcacttttatatgaaaataaattttttaatgaaa

SEQ ID NO: 5246 - DNA, 567 bp, Homo sapiens
  source 1..567: mol_type = unassigned DNA; mol_type = unassigned DNA
cacatgggacttttcttttatttcaggatatacgccatttctcacagagagatgctctgtctctgcagtttgaaccagtactactacctacttctacaacaaactttacaaaaattgcttcttttacctgcaaagcagctacatcatgtgacagtggaattatagaagatgtgaagaaaacaacacacactccaacactaaaagcatgcctcttctcttctgtggctcaggggtattttagaatggactcttctgcaacccagtttcacatagagactcatgagaacacatcaggactttggtcaatatggtaccgcaaccattttgaccgtagtgttgtattaaatgatgtgtttctttccaaggagaccaagcacatgttaaagattctgaatttcactggccctttatttctacctccaggctgttggaatatattttctttgaaacttgctgttaaagacattgccataaatctattcaccaatgtatttttgactacaaacataggtgccatttttgcaatacctctacagatttattcagcaccaaccaaggtattttcta

SEQ ID NO: 5247 - DNA, 882 bp, Homo sapiens
  source 1..882: mol_type = unassigned DNA; mol_type = unassigned DNA
gttatatcctagaacagaatctataattgttctagaaattaggtagaaatcattctttgagcttatgttggatttttttcgcattttagtaatgtagatcatggtttggtttattcaataaatatcgatccaataaattattttaaataaattttatagttcacatatactaaatatctttttttggttcccattagaactgaaagacagtaagcaaattttatctattacaaagaactttaaagttgagaatattggacctcttcctataactgtttcgtctctgaaaattaatgggtataactgccaaggttatggattcgaggtgctggattgtcatcagttttccctggacccaaacacatcccgcgatatcagcattgtgttcactccagactttacctcctcctgggtaattcgggacctaagtcttgtaaccgcagcggacctagaatttcgcttcactctcaatgtgactctccctcatcacctgttgcccttgtgtgcagacgtggttccaggacccagctgggaggagtcattttggaggctcacggtcttctttgtcagtttgtccctgttgggtgtgattttaatagccttccaacaagcacagtacattctcatggaattcatgaaaacaagacagaggcaaaatgctagctcctcttcacagcaaaacaatggtcctatggatgtaatcagcccccattcttacaagtaagaattcttatagtgtggttgggagcgggggcggtttctcacttttgatattactcatttctgatttaattttaagtaaacataaattttgattctacatttgctttcataaaattttaagtcattatgtgaacagctgccccattattattatgagat

SEQ ID NO: 5248 - DNA, 734 bp, Homo sapiens
  source 1..734: mol_type = unassigned DNA; mol_type = unassigned DNA
tggcatgctacactttgtttgttgtttgtctttgctcacttgaatgtagcttgttcactgctgtatcctcagtatctttaatggggccttgcagaaagtagttcctcaaatatttgttatgtgagtctcatcttgtcatccaggtcaagagacaatcggacactgtctgaagaaacggtcaaaacaatatgctgtatttcagaattatatcctgaaattatattccgaaaggagttagtcagcatgtgtgggtgacattagggagtgttttctggagggaagggcaggtgcaggaagggtaggatgagggccaggtgaggatagggtggactcaggccttgttctcttccgtaggtctttactcacctggagacctgtggcccactccgccagtgtgtgtgacaagcagcttaaactgcaccctggagaacggcgtgccttgtgtgattcaggagtcggccccggttcataatagagacagagtcttgctctgtcgcccaggctggagcgcagtggtgcaattatagctcactgcagccttgaactcctgggttcaagcggttctcctgcctcagcctctcaagtaactgggactacagtttcattgattggagtgcaacatgcgaaggccagttttccagcgcatactgtccattggaattgaacgattacaatgcctttccagaaggtaagggctcttcagacaatcccaacgccattattttattcttaga

SEQ ID NO: 5249 - DNA, 5298 bp, Homo sapiens
  source 1..5298: mol_type = unassigned DNA; mol_type = unassigned DNA
cccagctcggcgctcgcccgggcttccccgggctgcagagcgcgcctgagtgccgccgcccgccgggcatggggagccgcttcctgggcggctgcggcagcggaggaggatgctctgggctaggcgagcactcaaaaagagtgaatgaaatgtgcagctcagagtgtcatttctgaagggaggagtctttctcttggagaagagtcctcaatgagcctggccgaggcccgggatctgtgtgaagtggactaaggattaagtaggatgtcaactgagacagaacttcaagtagctgtgaaaaccagcgccaagaaagactccagaaagaaaggtcaggatcgcagtgaagccactttgataaagaggtttaaaggtgaaggggtccggtacaaagccaaattgatcgggattgatgaagtttccgcagctcggggagacaagttatgtcaagattccatgatgaaactcaagggcgttgttgctggcgctcgttccaaaggagaacacaaacagaaaatctttttaaccatctcctttggaggaatcaaaatctttgatgagaagacaggggcccttcagcatcatcatgctgttcatgaaatatcctacattgcaaaggacattacagatcaccgggcctttggatatgtttgtgggaaggaagggaatcacagatttgtggccataaaaacagcccaggcggctgaacctgttattctggacttgagagatctctttcaactcatttatgaattgaagcaaagagaagaattagaaaaaaaggcacaaaaggataagcagtgtgaacaagctgtgtaccagacaatattggaagaggatgttgaagatcctgtgtaccagtacattgtgtttgaggctggacacgagccaatccgtgatcccgaaacggaagaaaacatttatcaggttcccaccagccaaaagaaggaaggtgtttatgatgtgccaaaaagtcaacctgtaagtgctgtgacccaattagaactttttggggacatgtccacaccccctgatataacctctccccccactcctgcaactccaggtgatgcctttatcccatcttcatctcagacccttccagcgagtgcagatgtgtttagttctgtacctttcggcactgctgctgtaccctcaggttacgttgcaatgggcgctgtcctcccgtccttctggggtcagcagcccctcgtccaacagcagatggtcatgggtgcccagccaccagtcgctcaggtgatgccgggggctcagcccatcgcatggggccagccgggtctctttcctgccactcagcagccctggccaactgtggccgggcagtttccgccagccgccttcatgcccacacaaactgttatgcctttgccagctgccatgttccaaggtcccctcaccccccttgccaccgtcccaggcacgagtgactccaccaggtcaagtccacagaccgacaagcccaggcagaaaatgggcaaagaaacgtttaaggatttccagatggcccagcctccgcccgtgccctcccgcaaacccgaccagccctccctcacctgtacctcagaggccttctccagttacttcaacaaagtcggggtggcacaggatacagacgactgtgatgactttgacatctcccagttgaatttgacccctgtgacttctaccacaccatcgaccaactcacctccaaccccagcccctagacagagctctccatccaaatcatctgcatcccatgccagtgatcctaccacagatgacatctttgaagagggctttgaaagtcccagcaaaagcgaagagcaagaagctcctgatggatcacaggcctcatccaacagtgatccatttggtgagcccagtggggagcccagtggtgataatataagtccacaggccggtagctagatagcgcaggtctgggagccagagcctctgtacgcgcagatcaacagacctaagaaatagcatcgatgcgagctcgtggtgggtgctcaagactggcatggacatcagcatcacgacaggctctcttgtattctttcacctcttcccacaagaaattcatgattgcccaatggaactcgctcagaagagggaactaagcatttttggcaaccaatggcagatatctatggcagcacacaaaaaaagtatagaaagatccacccaacattaaatcagaaatcaagcaaatgcttacccaacaaatatttgagccctcatagctgggtttaagatgactcagtgtgcaaaattattaattccctttttatttctctacctgttgaccactgttgagacaccaaatttggagtgacaggcatcagaggattacaacagggttggaactgacttctttaagcaaaagcaaagggtcttctgtgaccacaatatcgtcatccatatgccttttcacataggatgatgtgttttttgtcactccatggggcctggtctgccattttcccccctttcctttttttgtcatgtttgaaaattaataggtgtacaaatttttgtattgcttttgactttttttagatatgggtgaagaaatctaactggggagaaaaaaagcctcagtgaaatgaattaacttgaaattacaagacaaataagtggttgattattcattatgatcacgaatgttgccaaaacagtcctttagctattctgcatcctggtgaagaaagacagctttcagtacgaaccttcattctgtgagtaggaaaagacatcagatcccattgatgagaaagatgaaaaatgcatctgatttcttaagaagctctaaactctaagtacaataaaatgatattttttatttttccgatatcttgctgctgtgttgctatgcagacaagtgtcttctccacgtgccattttcaaagaaaagtcatttgccaaataattctggtacaattctggtaatgtggttttggatcttaaaaaccaactttctaatggaacaatggtggcataaatattcagaataacaaactgattctgtggtccaaatggttcatctctatctctttttgtacatcagaaaattcaaatgggatttttattttataacttgaaaaaaaaaccttaccattaaactctttaaatatttaagggaaatggctttaaggagttctaatgaaaaaaaattgtcttttttttgtaaatataaatgttaatgaaaatgatttttaataatgccattacactgtagagaaggtagcagattgagtgcaaggtgtgacaaacttgatggatggggctcactttccagacgttattctggagcatatggtaggaagctggagtgcagggacagctggcaggagcagttggccaatcagcagctagtgaacgggaagggagcacgtgactccatcatctagcctttccacgagagtccccaccctacgtgcaacacaagaaaaagacaattcacattctgaagaattcagattctgaaactctcccacctccccactcccacctacccccgatataaatcactggactgtttgtacgtgaaacagaagaggctaagcttcctttttttacacttatgagacaaaaagtgcagtgtttggttcgtatgtttagcacatgattttcataaagaatctatatatttttgccctacagagaattgttatacaggtcaagtgtgttttcctgatgttcctatgcagttacagtatgttgaaagtgttttaacactaagaagaaaactttaaagattcatgtgattaattggatttgaggataattattattatttggtttttagatttgaaaagtagaatttccattgagacaattgatttgaataggcctgcatttgattcttcatatcaatagaaactaaaatgatttgggagattcatttgaaaaatgattgtatacttgttcacaaagcgaaaagtgatacatgaaggtaatggttatcatttaaagcccacattttacactatcaggtcacaggagtctaatttttttttcagttagataaactgaccaaacgtctattcaagaatatatgtcaatatcatcctaatgtggaaggtccgaagaaccagaaaagtgagaagggccgtttacctccctctgtagctatcacctgttggtccacagagtttcttgagaaatgagcaaacattttatgattaggtaaccctttcacatgaacgggaagatgggaaaggtggaatgaccataagagttggcctgagaccagtttgttttctggggatttggtaagataggcagttcccatgggaaattgcttaaattgctttgttgcctatgatttgattctaaacaagtggtgctatcttctccctcaatatggctgtcttgagtttgtcttgcagtatcacaccattataccaattctttgggttgcttctgacacattcaaagtgaactctggctgatgttgctgtttcaggtataccatctggagttaatttcctagcagaaggtgaaagtccaggagaattgtcctctttcattgaacatgattgaaaatgtaactggctctgaacttcaagaagatagatgcccaagtgatgcattaaagtaagggaaataaagtcaagtttttcaactgccatccatattctcattggcagaattctgatttttttccaagcactgtttggtgagcctggaagcaccgtatcctgtcccaggagtacagtgaaatttccaagcaagagctgaggtgccaataccaaaagaccatggggagtctgcacggttctggttagatcaatagaaaatccatgtgtacaactgttaattcctcatcctccactagcactaaatttgtcactttaaattttgaaaccagggaaacaccacctgtcattctgtccccattctccatagctcttcaatctttacatgccgcaagacttttttgatagctcgtactcatcccagtgtctcctgaaaccccatcatgtaatgtactgggcaccttcttttaaacaaatgtttactctgtgggtttggttcatttcaatttctgcgttctgacacatatttttttaataaagatgagaaagagaaaatgactgttgcagtacctttctagacctactttaactttacctcagatgacagtttgttaacatatatggacacattatttttaactttatgtacaatgcattcaacagaacagcaaaatttttagaaattttccattaatttctgtaacacaccatgtaaaactgttacaaataaacatgtttgagaacaaca

SEQ ID NO: 5250 - DNA, 2668 bp, Homo sapiens
  source 1..2668: mol_type = unassigned DNA; mol_type = unassigned DNA
tctgcggtgtcaccgctttcgcttctgcttgatatatgtttaatagaccatacagcagaaaattggaggccgaagctgacaaaattggactactgcttgctgcaaaggcttgtgcagacataagagccagttcagtgttttggcagcaaatggagttcgttgatagcctgcatggccaacccaagatgccagaatggttatctacacacccttctcatggcaatcgagttgagtacttggatagacttatacctcagatttggtgagtcttgaatgcccctgaaaaccattctgctccatttcaaaagtacttcccagtcttcgtattttacctaaatgcaaattcactgccttggagagtgtgagtccaagaagaaatcctttgggctatttccttggcttctctccatgacgattcctgactcgtggccccggcaatcttgggaagacatcatccagcttcttcagtccagaccctgggcaccccccttttgccaggatcgtccccacccagcctggacacattgactgaactgttttctaggacactgcactcagcaagacatggtggtgagccctgactctcagtcttcatgattgaagaactcttttgtacaacacaaagcactcaaaaagagtgaatgaaatgtgcagctcagagtgtcatttctgaagggaggagtctttctcttggagaagagtcctcaatgagcctggccgaggcccgggatctgtgtgaagtggactaaggattaagtaggatgtcaactgagacagaacttcaagtagctgtgaaaaccagcgccaagaaagactccagaaagaaaggtcaggatcgcagtgaagccactttgataaagaggtttaaaggtgaaggggtccggtacaaagccaaattgatcgggattgatgaagtttccgcagctcggggagacaagttatgtcaagattccatgatgaaactcaagggcgttgttgctggcgctcgttccaaaggagaacacaaacagaaaatctttttaaccatctcctttggaggaatcaaaatctttgatgagaagacaggggcccttcagcatcatcatgctgttcatgaaatatcctacattgcaaaggacattacagatcaccgggcctttggatatgtttgtgggaaggaagggaatcacagatttgtggccataaaaacagcccaggcggctgaacctgttattctggacttgagagatctctttcaactcatttatgaattgaagcaaagagaagaattagaaaaaaaggcacaaaaggataagcagtgtgaacaagctgtgtaccagacaatattggaagaggatgttgaagatcctgtgtaccagtacattgtgtttgaggctggacacgagccaatccgtgatcccgaaacggaagaaaacatttatcaggttcccaccagccaaaagaaggaaggtgtttatgatgtgccaaaaagtcaacctgctgtgacccaattagaactttttggggacatgtccacaccccctgatataacctctccccccactcctgcaactccaggtgatgcctttatcccatcttcatctcagacccttccagcgagtgcagatgtgtttagttctgtacctttcggcactgctgctgtaccctcaggttacgttgcaatgggcgctgtcctcccgtccttctggggtcagcagcccctcgtccaacagcagatggtcatgggtgcccagccaccagtcgctcaggtgatgccgggggctcagcccatcgcatggggccagccgggtctctttcctgccactcagcagccctggccaactgtggccgggcagtttccgccagccgccttcatgcccacacaaactgttatgcctttgccagctgccatgttccaaggtcccctcaccccccttgccaccgtcccaggcacgagtgactccaccaggtcaagtccacagaccgacaagcccaggcagaaaatgggcaaagaaacgtttaaggatttccagatggcccagcctccgcccgtgccctcccgcaaacccgaccagccctccctcacctgtacctcagaggccttctccagttacttcaacaaagtcggggtggcacaggatacagacgactgtgatgactttgacatctcccagttgaatttgacccctgtgacttctaccacaccatcgaccaactcacctccaaccccagcccctagacagagctctccatccaaatcatctgcatcccatgccagtgatcctaccacagatgacatctttgaagagggctttgaaagtcccagcaaaagcgaagagcaagaagctcctgatggatcacaggcctcatccaacagtgatccatttggtgagcccagtggggagcccagtggtgataatataagtccacaggccggtagctagatagcgcaggtctgggagccagagcctctgtacgcgcagatcaacagacctaagaaatagcatcgatgcgagctcgtggtgggtgctcaagactggcatggacatcagcatcacgacaggctctcttgtattctttcacctcttcccacaagaaattcatgattgcccaatggaactcgctcagaagagggaactaagcatttttggcaaccaatggcagatatctatggcagcacacaaaaaaa

SEQ ID NO: 5251 - DNA, 1802 bp, Homo sapiens
  source 1..1802: mol_type = unassigned DNA; mol_type = unassigned DNA
gggatctgtgtgaagtggactaaggattaagtaggatgtcaactgagacagaacttcaagtagctgtgaaaaccagcgccaagaaagactccagaaagaaaggtcaggatcgcagtgaagccactttgataaagaggtttaaaggtgaaggggtccggtacaaagccaaattgatcgggattgatgaagtttccgcagctcggggagacaagttatgtcaagattccatgatgaaactcaagggcgttgttgctggcgctcgttccaaaggagaacacaaacagaaaatctttttaaccatctcctttggaggaatcaaaatctttgatgagaagacaggggcccttcagcatcatcatgctgttcatgaaatatcctacattgcaaaggacattacagatcaccgggcctttggatatgtttgtgggaaggaagggaatcacagatttgtggccataaaaacagcccaggcggctgaacctgttattctggacttgagagatctctttcaactcatttatgaattgaagcaaagagaagaattagaaaaaaaggcacaaaaggataagcagtgtgaacaagctgtgtaccagacaatattggaagaggatgttgaagatcctgtgtaccagtacattgtgtttgaggctggacacgagccaatccgtgatcccgaaacggaagaaaacatttatcaggttcccaccagccaaaagaaggaaggtgtttatgatgtgccaaaaagtcaacctgtaagtaatggctattcgtttgaggattttgaagaacggtttgctgcagccaccccgaacagaaacctgcccacagactttgatgagatttttgaggcaacgaaggctgtgacccaattagaactttttggggacatgtccacaccccctgatataacctctccccccactcctgcaactccaggtgatgcctttatcccatcttcatctcagacccttccagcgagtgcagatgtgtttagttctgtacctttcggcactgctgctgtaccctcaggttacgttgcaatgggcgctgtcctcccgtccttctggggtcagcagcccctcgtccaacagcagatggtcatgggtgcccagccaccagtcgctcaggtgatgccgggggctcagcccatcgcatggggccagccgggtctctttcctgccactcagcagccctggccaactgtggccgggcagtttccgccagccgccttcatgcccacacaaactgttatgcctttgccagctgccatgttccaaggtcccctcaccccccttgccaccgtcccaggcacgagtgactccaccaggtcaagtccacagaccgacaagcccaggcagaaaatgggcaaagaaacgtttaaggatttccagatggcccagcctccgcccgtgccctcccgcaaacccgaccagccctccctcacctgtacctcagaggccttctccagttacttcaacaaagtcggggtggcacaggatacagacgactgtgatgactttgacatctcccagttgaatttgacccctgtgacttctaccacaccatcgaccaactcacctccaaccccagcccctagacagagctctccatccaaatcatctgcatcccatgccagtgatcctaccacagatgacatctttgaagagggctttgaaagtcccagcaaaagcgaagagcaagaagctcctgatggatcacaggcctcatccaacagtgatccatttggtgagcccagtggggagcccagtggtgataatataagtccacaggccggtagctag

SEQ ID NO: 5252 - DNA, 752 bp, Homo sapiens
  source 1..752: mol_type = unassigned DNA; mol_type = unassigned DNA
gggatctgtgtgaagtggactaaggattaagtaggatgtcaactgagacagaacttcaagtagctgtgaaaaccagcgccaagaaagactccagaaagaaaggtcaggatcgcagtgaagccactttgataaagaggtttaaaggtgaaggggtccggtacaaagccaaattgatcgggattgatgaagtttccgcagctcggggagacaagttatgtcaagattccatgatgaaactcaagggcgttgttgctggcgctcgttccaaaggagaacacaaacagaaaatctttttaaccatctcctttggaggaatcaaaatctttgatgagaagacaggggttcccaccagccaaaagaaggaaggtgtttatgatgtgccaaaaagtcaacctgtaagtaatggctattcgtttgaggattttgaagaacggtttgctgcagccaccccgaacagaaacctgcccacagactttgatgagatttttgaggcaacgaaggctgtgacccaattagaactttttggggacatgtccacaccccctgatataacctctccccccactcctgcaactccaggtgatgcctttatcccatcttcatctcagacccttccagcgagtgcagatgtgtttagttctgtacctttcggcactgctgctgtaccctcaggttacgttgcaatgggcgctgtcctcccgtccttctggggtcagcagcccctcgtccaacagcagatggtcatgggtgcc

SEQ ID NO: 5253 - DNA, 647 bp, Homo sapiens
  source 1..647: mol_type = unassigned DNA; mol_type = unassigned DNA
gggatctgtgtgaagtggactaaggattaagtaggatgtcaactgagacagaacttcaagtagctgtgaaaaccagcgccaagaaagactccagaaagaaaggtcaggatcgcagtgaagccactttgataaagaggtttaaaggtgaaggggtccggtacaaagccaaattgatcgggattgatgaagtttccgcagctcggggagacaagttatgtcaagattccatgatgaaactcaagggcgttgttgctggcgctcgttccaaaggagaacacaaacagaaaatctttttaaccatctcctttggaggaatcaaaatctttgatgagaagacaggggcccttcagcatcatcatgctgttcatgaaatatcctacattgcaaaggacattacagatcaccgggcctttggatatgtttgtgggaaggaagggaatcacagatttgtggccataaaaacagcccaggcggctgaacctgttattctggacttgagagatctctttcaactcatttatgaattgaagcaaagagaagaattagaaaaaaaggcacaaaaggataagcagtgtgaacaagctgtgtaccaggttcccaccagccaaaagaaggaaggtgtttatgatgtgccaaaaagtcaacct

SEQ ID NO: 5254 - DNA, 1150 bp, Homo sapiens
  source 1..1150: mol_type = unassigned DNA; mol_type = unassigned DNA
cccagctcggcgctcgcccgggcttccccgggctgcagagcgcgcctgagtgccgccgcccgccgggcatggggagccgcttcctgggcggctgcggcagcggaggaggatgctctgggctaggcgagcactcaaaaagagtgaatgaaatgtgcagctcagagtgtcatttctgaagggaggagtctttctcttggagaagagtcctcaatgagcctggccgaggcccgggatctgtgtgaagtggactaaggattaagtaggatgtcaactgagacagaacttcaagtagctgtgaaaaccagcgccaagaaagactccagaaagaaaggtcaggatcgcagtgaagccactttgataaagaggtttaaaggtgaaggggtccggtacaaagccaaattgatcgggattgatgaagtttccgcagctcggggagacaagttatgtcaagattccatgatgaaactcaagggcgttgttgctggcgctcgttccaaaggagaacacaaacagaaaatctttttaaccatctcctttggaggaatcaaaatctttgatgagaagacaggggcccttcagcatcatcatgctgttcatgaaatatcctacattgcaaaggacattacagatcaccgggcctttggatatgtttgtgggaaggaagggaatcacagatttgtggccataaaaacagcccaggcggctgaacctgttattctggacttgagagatctctttcaactcatttatgaattgaagcaaagagaagaattagaaaaaaaggcacaaaaggataagcagtgtgaacaagctgtgtaccagacaatattggaagaggatgttgaagatcctgtgtaccaggtaatttctgaaactagtcggggttttagattcaagagtgactagacctgtgccagagccattttgtcagaaacctgaagaatccactgactgcaaaacctggagagagaccaagattatttctgagggtgagggctgccagcccctccaggagcaaatttccataaaaactaacagaagtttggccggcatcggtatcttgggatttggagatccgcttctcccttcttgcctctgcctcggcccccttcacagtctgtaaaagtttgatcccagagctgaatgtttt

SEQ ID NO: 5255 - DNA, 637 bp, Homo sapiens
  source 1..637: mol_type = unassigned DNA; mol_type = unassigned DNA
tctcctttggaggaatcaaaatctttgatgagaagacaggggcccttcagcatcatcatgctgttcatgaaatatcctacattgcaaaggacattacagatcaccgggcctttggatatgtttgtgggaaggaagggaatcacagatttgtggccataaaaacagcccaggcggctgaacctgttattctggacttgagagatctctttcaactcatttatgaattgaagcaaagagaagaattagaaaaaaaggcacaaaaggataagcagtgtgaacaagctgtgtaccaggtatacctgtgaatttatccttgcgctggagatcgggccttcaaataaacacatgtaaaaactgacagtcaggccttctcttcctgctgccaagtagaaataaacgaagatgaaagattcctgtgtaaattacaggacccaaagcaagccattagaaattattccttattctcttaaactctagacatgttagatgaagtgaaatctcgaatccagagaaagatttcaggggtggaggacccaagaaacacaattgcttttgctgttgttaacagtgcgggtggaggtgggagtggctctaaggattttgacttttttgtgttttttctaccttgatggcccac

SEQ ID NO: 5256 - DNA, 722 bp, Homo sapiens
  source 1..722: mol_type = unassigned DNA; mol_type = unassigned DNA
ataatctaattaaggtagcataatatagagccagaagtcaggtggtatttacaaggtacagaagagatcttggactcaaaaggcatggagtccagtcctatttagctggaaaatctgtggcttatatcatctccaaccatggtaaaatgaggacagcaccatgaagatgaaatgaaagcacaaaagagaaggtatttggcaaaccatgacagtcgttgttagaaaggaaatgtcaaatgagtgcacaaagagggacccgaggggaccctcctaaaaaactgcaagatcctttcctttcactgttgctatgttctgacaaggtttgttgtcttcctgttaaatgggaggtgagtgtggagtggagaaagcgagttgtttgggcctcaggcctcaacctccacttgaagcctacacaagctcacctttgctaccctgcagagaaggcaaaaggagttaatgatgaaatgtcagaaaggcccttgggagcttttagaaattctcaccagcactcaaaaagagtgaatgaaatgtgcagctcagagtgtcatttctgaagggaggagtctttctcttggagaagagtcctcaatgagcctggccgaggcccgggatctgtgtgaagtggactaaggattaagtaggatgtcaactgagacagaacttcaagtagctgtgaaaaccagcgccaagaaagactccagaaagaaaggtcaggatcgcag

SEQ ID NO: 5257 - DNA, 472 bp, Homo sapiens
  source 1..472: mol_type = unassigned DNA
tcagtccagaccctgggcaccccccttttgccaggatcgtccccacccagcctggacacattgactgaactgttttctaggacactggattcaggtcaggtattacctccaccaagaagccttccctaatgttctcagcttggatgagatgctcctcttctgatattctacaggtcctgtttattcctcttctacagcagtgctcacgctgtgtcacaaggatgtactcatatcctgctcatcattgcatgtgaactactggagataactatctatatacatatatcacatctcctaatatgcgaagcacaaagtaggaactcaataaacatcaaacatcccacttccttggcagtggatagcatgaaactgtttattggcactaacctacggatagttaatcagactgattggttctctgtttccttcttctgagatttttacatgtgaataaaagtagatggactgagaa

SEQ ID NO: 5258 - DNA, 5168 bp, Homo sapiens
  source 1..5168: mol_type = unassigned DNA
agcactcaaaaagagtgaatgaaatgtgcagctcagagtgtcatttctgaagggaggagtctttctcttggagaagagtcctcaatgagcctggccgaggcccgggatctgtgtgaagtggactaaggattaagtaggatgtcaactgagacagaacttcaagtagctgtgaaaaccagcgccaagaaagactccagaaagaaaggtcaggatcgcagtgaagccactttgataaagaggtttaaaggtgaaggggtccggtacaaagccaaattgatcgggattgatgaagtttccgcagctcggggagacaagttatgtcaagattccatgatgaaactcaagggcgttgttgctggcgctcgttccaaaggagaacacaaacagaaaatctttttaaccatctcctttggaggaatcaaaatctttgatgagaagacaggggcccttcagcatcatcatgctgttcatgaaatatcctacattgcaaaggacattacagatcaccgggcctttggatatgtttgtgggaaggaagggaatcacagatttgtggccataaaaacagcccaggcggctgaacctgttattctggacttgagagatctctttcaactcatttatgaattgaagcaaagagaagaattagaaaaaaaggcacaaaaggataagcagtgtgaacaagctgtgtaccagacaatattggaagaggatgttgaagatcctgtgtaccagtacattgtgtttgaggctggacacgagccaatccgtgatcccgaaacggaagaaaacatttatcaggttcccaccagccaaaagaaggaaggtgtttatgatgtgccaaaaagtcaacctgtaagtgctgtgacccaattagaactttttggggacatgtccacaccccctgatataacctctccccccactcctgcaactccaggtgatgcctttatcccatcttcatctcagacccttccagcgagtgcagatgtgtttagttctgtacctttcggcactgctgctgtaccctcaggttacgttgcaatgggcgctgtcctcccgtccttctggggtcagcagcccctcgtccaacagcagatggtcatgggtgcccagccaccagtcgctcaggtgatgccgggggctcagcccatcgcatggggccagccgggtctctttcctgccactcagcagccctggccaactgtggccgggcagtttccgccagccgccttcatgcccacacaaactgttatgcctttgccagctgccatgttccaaggtcccctcaccccccttgccaccgtcccaggcacgagtgactccaccaggtcaagtccacagaccgacaagcccaggcagaaaatgggcaaagaaacgtttaaggatttccagatggcccagcctccgcccgtgccctcccgcaaacccgaccagccctccctcacctgtacctcagaggccttctccagttacttcaacaaagtcggggtggcacaggatacagacgactgtgatgactttgacatctcccagttgaatttgacccctgtgacttctaccacaccatcgaccaactcacctccaaccccagcccctagacagagctctccatccaaatcatctgcatcccatgccagtgatcctaccacagatgacatctttgaagagggctttgaaagtcccagcaaaagcgaagagcaagaagctcctgatggatcacaggcctcatccaacagtgatccatttggtgagcccagtggggagcccagtggtgataatataagtccacaggccggtagctagatagcgcaggtctgggagccagagcctctgtacgcgcagatcaacagacctaagaaatagcatcgatgcgagctcgtggtgggtgctcaagactggcatggacatcagcatcacgacaggctctcttgtattctttcacctcttcccacaagaaattcatgattgcccaatggaactcgctcagaagagggaactaagcatttttggcaaccaatggcagatatctatggcagcacacaaaaaaagtatagaaagatccacccaacattaaatcagaaatcaagcaaatgcttacccaacaaatatttgagccctcatagctgggtttaagatgactcagtgtgcaaaattattaattccctttttatttctctacctgttgaccactgttgagacaccaaatttggagtgacaggcatcagaggattacaacagggttggaactgacttctttaagcaaaagcaaagggtcttctgtgaccacaatatcgtcatccatatgccttttcacataggatgatgtgttttttgtcactccatggggcctggtctgccattttcccccctttcctttttttgtcatgtttgaaaattaataggtgtacaaatttttgtattgcttttgactttttttagatatgggtgaagaaatctaactggggagaaaaaaagcctcagtgaaatgaattaacttgaaattacaagacaaataagtggttgattattcattatgatcacgaatgttgccaaaacagtcctttagctattctgcatcctggtgaagaaagacagctttcagtacgaaccttcattctgtgagtaggaaaagacatcagatcccattgatgagaaagatgaaaaatgcatctgatttcttaagaagctctaaactctaagtacaataaaatgatattttttatttttccgatatcttgctgctgtgttgctatgcagacaagtgtcttctccacgtgccattttcaaagaaaagtcatttgccaaataattctggtacaattctggtaatgtggttttggatcttaaaaaccaactttctaatggaacaatggtggcataaatattcagaataacaaactgattctgtggtccaaatggttcatctctatctctttttgtacatcagaaaattcaaatgggatttttattttataacttgaaaaaaaaaccttaccattaaactctttaaatatttaagggaaatggctttaaggagttctaatgaaaaaaaattgtcttttttttgtaaatataaatgttaatgaaaatgatttttaataatgccattacactgtagagaaggtagcagattgagtgcaaggtgtgacaaacttgatggatggggctcactttccagacgttattctggagcatatggtaggaagctggagtgcagggacagctggcaggagcagttggccaatcagcagctagtgaacgggaagggagcacgtgactccatcatctagcctttccacgagagtccccaccctacgtgcaacacaagaaaaagacaattcacattctgaagaattcagattctgaaactctcccacctccccactcccacctacccccgatataaatcactggactgtttgtacgtgaaacagaagaggctaagcttcctttttttacacttatgagacaaaaagtgcagtgtttggttcgtatgtttagcacatgattttcataaagaatctatatatttttgccctacagagaattgttatacaggtcaagtgtgttttcctgatgttcctatgcagttacagtatgttgaaagtgttttaacactaagaagaaaactttaaagattcatgtgattaattggatttgaggataattattattatttggtttttagatttgaaaagtagaatttccattgagacaattgatttgaataggcctgcatttgattcttcatatcaatagaaactaaaatgatttgggagattcatttgaaaaatgattgtatacttgttcacaaagcgaaaagtgatacatgaaggtaatggttatcatttaaagcccacattttacactatcaggtcacaggagtctaatttttttttcagttagataaactgaccaaacgtctattcaagaatatatgtcaatatcatcctaatgtggaaggtccgaagaaccagaaaagtgagaagggccgtttacctccctctgtagctatcacctgttggtccacagagtttcttgagaaatgagcaaacattttatgattaggtaaccctttcacatgaacgggaagatgggaaaggtggaatgaccataagagttggcctgagaccagtttgttttctggggatttggtaagataggcagttcccatgggaaattgcttaaattgctttgttgcctatgatttgattctaaacaagtggtgctatcttctccctcaatatggctgtcttgagtttgtcttgcagtatcacaccattataccaattctttgggttgcttctgacacattcaaagtgaactctggctgatgttgctgtttcaggtataccatctggagttaatttcctagcagaaggtgaaagtccaggagaattgtcctctttcattgaacatgattgaaaatgtaactggctctgaacttcaagaagatagatgcccaagtgatgcattaaagtaagggaaataaagtcaagtttttcaactgccatccatattctcattggcagaattctgatttttttccaagcactgtttggtgagcctggaagcaccgtatcctgtcccaggagtacagtgaaatttccaagcaagagctgaggtgccaataccaaaagaccatggggagtctgcacggttctggttagatcaatagaaaatccatgtgtacaactgttaattcctcatcctccactagcactaaatttgtcactttaaattttgaaaccagggaaacaccacctgtcattctgtccccattctccatagctcttcaatctttacatgccgcaagacttttttgatagctcgtactcatcccagtgtctcctgaaaccccatcatgtaatgtactgggcaccttcttttaaacaaatgtttactctgtgggtttggttcatttcaatttctgcgttctgacacatatttttttaataaagatgagaaagagaaaatgactgttgcagtacctttctagacctactttaactttacctcagatgacagtttgttaacatatatggacacattatttttaactttatgtacaatgcattcaacagaacagcaaaatttttagaaattttccattaatttctgtaacacaccatgtaaaactgttacaaataaacatgtttgagaac

SEQ ID NO: 5259 - DNA, 1817 bp, Homo sapiens
  source 1..1817: mol_type = unassigned DNA
cgggatctgtgtgaagtggactaaggattaagtaggatgtcaactgagacagaacttcaagtagctgtgaaaaccagcgccaagaaagactccagaaagaaaggtcaggatcgcagtgaagccactttgataaagaggtttaaaggtgaaggggtccggtacaaagccaaattgatcgggattgatgaagtttccgcagctcggggagacaagttatgtcaagattccatgatgaaactcaagggcgttgttgctggcgctcgttccaaaggagaacacaaacagaaaatctttttaaccatctcctttggaggaatcaaaatctttgatgagaagacaggggcccttcagcatcatcatgctgttcatgaaatatcctacattgcaaaggacattacagatcaccgggcctttggatatgtttgtgggaaggaagggaatcacagatttgtggccataaaaacagcccaggcggctgaacctgttattctggacttgagagatctctttcaactcatttatgaattgaagcaaagagaagaattagaaaaaaaggcacaaaaggataagcagtgtgaacaagctgtgtaccaggttcccaccagccaaaagaaggaaggtgtttatgatgtgccaaaaagtcaacctgtaagtaatggctattcgtttgaggattttgaagaacggtttgctgcagccaccccgaacagaaacctgcccacagactttgatgagatttttgaggcaacgaaggctgtgacccaattagaactttttggggacatgtccacaccccctgatataacctctccccccactcctgcaactccaggtgatgcctttatcccatcttcatctcagacccttccagcgagtgcagatgtgtttagttctgtacctttcggcactgctgctgtaccctcaggttacgttgcaatgggcgctgtcctcccgtccttctggggtcagcagcccctcgtccaacagcagatggtcatgggtgcccagccaccagtcgctcaggtgatgccgggggctcagcccatcgcatggggccagccgggtctctttcctgccactcagcagccctggccaactgtggccgggcagtttccgccagccgccttcatgcccacacaaactgttatgcctttgccagctgccatgttccaaggtcccctcaccccccttgccaccgtcccaggcacgagtgactccaccaggtcaagtccacagaccgacaagcccaggcagaaaatgggcaaagaaacgtttaaggatttccagatggcccagcctccgcccgtgccctcccgcaaacccgaccagccctccctcacctgtacctcagaggccttctccagttacttcaacaaagtcggggtggcacaggatacagacgactgtgatgactttgacatctcccagttgaatttgacccctgtgacttctaccacaccatcgaccaactcacctccaaccccagcccctagacagagctctccatccaaatcatctgcatcccatgccagtgatcctaccacagatgacatctttgaagagggctttgaaagtcccagcaaaagcgaagagcaagaagctcctgatggatcacaggcctcatccaacagtgatccatttggtgagcccagtggggagcccagtggtgataatataagtccacaggccggtagctagatagcgcaggtctgggagccagagcctctgtacgcgcagatcaacagacctaagaaatagcatcgatgcgagctcgtggtgggtgctcaagactggcatggacatcagcatcacgacag

SEQ ID NO: 5260 - DNA, 5233 bp, Homo sapiens
  source 1..5233: mol_type = unassigned DNA
atctttgatcaatgtacttgccagggagagcccaagtccttcaaacctcctccttttcaccttcatccttaactttgtgctagagcgagacccacacaacaacagccgaccctccccgccccacccccacccccaaaccagccctcgatcccagcccccggagaggactcgcatttcgacttgcgggacacttttgtgcgttcctctccagagcgcctctcgtgctcgcccctcttgcgctcgctctttattaccttcacctccttttctcccccttctctccctttctccttctcgttctctcccggagttgttgttgcccccctcgctccttctccccccttttttccccttcccctcccgggggtgtgtggcaacttttcctctcgcttctcctccgtctgtttccccttatatgtgaccatggcagtgccggcggctttgatccctccgacccagctggtcccccctcaacccccaatctccacgtctgcttcctcctctggcaccaccacctccacctcttcggcgacttcgtctccggctccttccatcggacccccggcgtcctctgggccaactctgttccgcccggagcccatcgcttcggcggcggcggcggcggccacagtcacctctaccggcggcggcggcggcggcggcggcagcggaggcggcggcggcagcagcggcaacggaggcggcggtggcggcggcggcggtggcagcaactgcaaccccaacctggcggccgcgagcaacggcagcggcggcggcggcggcggcatcagcgctggcggcggcgtcgcttccagcacccccatcaacgccagcaccggcagcagcagcagcagcagtagcagcagcagcagcagcagcagtagtagcagcagcagcagtagcagcagcagctgcggccccctccccgggaaacccgtgtactcaaccccgtccccagtggaaaacacccctcagaataatgagtgcaaaatggtggatctgaggggggccaaagtggcttccttcacggtggagggctgcgagctgatctgcctgccccaggctttcgacctgttcctgaagcacttggtggggggcttgcatacggtctacaccaagctgaagcggctggagatcacgccggtggtgtgcaatgtggaacaagttcgcatcctgaggggactgggcgccatccagccaggagtgaaccgctgcaaactcatctccaggaaggacttcgagaccctctacaatgactgcaccaacgcaagttctagacctggaaggcctcctaagaggactcaaagtgtcacctccccagagaactctcacatcatgccgcattctgtccctggtctcatgtctcctgggataattccaccaacaggtctgacagcagccgctgcagcagctgctgctgctaccaatgcagctattgctgaagcaatgaaggtgaaaaaaatcaaattagaagccatgagcaactatcatgccagtaataaccaacatggagcagactctgaaaacggggacatgaattcaagtgtcggactggaacttccttttatgatgatgccccaccctctaattcctgtcagcctacctccagcatctgtcaccatggcaatgagccagatgaaccacctcagcaccattgcaaatatggcagcagcagcacaagttcagagtcccccatccagagttgagacatcagttattaaggagcgtgttcctgatagcccctcacctgccccctctctggaggaggggagaaggcctggcagtcacccatcatcacatcgcagcagcagcgtgtccagctcccctgctcggactgagagctcttctgacagaatcccggtccatcagaatgggttgtccatgaaccagatgctgatgggcttatcaccaaatgtacttcctgggcccaaagagggagatttggccggtcatgacatgggacatgagtcaaaaaggatgcatattgaaaaagatgagaccccgctttctacaccaaccgcaagagacagccttgacaaactctctctaactgggcatggacaaccactgcctccaggttttccatctccttttctgtttcctgatggactgtcttccatcgagactcttctgactaacatacaggggctgttgaaagttgccatagataatgccagagctcaagagaaacaggtccaactggaaaaaactgagctgaagatggattttttaagggaaagagaactaagggaaacacttgagaagcagttggctatggaacaaaagaatagagccatagttcaaaagaggctaaagaaggagaagaaggcaaagagaaaattgcaggaagcacttgagtttgagacgaaacggcgtgaacaagcagaacagacgctaaaacaggcagcttcaacagatagtctcagggtcttaaatgactctctgaccccagagatagaggctgaccgcagtggcggcagaacagatgctgaaaggacaatacaagatggaagactgtatttgaaaactactgtcatgtactgaatctttcctgttgaagaaatccatgttatagaaaagaactttgcagtcagacattcgtcatgggaaagttcagaaaaaaataaagtccttttaagggaacttcctgaattttgtgtattaatgttctttaaaagtttaagtattctacaaaaaaaaaaaaagttttctccattgattttcacctgtggttcataccagagacctgagaatgtttgtaaatgtacaagtatcaaagttcttacagttaattactgcaacttgctgctggacaattgtatacagagttaaaggcaggtctgaataagacctagctttgtttttttctaatggaatgaaccattttcctcttctgaaaattctgtatctgagcacatcaagagactcttgtagcagtggttacccagacttacagaattatgtcctccagaaaccagcaagaacacttggaatgaacgaatgaacttgtagggggcatagaggattcttgaaaaaaaaaaatgcaagagtgattttctgttacattcaatttcaaactctctaattgtgggttttctcctgaagaattttttttcacatactttccaaaagaccaacaaatggatgttgacaacaacccaatgaaataacattttgcatatctgaaaagaagcattgaatataagccaaaagctttcactgaaggtttttttttcttaaaaataaaaaaaaatatataagtgtaacatgttttcattccaaactggtagtggtatgtagaattaaagataataatgttgcttcttattcaaactgttggtcatatgtacagtatataaacataaaacacacaaggaaggtattatgtatgcagtagtatactagagtttaggaaaatgaaaattttagaaaatatgttttgtcaccctgttggtcagaaagatgtctttctggttttaacgcatgcaggcatgtaaatatttgtctggagtcacagtattaatgaatgagatcttaagcatctggtgacatcagaactctgtgtcagccacttttatttgtatattgaaccctagctagtgccccaagctgcactattgggaatggattgtggctgaacagcaaatcaaaacaccagaaatatttttatatgttaacgtcatattatgttaatgttgctgaaaacaaaacctaacaaaccttgatgtaccagtccaataccatgtagcgctgagtgataaagttaaaatgtgctgtgcttcccacccttgtcagagggaagggtggctatgtgttattttcactgtctttttgaaagttacagtatgtgttttcactttcgtgcagataactggaagtaaagcggcaaacagtgcttattacatgctaaagttaccttctctttgttttttgcatatctggaattacacctttaaagactgatatgaatcagtacggtcactatacattttatgatttttctgtcatcttaaaattgtatgatcgtaacattatttattaccacaaaacagcaaaatcttcaatgtctaagaaaactagcttaaaatgtttaaatatagttctgattgggtattaattacttgattaagaaaaaattaacattatagatactctggcattacgcttctataccttttaggtcttccttgcaatactggaacataattcttttgtgtagctcactattagccagctaagttcatctttttaataccataaaaaggttatatgtacagttcctattttagcttgcttacaaagggagcattatttttatttaaagtattgctagtaaatgatttgtagaaacttggttttctaagcatagttcttccataaccaccttttgttgtttgagcacaagggattcttttcctagttctatgtgtttgtttccctatatgcagtctttaaaggattacaacacttaaaattgaatggacttgtgtcaagctttttgcatcatacattttttgaaagatttttaaaaaagcctacaacttacatatgtagtagaatcagccattgctctgctcctggcatagagtcacctgtttgttatgtggattaaatagttttaaaatacatatttgaagacctttgagaatgctttagtgtttgatttgaaataaaaggaaattttagcaaggattaaagaaaaaagctatcagctgtatgttaagagagactcttactaacatgttgtaaatattacaattcatgaaatgttattgtaagtctgtaacttaattttttccctgttttagttatacaggttggtttggaaatttgtgttttggcataaacaagtaaaatgtgcccattttatggtttccatgcttttgtaatcctaaaaatattaatgtctagttgttctatattataaccacatttgcgctctatgcaagcccttggaacagaacatactcatcttcatgtaggacctatgaaaattgtctatttttatctatatatttaaagttttctaaaaatgataaaaggttattacgaattttgttgtacaaaatctgtacaaaaatctgtttttacatcataatgcaagaattggaaatttttctatggtagcctagttatttgagcctggtttcaatgtgagaaccacgtttactgttattgtatttaattttcttttccttttcaacaatctcctaataaaactgtctgaaatctc

SEQ ID NO: 5261 - DNA, 2986 bp, Homo sapiens
  source 1..2986: mol_type = unassigned DNA
atggcagtgccggcggctttgatccctccgacccagctggtcccccctcaacccccaatctccacgtctgcttcctcctctggcaccaccacctccacctcttcggcgacttcgtctccggctccttccatcggacccccggcgtcctctgggccaactctgttccgcccggagcccatcgcttcggcggcggcggcggcggccacagtcacctctaccggcggcggcggcggcggcggcggcagcggaggcggcggcggcagcagcggcaacggaggcggcggtggcggcggcggcggtggcagcaactgcaaccccaacctggcggccgcgagcaacggcagcggcggcggcggcggcggcatcagcgctggcggcggcgtcgcttccagcacccccatcaacgccagcaccggcagcagcagcagcagcagtagcagcagcagcagcagcagcagtagtagcagcagcagcagtagcagcagcagctgcggccccctccccgggaaacccgtgtactcaaccccgtccccagtggaaaacacccctcagaataatgagtgcaaaatggtggatctgaggggggccaaagtggcttccttcacggtggagggctgcgagctgatctgcctgccccaggctttcgacctgttcctgaagcacttggtggggggcttgcatacggtctacaccaagctgaagcggctggagatcacgccggtggtgtgcaatgtggaacaagttcgcatcctgaggggactgggcgccatccagccaggagtgaaccgctgcaaactcatctccaggaaggacttcgagaccctctacaatgactgcaccaacgcaagttctagacctggaaggcctcctaagaggactcaaagtgtcacctccccagagaactctcacatcatgccgcattctgtccctggtctcatgtctcctgggataattccaccaacaggtctgacagcagccgctgcagcagctgctgctgctaccaatgcagctattgctgaagcaatgaaggtgaaaaaaatcaaattagaagccatgagcaactatcatgccagtaataaccaacatggagcagactctgaaaacggggacatgaattcaagtgtcggcagcagtgatggttcctgggataaggaaacactgccctcttccccatcccagggacctcaggcctctataacccacccccgcatgcctggagcacgtagccttccacttagtcatcctctcaaccatcttcagcagagccaccttctgccaaatggactggaacttccttttatgatgatgccccaccctctaattcctgtcagcctacctccagcatctgtcaccatggcaatgagccagatgaaccacctcagcaccattgcaaatatggcagcagcagcacaagttcagagtcccccatccagagttgagacatcagttattaaggagcgtgttcctgatagcccctcacctgccccctctctggaggaggggagaaggcctggcagtcacccatcatcacatcgcagcagcagcgtgtccagctcccctgctcggactgagagctcttctgacagaatcccggtccatcagaatgggttgtccatgaaccagatgctgatgggcttatcaccaaatgtacttcctgggcccaaagagggagatttggccggtcatgacatgggacatgagtcaaaaaggatgcatattgaaaaagatgagaccccgctttctacaccaaccgcaagagacagccttgacaaactctctctaactgggcatggacaaccactgcctccaggttttccatctccttttctgtttcctgatggactgtcttccatcgagactcttctgactaacatacaggggctgttgaaagttgccatagataatgccagagctcaagagaaacaggtccaactggaaaaaactgagctgaagatggattttttaagggaaagagaactaagggaaacacttgagaagcagttggctatggaacaaaagaatagagccatagttcaaaagaggctaaagaaggagaagaaggcaaagagaaaattgcaggaagcacttgagtttgagacgaaacggcgtgaacaagcagaacagacgctaaaacaggcagcttcaacagatagtctcagggtcttaaatgactctctgaccccagagatagaggctgaccgcagtggcggcagaacagatgctgaaaggacaatacaagatggaagactgtatttgaaaactactgtcatgtactgaatctttcctgttgaagaaatccatgttatagaaaagaactttgcagtcagacattcgtcatgggaaagttcagaaaaaaataaagtccttttaagggaacttcctgaattttgtgtattaatgttctttaaaagtttaagtattctacaaaaaaaaaaaaagttttctccattgattttcacctgtggttcataccagagacctgagaatgtttgtaaatgtacaagtatcaaagttcttacagttaattactgcaacttgctgctggacaattgtatacagagttaaaggcaggtctgaataagacctagctttgtttttttctaatggaatgaaccattttcctcttctgaaaattctgtatctgagcacatcaagagactcttgtagcagtggttacccagacttacagaattatgtcctccagaaaccagcaagaacacttggaatgaacgaatgaacttgtagggggcatagaggattcttgaaaaaaaaaaatgcaagagtgattttctgttacattcaatttcaaactctctaattgtgggttttctcctgaagaattttttttcacatactttccaaaagaccaacaaatggatgttgacaacaacccaatgaaataacattttgcatatctgaaaagaagcattgaatataagccaaaagctttcactgaaggtttttttttcttaaaaataaaaaaaaa

SEQ ID NO: 5262 - DNA, 4789 bp, Homo sapiens
  source 1..4789: mol_type = unassigned DNA
atctttgatcaatgtacttgccagggagagcccaagtccttcaaacctcctccttttcaccttcatccttaactttgtgctagagcgagacccacacaacaacagccgaccctccccgccccacccccacccccaaaccagccctcgatcccagcccccggagaggactcgcatttcgacttgcgggacacttttgtgcgttcctctccagagcgcctctcgtgctcgcccctcttgcgctcgctctttattaccttcacctccttttctcccccttctctccctttctccttctcgttctctcccggagttgttgttgcccccctcgctccttctccccccttttttccccttcccctcccgggggtgtgtggcaacttttcctctcgcttctcctccgtctgtttccccttatatgtgaccatggcagtgccggcggctttgatccctccgacccagctggtcccccctcaacccccaatctccacgtctgcttcctcctctggcaccaccacctccacctcttcggcgacttcgtctccggctccttccatcggacccccggcgtcctctgggccaactctgttccgcccggagcccatcgcttcggcggcggcggcggcggccacagtcacctctaccggcggcggcggcggcggcggcggcagcggaggcggcggcggcagcagcggcaacggaggcggcggtggcggcggcggcggtggcagcaactgcaaccccaacctggcggccgcgagcaacggcagcggcggcggcggcggcggcatcagcgctggcggcggcgtcgcttccagcacccccatcaacgccagcaccggcagcagcagcagcagcagtagcagcagcagcagcagcagcagtagtagcagcagcagcagtagcagcagcagctgcggccccctccccgggaaacccgtgtactcaaccccgtccccagtggaaaacacccctcagaataatgagtgcaaaatggtggatctgaggggggccaaagtggcttccttcacggtggagggctgcgagctgatctgcctgccccaggctttcgacctgttcctgaagcacttggtggggggcttgcatacggtctacaccaagctgaagcggctggagatcacgccggtggtgtgcaatgtggaacaagttcgcatcctgaggggactgggcgccatccagccaggagtgaaccgctgcaaactcatctccaggaaggacttcgagaccctctacaatgactgcaccaacgcaagttctagacctggaaggcctcctaagaggactcaaagtgtcacctccccagagaactctcacatcatgccgcattctgtccctggtctcatgtctcctgggataattccaccaacaggtctgacagcagccgctgcagcagctgctgctgctaccaatgcagctattgctgaagcaatgaaggtgaaaaaaatcaaattagaagccatgagcaactatcatgccagtaataaccaacatggagcagactctgaaaacggggacatgaattcaagtgtcgatgagaccccgctttctacaccaaccgcaagagacagccttgacaaactctctctaactgggcatggacaaccactgcctccaggttttccatctccttttctgtttcctgatggactgtcttccatcgagactcttctgactaacatacaggggctgttgaaagttgccatagataatgccagagctcaagagaaacaggtccaactggaaaaaactgagctgaagatggattttttaagggaaagagaactaagggaaacacttgagaagcagttggctatggaacaaaagaatagagccatagttcaaaagaggctaaagaaggagaagaaggcaaagagaaaattgcaggaagcacttgagtttgagacgaaacggcgtgaacaagcagaacagacgctaaaacaggcagcttcaacagatagtctcagggtcttaaatgactctctgaccccagagatagaggctgaccgcagtggcggcagaacagatgctgaaaggacaatacaagatggaagactgtatttgaaaactactgtcatgtactgaatctttcctgttgaagaaatccatgttatagaaaagaactttgcagtcagacattcgtcatgggaaagttcagaaaaaaataaagtccttttaagggaacttcctgaattttgtgtattaatgttctttaaaagtttaagtattctacaaaaaaaaaaaaagttttctccattgattttcacctgtggttcataccagagacctgagaatgtttgtaaatgtacaagtatcaaagttcttacagttaattactgcaacttgctgctggacaattgtatacagagttaaaggcaggtctgaataagacctagctttgtttttttctaatggaatgaaccattttcctcttctgaaaattctgtatctgagcacatcaagagactcttgtagcagtggttacccagacttacagaattatgtcctccagaaaccagcaagaacacttggaatgaacgaatgaacttgtagggggcatagaggattcttgaaaaaaaaaaatgcaagagtgattttctgttacattcaatttcaaactctctaattgtgggttttctcctgaagaattttttttcacatactttccaaaagaccaacaaatggatgttgacaacaacccaatgaaataacattttgcatatctgaaaagaagcattgaatataagccaaaagctttcactgaaggtttttttttcttaaaaataaaaaaaaatatataagtgtaacatgttttcattccaaactggtagtggtatgtagaattaaagataataatgttgcttcttattcaaactgttggtcatatgtacagtatataaacataaaacacacaaggaaggtattatgtatgcagtagtatactagagtttaggaaaatgaaaattttagaaaatatgttttgtcaccctgttggtcagaaagatgtctttctggttttaacgcatgcaggcatgtaaatatttgtctggagtcacagtattaatgaatgagatcttaagcatctggtgacatcagaactctgtgtcagccacttttatttgtatattgaaccctagctagtgccccaagctgcactattgggaatggattgtggctgaacagcaaatcaaaacaccagaaatatttttatatgttaacgtcatattatgttaatgttgctgaaaacaaaacctaacaaaccttgatgtaccagtccaataccatgtagcgctgagtgataaagttaaaatgtgctgtgcttcccacccttgtcagagggaagggtggctatgtgttattttcactgtctttttgaaagttacagtatgtgttttcactttcgtgcagataactggaagtaaagcggcaaacagtgcttattacatgctaaagttaccttctctttgttttttgcatatctggaattacacctttaaagactgatatgaatcagtacggtcactatacattttatgatttttctgtcatcttaaaattgtatgatcgtaacattatttattaccacaaaacagcaaaatcttcaatgtctaagaaaactagcttaaaatgtttaaatatagttctgattgggtattaattacttgattaagaaaaaattaacattatagatactctggcattacgcttctataccttttaggtcttccttgcaatactggaacataattcttttgtgtagctcactattagccagctaagttcatctttttaataccataaaaaggttatatgtacagttcctattttagcttgcttacaaagggagcattatttttatttaaagtattgctagtaaatgatttgtagaaacttggttttctaagcatagttcttccataaccaccttttgttgtttgagcacaagggattcttttcctagttctatgtgtttgtttccctatatgcagtctttaaaggattacaacacttaaaattgaatggacttgtgtcaagctttttgcatcatacattttttgaaagatttttaaaaaagcctacaacttacatatgtagtagaatcagccattgctctgctcctggcatagagtcacctgtttgttatgtggattaaatagttttaaaatacatatttgaagacctttgagaatgctttagtgtttgatttgaaataaaaggaaattttagcaaggattaaagaaaaaagctatcagctgtatgttaagagagactcttactaacatgttgtaaatattacaattcatgaaatgttattgtaagtctgtaacttaattttttccctgttttagttatacaggttggtttggaaatttgtgttttggcataaacaagtaaaatgtgcccattttatggtttccatgcttttgtaatcctaaaaatattaatgtctagttgttctatattataaccacatttgcgctctatgcaagcccttggaacagaacatactcatcttcatgtaggacctatgaaaattgtctatttttatctatatatttaaagttttctaaaaatgataaaaggttattacgaattttgttgtacaaaatctgtacaaaaatctgtttttacatcataatgcaagaattggaaatttttctatggtagcctagttatttgagcctggtttcaatgtgagaaccacgtttactgttattgtatttaattttcttttccttttcaacaatctcctaataaaactgtctgaaatctc

SEQ ID NO: 5263 - DNA, 4627 bp, Homo sapiens
  source 1..4627: mol_type = unassigned DNA
atctttgatcaatgtacttgccagggagagcccaagtccttcaaacctcctccttttcaccttcatccttaactttgtgctagagcgagacccacacaacaacagccgaccctccccgccccacccccacccccaaaccagccctcgatcccagcccccggagaggactcgcatttcgacttgcgggacacttttgtgcgttcctctccagagcgcctctcgtgctcgcccctcttgcgctcgctctttattaccttcacctccttttctcccccttctctccctttctccttctcgttctctcccggagttgttgttgcccccctcgctccttctccccccttttttccccttcccctcccgggggtgtgtggcaacttttcctctcgcttctcctccgtctgtttccccttatatgtgaccatggcagtgccggcggctttgatccctccgacccagctggtcccccctcaacccccaatctccacgtctgcttcctcctctggcaccaccacctccacctcttcggcgacttcgtctccggctccttccatcggacccccggcgtcctctgggccaactctgttccgcccggagcccatcgcttcggcggcggcggcggcggccacagtcacctctaccggcggcggcggcggcggcggcggcagcggaggcggcggcggcagcagcggcaacggaggcggcggtggcggcggcggcggtggcagcaactgcaaccccaacctggcggccgcgagcaacggcagcggcggcggcggcggcggcatcagcgctggcggcggcgtcgcttccagcacccccatcaacgccagcaccggcagcagcagcagcagcagtagcagcagcagcagcagcagcagtagtagcagcagcagcagtagcagcagcagctgcggccccctccccgggaaacccgtgtactcaaccccgtccccagtggaaaacacccctcagaataatgagtgcaaaatggtggatctgaggggggccaaagtggcttccttcacggtggagggctgcgagctgatctgcctgccccaggctttcgacctgttcctgaagcacttggtggggggcttgcatacggtctacaccaagctgaagcggctggagatcacgccggtggtgtgcaatgtggaacaagttcgcatcctgaggggactgggcgccatccagccaggagtgaaccgctgcaaactcatctccaggaaggacttcgagaccctctacaatgactgcaccaacgcaagttctagacctggaaggcctcctaagaggactcaaagtgtcacctccccagagaactctcacatcatgccgcattctgtccctggtctcatgtctcctgggataattccaccaacagatgagaccccgctttctacaccaaccgcaagagacagccttgacaaactctctctaactgggcatggacaaccactgcctccaggttttccatctccttttctgtttcctgatggactgtcttccatcgagactcttctgactaacatacaggggctgttgaaagttgccatagataatgccagagctcaagagaaacaggtccaactggaaaaaactgagctgaagatggattttttaagggaaagagaactaagggaaacacttgagaagcagttggctatggaacaaaagaatagagccatagttcaaaagaggctaaagaaggagaagaaggcaaagagaaaattgcaggaagcacttgagtttgagacgaaacggcgtgaacaagcagaacagacgctaaaacaggcagcttcaacagatagtctcagggtcttaaatgactctctgaccccagagatagaggctgaccgcagtggcggcagaacagatgctgaaaggacaatacaagatggaagactgtatttgaaaactactgtcatgtactgaatctttcctgttgaagaaatccatgttatagaaaagaactttgcagtcagacattcgtcatgggaaagttcagaaaaaaataaagtccttttaagggaacttcctgaattttgtgtattaatgttctttaaaagtttaagtattctacaaaaaaaaaaaaagttttctccattgattttcacctgtggttcataccagagacctgagaatgtttgtaaatgtacaagtatcaaagttcttacagttaattactgcaacttgctgctggacaattgtatacagagttaaaggcaggtctgaataagacctagctttgtttttttctaatggaatgaaccattttcctcttctgaaaattctgtatctgagcacatcaagagactcttgtagcagtggttacccagacttacagaattatgtcctccagaaaccagcaagaacacttggaatgaacgaatgaacttgtagggggcatagaggattcttgaaaaaaaaaaatgcaagagtgattttctgttacattcaatttcaaactctctaattgtgggttttctcctgaagaattttttttcacatactttccaaaagaccaacaaatggatgttgacaacaacccaatgaaataacattttgcatatctgaaaagaagcattgaatataagccaaaagctttcactgaaggtttttttttcttaaaaataaaaaaaaatatataagtgtaacatgttttcattccaaactggtagtggtatgtagaattaaagataataatgttgcttcttattcaaactgttggtcatatgtacagtatataaacataaaacacacaaggaaggtattatgtatgcagtagtatactagagtttaggaaaatgaaaattttagaaaatatgttttgtcaccctgttggtcagaaagatgtctttctggttttaacgcatgcaggcatgtaaatatttgtctggagtcacagtattaatgaatgagatcttaagcatctggtgacatcagaactctgtgtcagccacttttatttgtatattgaaccctagctagtgccccaagctgcactattgggaatggattgtggctgaacagcaaatcaaaacaccagaaatatttttatatgttaacgtcatattatgttaatgttgctgaaaacaaaacctaacaaaccttgatgtaccagtccaataccatgtagcgctgagtgataaagttaaaatgtgctgtgcttcccacccttgtcagagggaagggtggctatgtgttattttcactgtctttttgaaagttacagtatgtgttttcactttcgtgcagataactggaagtaaagcggcaaacagtgcttattacatgctaaagttaccttctctttgttttttgcatatctggaattacacctttaaagactgatatgaatcagtacggtcactatacattttatgatttttctgtcatcttaaaattgtatgatcgtaacattatttattaccacaaaacagcaaaatcttcaatgtctaagaaaactagcttaaaatgtttaaatatagttctgattgggtattaattacttgattaagaaaaaattaacattatagatactctggcattacgcttctataccttttaggtcttccttgcaatactggaacataattcttttgtgtagctcactattagccagctaagttcatctttttaataccataaaaaggttatatgtacagttcctattttagcttgcttacaaagggagcattatttttatttaaagtattgctagtaaatgatttgtagaaacttggttttctaagcatagttcttccataaccaccttttgttgtttgagcacaagggattcttttcctagttctatgtgtttgtttccctatatgcagtctttaaaggattacaacacttaaaattgaatggacttgtgtcaagctttttgcatcatacattttttgaaagatttttaaaaaagcctacaacttacatatgtagtagaatcagccattgctctgctcctggcatagagtcacctgtttgttatgtggattaaatagttttaaaatacatatttgaagacctttgagaatgctttagtgtttgatttgaaataaaaggaaattttagcaaggattaaagaaaaaagctatcagctgtatgttaagagagactcttactaacatgttgtaaatattacaattcatgaaatgttattgtaagtctgtaacttaattttttccctgttttagttatacaggttggtttggaaatttgtgttttggcataaacaagtaaaatgtgcccattttatggtttccatgcttttgtaatcctaaaaatattaatgtctagttgttctatattataaccacatttgcgctctatgcaagcccttggaacagaacatactcatcttcatgtaggacctatgaaaattgtctatttttatctatatatttaaagttttctaaaaatgataaaaggttattacgaattttgttgtacaaaatctgtacaaaaatctgtttttacatcataatgcaagaattggaaatttttctatggtagcctagttatttgagcctggtttcaatgtgagaaccacgtttactgttattgtatttaattttcttttccttttcaacaatctcctaataaaactgtctgaaatctc

SEQ ID NO: 5264 - DNA, 2028 bp, Homo sapiens
  source 1..2028: mol_type = unassigned DNA
ctgcggagccgggggcggagagaggaggcgcaggaggacccgcgacacagctcgggatccgcgcgcgctgggcctccggcgccgctcgtggggttcgggaggccgggaccctgcccgggagatgtggacgccgggcggacccccggggtccgcgggctgggaccgccgtaggttgggcgcgaggttgcgcgcggcgttcgcggggctgcaggagctgcaggggctgcgagccacgcagcaggagcgggtacggggcgccctggccctgcagcccccgcccgcgcccgccgcgccctgcggcccccacggcctccacggccccgagcagcagctggaggcggcgctggccgcgctgcaggagcagctgtcccggctgagacaacaggacatcggcctgaagacccacctggaccagctggacctgcagattagcaagctgcagctggatgtgggcacagcctcaggggaggccctggacagcgacagcaggcccagctcaggcttttacgagatgagcgacggtggatcctgctccctgtccacgtcctgtgcctccgtctgcagtgaccacatctctccctcgctgggcagtttgttgcctgtggcccaggcccacaaggccaggcccagcatgggggactggaggccccggtcggttgatgagactactgtgccagcgtggagaccccaggctaccgaggagggcgccaggcccccagggagcgtggaggatgcaggccagccgtggggcacattctggcccaggcctgtgtctacagagctgtgcaatgctccaggtgaacttgacatgcatgctccgcctgcaggctgcacctccagttcactgacaggtgtaggttctggtttgagaggaaagtgtggcctctgtggctgtcagctccctttctgctcagtgaacacaagttcaaagacaaaatcatcaggaatttcaagacagcaatgacagagcactacaccaagctgggggctgcattgactgaccagtcacaggctggaagtcgggtcctggccacaggcccagcttcttctcccgatatcatcggcccccctctgcccgccaagtcactctgctttccccacagtgagccagtgggagctgcagagaagtgtccagaaaggactgctggtcagtggaatttcctttacgtggaaagttgaagtgagggagtaatggacgtaagagagaatggtttctccctaacaaatagactggaaattccaatccttctactttctgtgtgtttttctagcatgactgcaagtgctggggccataagcaccatgttcagcagcacccaggaagcaaaagtagttgacagaatgttagtgagcattccttcttgtttttatttttttttaaagccccttctatatttcataatttttgtgattttgggtaaatacaatgttatcataagttaaggaaaagttaatctttttaggctaggaaaagttccagtttacgtgcatatatattattgcaaaatgatgtgaaaatttaatattttttgagataattgatatttttcattcactatgttaataagatgaatcatattaacaaaatgtccattgctaaaccaatcatgcattcataggatgaacaatgtttggttatggtgtttttgtttgtacttttaaatggtacttaaacataattagggagaagatgagctccaaagcacctggcacagctccagcaggctcagctaatggccggtcttctcatttaccaaacccacgtggccaccccgacctcagacgaattttttttacaaagtccagacattcaattatttacaatgtgtctttttaggacactgccagaattaggttgtaaatttttttttaggattgtatcttatgttcatagaagaaattggcctatgaaatttctttcatataatactcacatctggttttcatcccaaagctaaaccagcccataaaagcagctgtgatggttttcttcttcttatatttcaataaatggtatgtaaaagacag

SEQ ID NO: 5265 - DNA, 2942 bp, Homo sapiens
  source 1..2942: mol_type = unassigned DNA; mol_type = unassigned DNA
ggaggacccgcgacacagctcgggatccgcgcgcgctgggcctccggcgccgctcgtggggttcgggaggccgggaccctgcccgggagatgtggacgccgggcggacccccggggtccgcgggctgggaccgccgtaggttgggcgcgaggttgcgcgcggcgttcgcggggctgcaggagctgcaggggctgcgagccacgcagcaggagcgggtacggggcgccctggccctgcagcccccgcccgcgcccgccgcgccctgcggcccccacggcctccacggccccgagcagcagctggaggcggcgctggccgcgctgcaggagcagctgtcccggctgagacaacaggacatcggcctgaagacccacctggaccagctggacctgcagattagcaagctgcagctggatgtgggcacagcctcaggggaggccctggacagcgacagcaggcccagctcaggcttttacgagatgagcgacggtggatcctgctccctgtccacgtcctgtgcctccgtctgcagtgaccacatctctccctcgctgggcagtttgttgcctgtggcccaggcccacaaggccaggcccagcatgggggactggaggccccggtcggttgatgagactactgtgccagcgtggagaccccaggctaccgaggagggcgccaggcccccagggagcgtggaggatgcaggccagccgtggggcacattctggcccaggcctgtgtctacaggtgatcttgacagagccctgccggcggacacggggctccagaaagccagcgcggacgccgagctcctcgggctcctctgccagggggtggatatcccgctgcacgtgccggaccccaagtatcggcaggacctggtgtcccagggcggcagggaggtgtacccgtaccccagccccctgcacgccgtggctctacagagccccctgtttgtcctgactaaggaaaccccacagagaggtggcccctcgttccctagggagagccccaggggccccgcaggtctgaacaccatccagactgggccggtcctcgaggctggcccggccagggccagagcttatatcgacaggttgctgcatctgtggggccgggagaccccagcaaagggtagcgagggagaacagggacctctaaggcatgcagcgtccccatctccacagaggcagggtggctggagtacagacggtggagggcgactgctggtcttcgccccagggagggaggacgagggagggccagctcagagcaggggtgccggcaggggcgggccccagcagcagggatacatgccccttgagggtccccagcagtctggcagccttccagaggagggctccaagccctcaaacagctgtgtcctcagggagaccatggtgcaggcttctcccagctcaaaggcccagcagacaccctcagctcaggactatggacgaggcaacatcatatccccatccaggatgctggacaagagcccctcaccggcctctgggcactttgcccacccatcctttgctgccagcctgaaaatgggtccccccaagagcaaggctgaaaaaatcaagagaagtcccatggacaaggtgctgaggtttgcaaggcagccgctgcttctactggacaggcctgagggagcccatgcagccccccagccatccctggagtgggaccctgcccactggcccacagggaggggcgggctccagcggaggccagccctggcctgggaggcacccgggcgctcctgttctgagtccaccctctaccccatgcctgtcctcgtccccttggcagtggccccgcaggagagccaccggacctcagcccaagccctgttcccctttgaggcgtcactgctcacctcagtggccaggaggaagcatcgccgctggcagtccaccgtggagatctcggcccgggcccgcctggccagctgtcctgagtctaacctggggccccccaggcccgtggccaggagagcaggtggcccactggcccggggccgtccctcactggtccgccaggacgcctacaccaggagcgactcagagccctccaagcactcggccgagtgtgacccgcggttcccgtcagtcatcccggagaccagcgagggagagtccagtgaccacaccaccaaccgattcggagaccgtgagtccagcagcagcgacgaggagggcggcgcccagagcagggactgtgacctggcactgggctatgtggcggccgggcatgcggagctggcctggacccaggaggccccggtcagctcggggccactcctgtcccccgtgcccaagctgtgccgtattaaggcctccaaggccctgaagaagaagatccgcaggttccagccgacggccctgaaggtcatgaccatggtgtgaggtgcagtgactgcgtcaagagaagcctgctgcacacaggggccctttccatgcagtgtcctgtgcatgtctgggtttcagtgtcgtcttgccaagtcgctttatcttccgaggccaccgtttaacaggagtccccgcagatgggttctgccctgtggagtatggccgtgagtccccgccccagcaaagacttccatgcggagctctggtttcagatgccagcagcctccccggccgacctagtgtctcttttcaaggtctgcccaggatgctgcttcccggcatgcaccttgtttccatgttgtcatcctcccatggcttcccctgccctcactcccctctggctggggaagtgtttcccaatcctttgaccattcctccccaaaagcattttaaagaggcggttgcaggactctgagctggaaattgaatttgagtttaaactccacgttaagctgtcagcatacacaaacacccaaattatgccatgatctcaaataaaaggaacattttttttccctcttttaa

SEQ ID NO: 5266 - DNA, 2088 bp, Homo sapiens
  source 1..2088: mol_type = unassigned DNA
acacagctcgggatccgcgcgcgctgggcctccggcgccgctcgtggggttcgggaggcccagcatgggggactggaggccccggtcggttgatgagactactgtgccagcgtggagaccccaggctaccgaggagggcgccaggcccccagggagcgtggaggatgcaggccagccgtggggcacattctggcccaggcctgtgtctacaggtgatcttgacagagccctgccggcggacacggggctccagaaagccagcgcggacgccgagctcctcgggctcctctgccagggggtggatatcccgctgcacgtgccggaccccaagtatcggcaggacctggtgtcccagggcggcagggaggtgtacccgtaccccagccccctgcacgccgtggctctacagagccccctgtttgtcctgactaaggaaaccccacagagaggtggcccctcgttccctagggagagccccaggggccccgcaggtctgaacaccatccagactgggccggtcctcgaggctggcccggccagggccagagcttatatcgacaggttgctgcatctgtggggccgggagaccccagcaaagggtagcgagggagaacagggacctctaaggcatgcagcgtccccatctccacagaggcagggtggctggagtacagacggtggagggcgactgctggtcttcgccccagggagggaggacgagggagggccagctcagagcaggggtgccggcaggggcgggccccagcagcagggatacatgccccttgagggtccccagcagtctggcagccttccagaggagggctccaagccctcaaacagctgtgtcctcagggagaccatggtgcaggcttctcccagctcaaaggcccagcagacaccctcagctcaggactatggacgaggcaacatcatatccccatccaggatgctggacaagagcccctcaccggcctctgggcactttgcccacccatcctttgctgccagcctgaaaatgggtccccccaagagcaaggctgaaaaaatcaagagaagtcccatggacaaggtgctgaggtttgcaaggcagccgctgcttctactggacaggcctgagggagcccatgcagccccccagccatccctggagtgggaccctgcccactggcccacagggaggggcgggctccagcggaggccagccctggcctgggaggcacccgggcgctcctgttctgagtccaccctctaccccatgcctgtcctcgtccccttggcagtggccccgcaggagagccaccggacctcagcccaagccctgttcccctttgaggcgtcactgctcacctcagtggccaggaggaagcatcgccgctggcagtccaccgtggagatctcggcccgggcccgcctggccagctgtcctgagtctaacctggggccccccaggcccgtggccaggagagcaggtggcccactggcccggggccgtccctcactggtccgccaggacgcctacaccaggagcgactcagagccctccaagcactcggccgagtgtgacccgcggttcccgtcagtcatcccggagaccagcgagggagagtccagtgaccacaccaccaaccgattcggagaccgtgagtccagcagcagcgacgaggagggcggcgcccagagcagggactgtgacctggcactgggctatgtggcggccgggcatgcggagctggcctggacccaggaggccccggtcagctcggggccactcctgtcccccgtgcccaagctgtgccgtattaaggcctccaaggccctgaagaagaagatccgcaggttccagccgacggccctgaaggtcatgaccatggtgtgaggtgcagtgactgcgtcaagagaagcctgctgcacacaggggccctttccatgcagtgtcctgtgcatgtctgggtttcagtgtcgtcttgccaagtcgctttatcttccgaggccaccgtttaacaggagtccccgcagatgggttctgccctgtggagtatggccgtgagtccccgccccagcaaagacttccatgcggagctctgg

SEQ ID NO: 5267 - DNA, 1620 bp, Homo sapiens
  source 1..1620: mol_type = unassigned DNA; mol_type = unassigned DNA
acacagctcgggatccgcgcgcgctgggcctccggcgccgctcgtggggttcgggaggccgggaccctgcccgggagatgtggacgccgggcggacccccggggtccgcgggctgggaccgccgtaggttgggcgcgagggagaacagggacctctaaggcatgcagcgtccccatctccacagaggcagggtggctggagtacagacggtggagggcgactgctggtcttcgccccagggagggaggacgagggagggccagctcagagcaggggtgccggcaggggcgggccccagcagcagggatacatgccccttgagggtccccagcagtctggcagccttccagaggagggctccaagccctcaaacagctgtgtcctcagggagaccatggtgcaggcttctcccagctcaaaggcccagcagacaccctcagctcaggactatggacgaggcaacatcatatccccatccaggatgctggacaagagcccctcaccggcctctgggcactttgcccacccatcctttgctgccagcctgaaaatgggtccccccaagagcaaggctgaaaaaatcaagagaagtcccatggacaaggtgctgaggtttgcaaggcagccgctgcttctactggacaggcctgagggagcccatgcagccccccagccatccctggagtgggaccctgcccactggcccacagggaggggcgggctccagcggaggccagccctggcctgggaggcacccgggcgctcctgttctgagtccaccctctaccccatgcctgtcctcgtccccttggcagtggccccgcaggagagccaccggacctcagcccaagccctgttcccctttgaggcgtcactgctcacctcagtggccaggaggaagcatcgccgctggcagtccaccgtggagatctcggcccgggcccgcctggccagctgtcctgagtctaacctggggccccccaggcccgtggccaggagagcaggtggcccactggcccggggccgtccctcactggtccgccaggacgcctacaccaggagcgactcagagccctccaagcactcggccgagtgtgacccgcggttcccgtcagtcatcccggagaccagcgagggagagtccagtgaccacaccaccaaccgattcggagaccgtgagtccagcagcagcgacgaggagggcggcgcccagagcagggactgtgacctggcactgggctatgtggcggccgggcatgcggagctggcctggacccaggaggccccggtcagctcggggccactcctgtcccccgtgcccaagctgtgccgtattaaggcctccaaggccctgaagaagaagatccgcaggttccagccgacggccctgaaggtcatgaccatggtgtgaggtgcagtgactgcgtcaagagaagcctgctgcacacaggggccctttccatgcagtgtcctgtgcatgtctgggtttcagtgtcgtcttgccaagtcgctttatcttccgaggccaccgtttaacaggagtccccgcagatgggttctgccctgtggagtatggccgtgagtccccgccccagcaaagacttccatgcggagctctgg

SEQ ID NO: 5268 - DNA, 5757 bp, Homo sapiens
  source 1..5757: mol_type = unassigned DNA; mol_type = unassigned DNA
atcggggccttggggagcccaggatggaggtggcggtcgcggcggcgggccgagccctgcggcgggcgggaggaggtgagcaccaggcccactgagcctctgcagagccaccagccatgcccgggatcgtggtgttccggcggcgctggtctgtgggcagtgatgacctcgtcctaccggccatcttcctctttctcctgcataccacctggtttgtgatcctgtccgtggtgctcttcggcctggtctataacccgcacgaggcctgctccctgaacctggtggaccacggccgcggctacctgggcatcctgctgagctgcatgatcgctgagatggccatcatctggctgagcatgcgcgggggcatcctctacacggagccccgtgactccatgcagtacgtgctctacgtgcgcctggccatcctggtgatcgagttcatctacgccatcgtgggcatcgtctggctcactcagtactacacctcctgcaacgacctcactgccaagaatgtcaccctcggaatggttgtctgcaactgggtagtcatcctcagtgtgtgcatcactgtcctctgcgtcttcgaccccacgggccgcacctttgtcaagctgagagccaccaagaggaggcagcgtaacctgcggacctacaacctgcggcaccgcttagaggagggtcaagccaccagctggtcgcgccggctcaaagtgttcctctgctgcacgcggacgaaggactcccagtcagatgcctactcagaaatcgcctacctctttgcggagttcttccgggaccttgacattgtgccatccgacatcattgctggcctggtgctgctccggcagcggcagcgggccaagcgcaacgccgtgctggacgaggcaaacaatgacatcttggccttcctgtctgggatgccggtgaccagaaacaccaagtacctcgacctcaagaattcacaagagatgctccgctacaaagaggtctgctactacatgctctttgccctggctgcctacgggtggcccatgtacctgatgcggaagcccgcctgcggcctctgccaactggctcggtcctgctcgtgttgcctgtgtcctgcgaggccgcggttcgcccctggagtcaccatcgaggaagacaactgctgtggctgtaatgccattgccatccggcgccacttcctggacgagaacatgactgcggtggacatcgtctatacctcctgccatgatgcggtctatgaaacgcccttctacgtggcggtggaccatgacaagaagaaagtggtgatcagtatccgggggaccctgtcccccaaggatgccctgactgacctgacgggtgatgctgagcgcctccccgtggaggggcaccacggcacctggctgggccacaagggtatggtcctctcagctgagtacatcaagaagaaactggagcaggagatggtcctgtcccaggcctttgggcgagacctgggccgcggaaccaaacactacggcctgattgtggtgggccactccctgggcgcgggcactgctgccatcctctccttccttctgcgcccacagtatccgaccctcaagtgctttgcctactccccgccagggggcctgctgagtgaggatgcgatggagtattccaaggagttcgtgactgctgtggttctgggcaaagacctcgtccccaggattggcctctctcagctggaaggcttccgcagacagctcctggatgtcctgcagcgaagcaccaagcccaaatggcggatcatcgtgggggccaccaaatgcatccccaagtcggagctgcctgaggaggtagaggtgaccaccctggccagcacgcggctctggacccaccccagcgacctaactatagccctctcagccagcactccactctacccgcccggccgcatcatccacgtggtccacaaccaccctgcagagcagtgctgctgctgtgagcaggaggagcccacatactttgccatctggggcgacaacaaggccttcaatgaggtgatcatctcgccagccatgctgcatgagcacctgccctatgtggtcatggaggggctcaacaaggtgctggagaactacaacaaggggaagaccgctctgctctctgcagccaaggtcatggtgagccctaccgaggtggacctgactcctgagctcatcttccagcagcagccactccccacggggccgcccatgcccactggccttgccctggagctgccgactgcagaccaccgcaacagcagcgtcaggagcaagtcccagtctgagatgagcctggagggcttctcggaggggcggctgctgtcgccagtggttgcggcggcggcccgccaggacccggtggagctgctgctgctgtctacccaggagcggctggcggcggagctgcaggcccggcgggcaccactggccaccatggagagcctctcggacactgagtccctgtacagcttcgactcgcgccgctcctcaggcttccgcagcatccggggctcccccagcctccacgctgtgctggagcgtgatgaaggccacctcttctacattgaccctgccatccccgaggaaaacccatccctgagctcgcgcactgagctgctggcggccgacagcctgtccaagcactcacaggacacgcagcccctggaggcggccctgggcagtggcggcgtcactcctgagcggccccccagtgctgcggccaatgacgaggaggaagaggttggcggtgggggtggcgggccggcctcccgcggggagctggcgctgcacaatgggcgcctgggggactcgcccagtcctcaggtgctggaattcgccgagttcatcgacagcctcttcaacctggacagcaagagcagctccttccaagacctctactgcatggtggtgcccgagagccccaccagtgactacgctgagggccccaagtcccccagccagcaagagatcctgctccgtgcccagttcgagcccaacctggtgcccaagcccccacggctctttgccggctcagccgacccctcctcgggcatctcactctcgccctccttcccgctcagctcctcgggtgagctcatggacctgacgcccacgggcctcagtagccaggaatgcctggcggctgacaagatccggacttctacccccactggccacggagccagccccgccaagcaagatgagctggtcatctcagcacgctagcaccccagttgcgtggccagccgggcccaggcaggagcaggtggccctgtgggcacctggtgcctgccccctgccgggcagctttaaggacagacccccaggggcagtttagcctcaggcacaggcatcgctgctgagctgggggtccgcatccctacctcagcttaggacccccagagccaaggtggctgggatctggccccacagatggggaaagatggggaagggtgtggagtggggaggagcctgggcagcctgctgggtgggccacactcagcctgactgccctccatgggggcattctggcaccccctgctccaggacaggccatgggcaagctgcctcccatcactgcctgctggctgctctcccaggggccaggtggagagcagtgccccccgacacatgtattctcatctgtggtccaggccggcatcgtcctggccaccccccagatctggtgcctgctggccggccccctggggtgcccctgccgaggtggcctgcagtgctgtacatgtttacagaagctgctgggcttggctcaggatgtgttctgggcttgcaagccccccgcccaatcatgtgttcagtagccgtcctctgagcagggcccaaggcagccaggggcctggaggggccagaggagggtggggtcagggccgccccttctctgccttgtgcctctcatgctgcctcctctgcccatgggtcctgggcacccaggcctgccctgcctgctggctacttcctggcttaccttctacccccaaggatcctcaccacccaaagggtggtgggcactgctgtgaccaccccagctgcagagtcagtgccctgggtggaaggaaggcactgagagcccccttcctctgagggccccacctcaccccttggtgtcacccccaccacgcctaggcagctctgggccctgggatctggaaccaacacacccctgttcccctcagctttccctcctcgctggcctgggcaccctcctgggagcaggccttcctccctcccacccccaatgtcctgttggtaggaggtggggccaagagtggggtatggtgggccttggctggagacctctgtccactgcccagggaggggcctggggctgggagcagtcccggtttagcctgaggtccccatagggcttcctcccctgctgggtttgggaagcagttagggagatagcgacccggagtttccccagaagcggggtgggagggtgtgcatgctagtgttggcgcgtatgcatgtgcatgagtgtgcaccgttcctaaggaaggggcctctggggctgcccaccctacctgccctgcctgcctgctgcccctcccagcctgccaagaaaacggtaggggagcatgatggggcctttgaggcagggtcgcagggacaagctcagctttaggcaccatctgttcccatcgcgcctgctgctgtgacccgttttggaaaactggtgtgtaccgaggcgctgactgcacggctgaccgcctgctcgtgccttcattctgcagcggcatggtccctcccattctggctccacctgcagcctccctgggtggcctaggctcccccgaccaagagacctccctctcatgatcactggtacctgggggcctgaattctggcccccggctccccacacagctgggactggcctggatggctgtcctgggagcccctgcccaccctgacagagggagctgggcctcccctcatcctctgtaactcccgccttcaccagactcaaggacaccctggccctgctgaggcatacagagcttcagcccagcacagaagcaagacaaaatcagtggctcttagagtttagaaaacaagacagactctcagatgaaagatctgacaagcaccgtggccagtcacagggagagacttgatgtctggccttttaattcctcctctgccagggtgggtcctgggacctctaatgtgggcatgtcgtccaccccaggacgagccatcagggacagaccccccacccccaaggctgcagccacaccatgtttcaggcttggggctggggcaggcttgggctcaatcctgggcacccaggggcagcccacccctaacctggctcctacccacctcgcccttgaaggatgggcctgctgcacgtctccctcctccaccccataccacactggggggtctgagccacccccctcagccccgttcggctcagaccgacccccactccatccccagacctgcagcacaagtgcgcgggcctgtcctcccaggggcctgggcgactccatatgcaatcagtagcgagcagccgggccccacagaccctcatgcactctcttacgtgccattctccccagactttttttgtacttaatgtatgaaagatccaaactaatattgctgtaaaaaggagagacaaattaatatagcttattctataaatatatctgtatataaaggtttctgtatattgtatagagctgtgtataaactggatgtagaagca

SEQ ID NO: 5269 - DNA, 5699 bp, Homo sapiens
  source 1..5699: mol_type = unassigned DNA; mol_type = unassigned DNA
ggtcgcggcggcgggccgagccctgcggcgggcgggaggaggtgagcaccaggcccactgagcctctgcagagccaccagccatgcccgggatcgtggtgttccggcggcgctggtctgtgggcagtgatgacctcgtcctaccggccatcttcctctttctcctgcataccacctggtttgtgatcctgtccgtggtgctcttcggcctggtctataacccgcacgaggcctgctccctgaacctggtggaccacggccgcggctacctgggcatcctgctgagctgcatgatcgctgagatggccatcatctggctgagcatgcgcgggggcatcctctacacggagccccgtgactccatgcaccatcctggtgatcgagttcatctacgccatcgtgggcatcgtctggctcactcagtactacacctcctgcaacgacctcactgccaagaatgtcaccctcggaatggttgtctgcaactgggtagtcatcctcagtgtgtgcatcactgtcctctgcgtcttcgaccccacgggccgcacctttgtcaagctgagagccaccaagaggaggcagcgtaacctgcggacctacaacctgcggcaccgcttagaggagggtcaagccaccagctggtcgcgccggctcaaagtgttcctctgctgcacgcggacgaaggactcccagtcagatgcctactcagaaatcgcctacctctttgcggagttcttccgggaccttgacattgtgccatccgacatcattgctggcctggtgctgctccggcagcggcagcgggccaagcgcaacgccgtgctggacgaggcaaacaatgacatcttggccttcctgtctgggatgccggtgaccagaaacaccaagtacctcgacctcaagaattcacaagagatgctccgctacaaagaggtctgctactacatgctctttgccctggctgcctacgggtggcccatgtacctgatgcggaagcccgcctgcggcctctgccaactggctcggtcctgctcgtgttgcctgtgtcctgcgaggccgcggttcgcccctggagtcaccatcgaggaagacaactgctgtggctgtaatgccattgccatccggcgccacttcctggacgagaacatgactgcggtggacatcgtctatacctcctgccatgatgcggtctatgaaacgcccttctacgtggcggtggaccatgacaagaagaaagtggtgatcagtatccgggggaccctgtcccccaaggatgccctgactgacctgacgggtgatgctgagcgcctccccgtggaggggcaccacggcacctggctgggccacaagggtatggtcctctcagctgagtacatcaagaagaaactggagcaggagatggtcctgtcccaggcctttgggcgagacctgggccgcggaaccaaacactacggcctgattgtggtgggccactccctgggcgcgggcactgctgccatcctctccttccttctgcgcccacagtatccgaccctcaagtgctttgcctactccccgccagggggcctgctgagtgaggatgcgatggagtattccaaggagttcgtgactgctgtggttctgggcaaagacctcgtccccaggattggcctctctcagctggaaggcttccgcagacagctcctggatgtcctgcagcgaagcaccaagcccaaatggcggatcatcgtgggggccaccaaatgcatccccaagtcggagctgcctgaggaggtagaggtgaccaccctggccagcacgcggctctggacccaccccagcgacctaactatagccctctcagccagcactccactctacccgcccggccgcatcatccacgtggtccacaaccaccctgcagagcagtgctgctgctgtgagcaggaggagcccacatactttgccatctggggcgacaacaaggccttcaatgaggtgatcatctcgccagccatgctgcatgagcacctgccctatgtggtcatggaggggctcaacaaggtgctggagaactacaacaaggggaagaccgctctgctctctgcagccaaggtcatggtgagccctaccgaggtggacctgactcctgagctcatcttccagcagcagccactccccacggggccgcccatgcccactggccttgccctggagctgccgactgcagaccaccgcaacagcagcgtcaggagcaagtcccagtctgagatgagcctggagggcttctcggaggggcggctgctgtcgccagtggttgcggcggcggcccgccaggacccggtggagctgctgctgctgtctacccaggagcggctggcggcggagctgcaggcccggcgggcaccactggccaccatggagagcctctcggacactgagtccctgtacagcttcgactcgcgccgctcctcaggcttccgcagcatccggggctcccccagcctccacgctgtgctggagcgtgatgaaggccacctcttctacattgaccctgccatccccgaggaaaacccatccctgagctcgcgcactgagctgctggcggccgacagcctgtccaagcactcacaggacacgcagcccctggaggcggccctgggcagtggcggcgtcactcctgagcggccccccagtgctgcggccaatgacgaggaggaagaggttggcggtgggggtggcgggccggcctcccgcggggagctggcgctgcacaatgggcgcctgggggactcgcccagtcctcaggtgctggaattcgccgagttcatcgacagcctcttcaacctggacagcaagagcagctccttccaagacctctactgcatggtggtgcccgagagccccaccagtgactacgctgagggccccaagtcccccagccagcaagagatcctgctccgtgcccagttcgagcccaacctggtgcccaagcccccacggctctttgccggctcagccgacccctcctcgggcatctcactctcgccctccttcccgctcagctcctcgggtgagctcatggacctgacgcccacgggcctcagtagccaggaatgcctggcggctgacaagatccggacttctacccccactggccacggagccagccccgccaagcaagatgagctggtcatctcagcacgctagcaccccagttgcgtggccagccgggcccaggcaggagcaggtggccctgtgggcacctggtgcctgccccctgccgggcagctttaaggacagacccccaggggcagtttagcctcaggcacaggcatcgctgctgagctgggggtccgcatccctacctcagcttaggacccccagagccaaggtggctgggatctggccccacagatggggaaagatggggaagggtgtggagtggggaggagcctgggcagcctgctgggtgggccacactcagcctgactgccctccatgggggcattctggcaccccctgctccaggacaggccatgggcaagctgcctcccatcactgcctgctggctgctctcccaggggccaggtggagagcagtgccccccgacacatgtattctcatctgtggtccaggccggcatcgtcctggccaccccccagatctggtgcctgctggccggccccctggggtgcccctgccgaggtggcctgcagtgctgtacatgtttacagaagctgctgggcttggctcaggatgtgttctgggcttgcaagccccccgcccaatcatgtgttcagtagccgtcctctgagcagggcccaaggcagccaggggcctggaggggccagaggagggtggggtcagggccgccccttctctgccttgtgcctctcatgctgcctcctctgcccatgggtcctgggcacccaggcctgccctgcctgctggctacttcctggcttaccttctacccccaaggatcctcaccacccaaagggtggtgggcactgctgtgaccaccccagctgcagagtcagtgccctgggtggaaggaaggcactgagagcccccttcctctgagggccccacctcaccccttggtgtcacccccaccacgcctaggcagctctgggccctgggatctggaaccaacacacccctgttcccctcagctttccctcctcgctggcctgggcaccctcctgggagcaggccttcctccctcccacccccaatgtcctgttggtaggaggtggggccaagagtggggtatggtgggccttggctggagacctctgtccactgcccagggaggggcctggggctgggagcagtcccggtttagcctgaggtccccatagggcttcctcccctgctgggtttgggaagcagttagggagatagcgacccggagtttccccagaagcggggtgggagggtgtgcatgctagtgttggcgcgtatgcatgtgcatgagtgtgcaccgttcctaaggaaggggcctctggggctgcccaccctacctgccctgcctgcctgctgcccctcccagcctgccaagaaaacggtaggggagcatgatggggcctttgaggcagggtcgcagggacaagctcagctttaggcaccatctgttcccatcgcgcctgctgctgtgacccgttttggaaaactggtgtgtaccgaggcgctgactgcacggctgaccgcctgctcgtgccttcattctgcagcggcatggtccctcccattctggctccacctgcagcctccctgggtggcctaggctcccccgaccaagagacctccctctcatgatcactggtacctgggggcctgaattctggcccccggctccccacacagctgggactggcctggatggctgtcctgggagcccctgcccaccctgacagagggagctgggcctcccctcatcctctgtaactcccgccttcaccagactcaaggacaccctggccctgctgaggcatacagagcttcagcccagcacagaagcaagacaaaatcagtggctcttagagtttagaaaacaagacagactctcagatgaaagatctgacaagcaccgtggccagtcacagggagagacttgatgtctggccttttaattcctcctctgccagggtgggtcctgggacctctaatgtgggcatgtcgtccaccccaggacgagccatcagggacagaccccccacccccaaggctgcagccacaccatgtttcaggcttggggctggggcaggcttgggctcaatcctgggcacccaggggcagcccacccctaacctggctcctacccacctcgcccttgaaggatgggcctgctgcacgtctccctcctccaccccataccacactggggggtctgagccacccccctcagccccgttcggctcagaccgacccccactccatccccagacctgcagcacaagtgcgcgggcctgtcctcccaggggcctgggcgactccatatgcaatcagtagcgagcagccgggccccacagaccctcatgcactctcttacgtgccattctccccagactttttttgtacttaatgtatgaaagatccaaactaatattgctgtaaaaaggagagacaaattaatatagcttattctataaatatatctgtatataaaggtttctgtatattgtatagagctgtgtataaactggatgtagaagc

SEQ ID NO: 5270 - DNA, 1146 bp, Homo sapiens
  source 1..1146: mol_type = unassigned DNA; mol_type = unassigned DNA
gaaacccacgcagcctcctggattcttccccgtccctccctctgtcctggggctgtgacctcctccatgttattcacagggtctcagcacgattcatctcaaagcagcgaaacaagcactggcctcagaagaagcaatattaaaacagttacaactcatctagcacacagacacccaactgacaccctgttcctccagtcataacaacaactacagctttgattgaacaagagactgagtttggtaactttctcctaataaaaagatcactgactatggactgcttctggtggggttacgaaaccgcaacctcatgtgcctgcatttcctgaaaagacattttgatgtaggaagggcctggagtcctgctgcttgcgtctctgggatacgggagcaaagagccacgcatcctcatggcccacacaggcgtcacctccagtctctccttggcctcatctccccagcgtcctggaatggcatcgggctggcccagggagcccctgtcctgtgcctctcctttcccctcaggggctgccaggctgaccacccccaccgcaggccaggcctacagtgccccatggaacgtcctgaccctcccccagggtggcagcaggaagaaggaagaaaggggatcctctccagctggccagagagacagaccttcttgtgctcatcaaccctccaagaatgcctgccctccctccttcccccaaggcctgtccacaggggcttgagatcagccagaaaagtcaggcaacttttcagggactgggagcgaggtctcccggccgggcctgggtccagtctctgtgggcagtgcagtgccgagccccacccctcaagccgtgccctgtccatagctccagactttgaccctgcactccagtccgggctggcggacagagggctggaaacaagacgctccagaatcaggagcttcccctcaggaaatagcatcctgtgtccccgcactgcagttgtctggtctctccagcagtttggtacttccgatgaagagcttgtgtctccagaggcaaagtatgggggaagagggaagagagaagaccaagggtccctgagaggggctgtcccctaagccccagtatccaagctcgggctcgaagctggaaggagaattgcctagag

SEQ ID NO: 5271 - DNA, 1345 bp, Homo sapiens
  source 1..1345: mol_type = unassigned DNA; mol_type = unassigned DNA
gaaacccacgcagcctcctggattcttccccgtccctccctctgtcctggggctgtgacctcctccatgttattcacagggtctcagcacgattcatctcaaaggctgctgcaatgcgtgtggtggtgattggagcaggagtcatcgggctgtccaccgccctctgcatccatgagcgctaccactcagtcctgcagccactggacataaaggtctacgcggaccgcttcaccccactcaccaccaccgacgtggctgccggcctctggcagccctacctttctgaccccaacaacccacaggaggcggactggagccaacagacctttgactatctcctgagccatgtccattctcccaacgctgaaaacctgggcctgttcctaatctcgggctacaacctcttccatgaagccattccggtggcaagagaaggcgcagacgtgattgtcaactgcactggggtatgggctggggcgctacaacgagaccccctgctgcagccaggccgggggcagatcatgaaggtggacgccccttggatgaagcacttcattctcacccatgacccagagagaggcatctacaattccccgtacatcatcccagggacccagacagttactcttggaggcatcttccagttgggaaactggagtgaactaaacaatatccaggaccacaacaccatttgggaaggctgctgcagactggagcccacactgaagaatgcaagaattattggtgaacgaactggcttccggccagtacgcccccagattcggctagaaagagaacagcttcgcactggaccttcaaacacagaggtcatccacaactatggccatggaggctacgggctcaccatccactggggatgtgccctggaggcagccaagctctttgggagaatcctggaagaaaagaaattgtccagaatgccaccatcccacctctgaagactccagtgactgctgcctccccccacaagaactcccttctcccctcagccaatgaatcaatgtgctccttcataagccattgcttctccctcacttctttcctcaaagaagcatgaggtgagagaaagccacaaagtcagtgcctggagaagggttcagcccaacatggggcccctctcatcactgaaatccctctaccttctctgggtctggcattataaagaacagctgaggctgtcattccatgagtcttcagaagaaaggacagctcagaaaatcaaagaggccaactgcccagagccacagaaaatggaggataattgaggctaagtaacctgattacaagttgtactaacatattaaaggttctgaaaagtcctgca

SEQ ID NO: 5272 - DNA, 1756 bp, Homo sapiens
  source 1..1756: mol_type = unassigned DNA; mol_type = unassigned DNA
agtgcagtgccgagccccacccctcaagccgtgccctgtccatagctccagactttgaccctgcactccagtccgggctggcggacagagggctggaaacaagacgctccagaatcaggagcttcccctcaggaaatagcatcctgtgtccccgcactgcagttgtctggtctctccagcagtttggtacttccggctgctgcaatgcgtgtggtggtgattggagcaggagtcatcgggctgtccaccgccctctgcatccatgagcgctaccactcagtcctgcagccactggacataaaggtctacgcggaccgcttcaccccactcaccaccaccgacgtggctgccggcctctggcagccctacctttctgaccccaacaacccacaggaggcggactggagccaacagacctttgactatctcctgagccatgtccattctcccaacgctgaaaacctgggcctgttcctaatctcgggctacaacctcttccatgaagccattccggacccttcctggaaggacacagttctgggatttcggaagctgacccccagagagctggatatgttcccagattacggctatggctggttccacacaagcctaattctggagggaaagaactatctacagtggctgactgaaaggttaactgagaggggagtgaagttcttccagcggaaagtggagtcttttgaggaggtggcaagagaaggcgcagacgtgattgtcaactgcactggggtatgggctggggcgctacaacgagaccccctgctgcagccaggccgggggcagatcatgaaggtggacgccccttggatgaagcacttcattctcacccatgacccagagagaggcatctacaattccccgtacatcatcccagggacccagacagttactcttggaggcatcttccagttgggaaactggagtgaactaaacaatatccaggaccacaacaccatttgggaaggctgctgcagactggagcccacactgaagaatgcaagaattattggtgaacgaactggcttccggccagtacgcccccagattcggctagaaagagaacagcttcgcactggaccttcaaacacagaggtcatccacaactatggccatggaggctacgggctcaccatccactggggatgtgccctggaggcagccaagctctttgggagaatcctggaagaaaagaaattgtccagaatgccaccatcccacctctgaagactccagtgactgctgcctccccccacaagaactcccttctcccctcagccaatgaatcaatgtgctccttcataagccattgcttctccctcacttctttcctcaaagaagcatgaggtgagagaaagccacaaagtcagtgcctggagaagggttcagcccaacatggggcccctctcatcactgaaatccctctaccttctctgggtctggcattataaagaacagctgaggctgtcattccatgagtcttcagaagaaaggacagctcagaaaatcaaagaggccaactgcccagagccacagaaaatggaggataattgaggctaagtaacctgattacaagttgtactaacatattaaaggttctgaaaagtcctgcagcaaagacaactatctgatgttgtttaacccagtgcttgctaaacctatctggctatggaactcttttgcccagagcacccatgaatgccatgacacaaatctgagaaaatgctggaacaga

SEQ ID NO: 5273 - DNA, 1576 bp, Homo sapiens
  source 1..1576: mol_type = unassigned DNA; mol_type = unassigned DNA
tgcactccagtccgggctggcggacagagggctggaaacaagacgctccagaatcaggagcttcccctcaggaaatagcatcctgtgtccccgcactgcagttgtctggtctctccagcagtttggtacttccggctgctgcaatgcgtgtggtggtgattggagcaggagtcatcgggctgtccaccgccctctgcatccatgagcgctaccactcagtcctgcagccactggacataaaggtctacgcggaccgcttcaccccactcaccaccaccgacgtggctgccggcctctggcagccctacctttctgaccccaacaacccacaggaggcgacccttcctggaaggacacagttctgggatttcggaagctgacccccagagagctggatatgttcccagattacggctatggctggttccacacaagcctaattctggagggaaagaactatctacagtggctgactgaaaggttaactgagaggggagtgaagttcttccagcggaaagtggagtcttttgaggaggtggcaagagaaggcgcagacgtgattgtcaactgcactggggtatgggctggggcgctacaacgagaccccctgctgcagccaggccgggggcagatcatgaaggtggacgccccttggatgaagcacttcattctcacccatgacccagagagaggcatctacaattccccgtacatcatcccagggacccagacagttactcttggaggcatcttccagttgggaaactggagtgaactaaacaatatccaggaccacaacaccatttgggaaggctgctgcagactggagcccacactgaagaatgcaagaattattggtgaacgaactggcttccggccagtacgcccccagattcggctagaaagagaacagcttcgcactggaccttcaaacacagaggtcatccacaactatggccatggaggctacgggctcaccatccactggggatgtgccctggaggcagccaagctctttgggagaatcctggaagaaaagaaattgtccagaatgccaccatcccacctctgaagactccagtgactgctgcctccccccacaagaactcccttctcccctcagccaatgaatcaatgtgctccttcataagccattgcttctccctcacttctttcctcaaagaagcatgaggtgagagaaagccacaaagtcagtgcctggagaagggttcagcccaacatggggcccctctcatcactgaaatccctctaccttctctgggtctggcattataaagaacagctgaggctgtcattccatgagtcttcagaagaaaggacagctcagaaaatcaaagaggccaactgcccagagccacagaaaatggaggataattgaggctaagtaacctgattacaagttgtactaacatattaaaggttctgaaaagtcctgcagcaaagacaactatctgatgttgtttaacccagtgcttgctaaacctatctggctatggaactcttttgcccagagcacccatgaatgccatgacacaaatctgagaaaatgctggaa

SEQ ID NO: 5274 - DNA, 676 bp, Homo sapiens
  source 1..676: mol_type = unassigned DNA; mol_type = unassigned DNA
ggcggacagagggctggaaacaagacgctccagaatcaggagcttcccctcaggaaatagcatcctgtgtccccgcactgcagttgtctggtctctccagcagtttggtacttccggacccttcctggaaggacacagttctgggatttcggaagctgacccccagagagctggatatgttcccagattacggctatggctggttccacacaagcctaattctggagggaaagaactatctacagtggctgactgaaaggttaactgagaggggagtgaagttcttccagcggaaagtggagtcttttgaggaggtggcaagagaaggcgcagacgtgattgtcaactgcactggggtatgggctggggcgctacaacgagaccccctgctgcagccaggccgggggcagatcatgaaggtggacgccccttggatgaagcacttcattctcacccatgacccagagagaggcatctacaattccccgtacatcatcccagggacccagacagttactcttggaggcatcttccagttgggaaactggagtgaactaaacaatatccaggaccacaacaccatttgggaaggctgctgcagactggagcccacactgaagaatgcaagaattattggtgaacgaactggcttccggccagtacgcccccagattcg

SEQ ID NO: 5275 - DNA, 2385 bp, Homo sapiens
  source 1..2385: mol_type = unassigned DNA; mol_type = unassigned DNA
agaatcaggagcttcccctcaggaaatagcatcctgtgtccccgcactgcagttgtctggtctctccagcagtttggtacttccggctgctgcaatgcgtgtggtggtgattggagcaggagtcatcgggctgtccaccgccctctgcatccatgagcgctaccactcagtcctgcagccactggacataaaggtctacgcggaccgcttcaccccactcaccaccaccgacgtggctgccggcctctggcagccctacctttctgaccccaacaacccacaggaggcggactggagccaacagacctttgactatctcctgagccatgtccattctcccaacgctgaaaacctgggcctgttcctaatctcgggctacaacctcttccatgaagccattccgctatggctggttccacacaagcctaattctggagggaaagaactatctacagtggctgactgaaaggttaactgagaggggagtgaagttcttccagcggaaagtggagtcttttgaggaggtggcaagagaaggcgcagacgtgattgtcaactgcactggggtatgggctggggcgctacaacgagaccccctgctgcagccaggccgggggcagatcatgaaggtggacgccccttggatgaagcacttcattctcacccatgacccagagagaggcatctacaattccccgtacatcatcccagggacccagacagttactcttggaggcatcttccagttgggaaactggagtgaactaaacaatatccaggaccacaacaccatttgggaaggctgctgcagactggagcccacactgaagaatgcaagaattattggtgaacgaactggcttccggccagtacgcccccagattcggctagaaagagaacagcttcgcactggaccttcaaacacagaggtatgctcccatggcaaggaaagtaatgccctcttccactcctcagatggctctggcattttcagggaacagtcatgtctgatctcaagttccacacaggctccatagcaggcaggggcagtggtggctaatatcccctcctctataaatggggaaactgaggctcaatgatggttaaggacctgctcaaggttacatagaggggcagtggtgatgttaatggaggtggtgctgatgagatcaatgttgataatggtgtgactgggagtggggatggtagctggtgctgatggaaatgacactatcaagtatgttagtaccacagcagaggtgacgatctcaaaggcagtgttaacatggctgcactaactgtctcattggcaatattaatcgtgtggcagagatgacagtatcaatggcagtgttaatgatggtggtgaaatggtgaatggggttggttttctaaagtctgtggtcaaataacaggaaaatgtgtacttactggatgtgtacttcgtgtcagacacagcagcaagtccattacatgaatgaccttattaaatctcctctggagctctttgggatagggacagttctccctatgcttcggatgaggaaactggggtgaattaagaggtgaagtcacttgcccaagtcagaccactggtggaaggcagggctgggatgtgatttgaatttgactccaaggctatttccagatatccattttgtggctgccccatcatctcttgcaactgttccagggggtccccaccattccaccccggtgccaagagaagctcaggtggcatctggctttgcccaggactcttcgggaggctcctgagtcttccagggcagaagagcttcatctattctttccactgtccctctcggacctggccaccttctctcttgcctctcctaggtcatccacaactatggccatggaggctacgggctcaccatccactggggatgtgccctggaggcagccaagctctttgggagaatcctggaagaaaagaaattgtccagaatgccaccatcccacctctgaagactccagtgactgctgcctccccccacaagaactcccttctcccctcagccaatgaatcaatgtgctccttcataagccattgcttctccctcacttctttcctcaaagaagcatgaggtgagagaaagccacaaagtcagtgcctggagaagggttcagcccaacatggggcccctctcatcactgaaatccctctaccttctctgggtctggcattataaagaacagctgaggctgtcattccatgagtcttcagaagaaaggacagctcagaaaatcaaagaggccaactgcccagagccacagaaaatggaggataattgaggctaagtaacctgattacaagttgtactaacatattaaaggttctgaaaagtcctgcagcaaagacaa

SEQ ID NO: 5276 - DNA, 640 bp, Homo sapiens
  source 1..640: mol_type = unassigned DNA
gagagatccagcctctcaaacatccagcagagagaccataggctgctgcaatgcgtgtggtggtgattggagcaggagtcatcgggctgtccaccgccctctgcatccatgagcgctaccactcagtcctgcagccactggacataaaggtctacgcggaccgcttcaccccactcaccaccaccgacgtggctgccggcctctggcagccctacctttctgaccccaacaacccacaggaggcggactggagccaacagacctttgactatctcctgagccatgtccattctcccaacgctgaaaacctgggcctgttcctaatctcgggctacaacctcttccatgaagccattccggacccttcctggaaggacacagttctgggatttcggaagctgacccccagagagctggatatgttcccagattacggctatggctggttccacacaagcctaattctggagggaaagaactatctacagtggctgactgaaaggttaactgagaggggagtgaagttcttccagcggaaagtggagtcttttgaggaggtggcaagagaaggcgcagacgtgattgtcaactgcactggggtatgggctggggcgctacaacgagaccccctgctgcagcc

SEQ ID NO: 5277 - DNA, 514 bp, Homo sapiens
  source 1..514: mol_type = unassigned DNA
gcaaagacaatgttgttgatggagatgacaacattgatggaagtggtgatggaagagttcgttgttggtgttgatggtgatgacagtggcaattgaggtagtgatggtggtggtgttagcagaggtgacaaggttgatggtaatgacctttattcatctcagagccttcattttccttcatccttgaccctcctcatttgtatctaggacccagacagttactcttggaggcatcttccagttgggaaactggagtgaactaaacaatatccaggaccacaacaccatttgggaaggctgctgcagactggagcccacactgaagaatgcaagaattattggtgaacgaactggcttccggccagtacgcccccagattcggctagaaagagaacagcttcgcactggaccttcaaacacagaggtcatccacaactatggccatggaggctacgggctcaccatccactggggatgtgccctggaggcagccaagctctttgggagaatcctg

SEQ ID NO: 5278 - DNA, 5743 bp, Homo sapiens
  source 1..5743: mol_type = unassigned DNA
cttcagattgcaaaccttcttgccttcaagcctcggctccaacaccagtccggcagaggaacccagtctaatgaggactggagactgatgcatgagggggctacggaggcgcaggagcggtggtgatggtctgggaagcggagctgaagtgccctgggctttggtgaggcgtgacagtttatcatgaccgtgttcaggcaggaaaacgtggatgattactacgacaccggcgaggaacttggcagtggacagtttgcggttgtgaagaaatgccgtgagaaaagcaccggcctccagtatgccgccaaattcatcaagaaaaggaggactaagtccagccggcggggtgtgagccgcgaggacatcgagcgggaggtcagcatcctgaaggagatccagcaccccaatgtcatcaccctgcacgaggtctatgagaacaagacggacgtcatcctgatcttggaactcgttgcaggtggcgagctgtttgacttcttagctgaaaaggaatctttaactgaagaggaagcaactgaatttctcaaacaaattcttaatggtgtttactacctgcactcccttcaaatcgcccactttgatcttaagcctgagaacataatgcttttggatagaaatgtccccaaacctcggatcaagatcattgactttgggttggcccataaaattgactttggaaatgaatttaaaaacatatttgggactccagagtttgtcgctcctgagatagtcaactatgaacctcttggtcttgaggcagatatgtggagtatcggggtaataacctatatcctcctaagtggggcctccccatttcttggagacactaagcaagaaacgttagcaaatgtatccgctgtcaactacgaatttgaggatgaatacttcagtaataccagtgccctagccaaagatttcataagaagacttctggtcaaggatccaaagaagagaatgacaattcaagatagtttgcagcatccctggatcaagcctaaagatacacaacaggcacttagtagaaaagcatcagcagtaaacatggagaaattcaagaagtttgcagcccggaaaaaatggaaacaatccgttcgcttgatatcactgtgccaaagattatccaggtcattcctgtccagaagtaacatgagtgttgccagaagcgatgatactctggatgaggaagactcctttgtgatgaaagccatcatccatgccatcaacgatgacaatgtcccaggcctgcagcaccttctgggctcattatccaactatgatgttaaccaacccaacaagcacgggacacctccattactcattgctgctggctgtgggaatattcaaatactacagttgctcattaaaagaggctcgagaatcgatgtccaggataagggcgggtccaatgccgtctactgggctgctcggcatggccacgtcgataccttgaaatttctcagtgagaacaaatgccctttggatgtgaaagacaagtctggagagatggccctccacgtggcagctcgctatggccatgctgacgtggctcagttactgtgcagcttcggctcaaatcccaatatccaggacaaggaagaagaaacccccctgcactgtgctgcttggcacggctattactctgtggccaaagccctttgtgaagccggctgtaacgtgaacatcaagaaccgagaaggagagacgcccctcctgacagcctctgccaggggctaccacgacatcgtggagtgtctggccgaacatggagccgaccttaatgcttgcgacaaggacggacacattgcccttcatctggctgtaagacggtgtcagatggaggtaatcaagactctcctcagccaagggtgtttcgtcgattatcaagacaggcacggcaatactcccctccatgtggcatgtaaagatggcaacatgcctatcgtggtggccctctgtgaagcaaactgcaatttggacatctccaacaagtatgggcgaacgcctctgcaccttgcggccaacaacggaatcctagacgtggtccggtatctctgtctgatgggagccagcgttgaggcgctgaccacggacggaaagacggcagaagatcttgctagatcggaacagcacgagcacgtagcaggtctccttgcaagacttcgaaaggatacgcaccgaggactcttcatccagcagctccgacccacacagaacctgcagccaagaattaagctcaagctgtttggccactcgggatccgggaaaaccacccttgtagaatctctcaagtgtgggctgctgaggagctttttcagaaggcgtcggcccagactgtcttccaccaactccagcaggttcccaccttcacccctggcttctaagcccacagtctcagtgagcatcaacaacctgtacccaggctgcgagaacgtgagtgtgaggagccgcagcatgatgttcgagccgggtcttaccaaagggatgctggaggtgtttgtggccccgacccaccacccgcactgctcggccgatgaccagtccaccaaggccatcgacatccagaacgcttatttgaatggagttggcgatttcagcgtgtgggagttctctggaaatcctgtgtatttctgctgttatgactattttgctgcaaatgatcccacgtcaatccatgttgttgtctttagtctagaagagccctatgagatccagctgaaccaagtgattttctggctcagtttcctgaagtcccttgtcccagttgaagaacccatagccttcggtggcaagctgaagaacccactccaagttgtcctggtggccacccacgctgacatcatgaatgttcctcgaccggctggaggcgagtttggatatgacaaagacacatcgttgctgaaagagattaggaacaggtttggaaatgatcttcacatttcaaataagctgtttgttctggatgctggggcttctgggtcaaaggacatgaaggtacttcgaaatcatctgcaagaaatacgaagccagattgtttcggtctgtcctcccatgactcacctgtgtgagaaaatcatctccacgctgccttcctggaggaagctcaatggacccaaccagctgatgtcgctgcagcagtttgtgtacgacgtgcaggaccagctgaaccccctggccagcgaggaggacctcaggcgcattgctcagcagctccacagcacaggcgagatcaacatcatgcaaagtgaaacagttcaggacgtgctgctcctggacccccgctggctctgcacaaacgtcctggggaagttgctgtccgtggagaccccacgggcgctgcaccactaccggggccgctacaccgtggaggacatccagcgcctggtgcccgacagcgacgtggaggagctgctgcagatcctcgatgccatggacatctgcgcccgggacctgagcagcgggaccatggtggacgtcccagccctgatcaagacagacaacctgcaccgctcctgggctgatgaggaggacgaggtgatggtgtatggtggcgtgcgcatcgtgcccgtggaacacctcacccccttcccatgtggcatctttcacaaggtccaggtgaacctgtgccggtggatccaccagcaaagcacagagggcgacgcggacatccgcctgtgggtgaatggctgcaagctggccaaccgtggggccgagctgctggtgctgctggtcaaccacggccagggcattgaggtccaggtccgcggcctggagacggagaagatcaagtgctgcctgctgctggactcggtgtgcagcaccattgagaacgtcatggccaccacgctgccagggctcctgaccgtgaagcattacctgagcccccagcagctgcgggagcaccatgagcccgtcatgatctaccagccacgggacttcttccgggcacagactctgaaggaaacctcactgaccaacaccatgggggggtacaaggaaagcttcagcagcatcatgtgcttcgggtgtcacgacgtctactcacaggccagcctcggcatggacatccatgcatcagacctgaacctcctcactcggaggaaactgagtcgcctgctggacccgcccgaccccctggggaaggactggtgccttctcgccatgaacttaggcctccctgacctcgtggcaaagtacaacaccagtaacggggctcccaaggatttcctccccagccccctccacgccctgctgcgggaatggaccacctaccctgagagcacagtgggcaccctcatgtccaaactgagggagctgggtcgccgggatgccgcagactttttgctgaaggcatcctctgtgttcaaaatcaacctggatggcaatggccaggaggcctatgcctcgagctgcaacagcggcacctcttacaattccattagctctgttgtatcccggtgagggcagcctctggcttgggcagggtctgtttggactgcagaagcaagggggtgatgtagcccatccttccctttggagatgctgagggtgtttcttcctgcacccacagccagggggatgccactcctccctccggcttgacctgtttctctgccgctacctccctccccgtctcattccgttgtctgtggatggtcattgcagtttaagagcagaacagatcttttactttggccgcttgaaaagctagtgtacctcctctcagtgttttggactccatctctcatcctccagtaccttgcttcttactgataattttgctggaattcctaacttttcaatgacattttttttaactactatattgattgtcctttaaaaaagaaaagtgcatatttatccaaaatgtgtatttcttatacgcttttctttgttataccatttcctcagcttatctcttttatatttgtaggagaaactcccatgtatggaatcccactgtatgatttataaacagacaatatgtgagtgccttttgcagaagagggtgtgtttgaaatcatcggagtcagccaggagctgtcaccaaggaaacgctacctctctgtcccttgctgtatgctgatcatcgccagaggtgcttcaccctgagttttgttttgtattgttttctgacagtttttctgttttgtttggcaaggaaaggggagaagggaatcctcctccagggtgattttatgatcagtgttgttgctctaggaagacatttttccgtttgcttttgttccaatgtcaatgtgaacgtccacatgaaacctacacactgtcatgcttcatcattccctctcatctcaggtagaaggttgacacagttgtagggttacagagacctatgtaagaattcagaagacccctgactcatcatttgtggcagtcccttataattggtgcatagcagatggtttccacatttagatcctggtttcataacttcctgtacttgaagtctaaaagcagaaaataaaggaagcaagttttcttccatgattttaaattgtgatcgagttttaaattgataggagggaacatgtcctaattcttctgtcctgagaagcatgtaatgttaatgttatatcatatgtatatatatatatgcactatgtatatacatatatattaatactggtatttttacttaatctataaaatgtcgttaaaaagttgtttgtttttttctttttttataaataaactgttgctcgttgca

SEQ ID NO: 5279 - DNA, 5759 bp, Homo sapiens
  source 1..5759: mol_type = unassigned DNA
agagcgcgccagcgagcccggagcgcggagctgggaggagcagcgagcgccgcgcagaacccgcagcgccggcctggcagggcagctcggaggactggagactgatgcatgagggggctacggaggcgcaggagcggtggtgatggtctgggaagcggagctgaagtgccctgggctttggtgaggcgtgacagtttatcatgaccgtgttcaggcaggaaaacgtggatgattactacgacaccggcgaggaacttggcagtggacagtttgcggttgtgaagaaatgccgtgagaaaagcaccggcctccagtatgccgccaaattcatcaagaaaaggaggactaagtccagccggcggggtgtgagccgcgaggacatcgagcgggaggtcagcatcctgaaggagatccagcaccccaatgtcatcaccctgcacgaggtctatgagaacaagacggacgtcatcctgatcttggaactcgttgcaggtggcgagctgtttgacttcttagctgaaaaggaatctttaactgaagaggaagcaactgaatttctcaaacaaattcttaatggtgtttactacctgcactcccttcaaatcgcccactttgatcttaagcctgagaacataatgcttttggatagaaatgtccccaaacctcggatcaagatcattgactttgggttggcccataaaattgactttggaaatgaatttaaaaacatatttgggactccagagtttgtcgctcctgagatagtcaactatgaacctcttggtcttgaggcagatatgtggagtatcggggtaataacctatatcctcctaagtggggcctccccatttcttggagacactaagcaagaaacgttagcaaatgtatccgctgtcaactacgaatttgaggatgaatacttcagtaataccagtgccctagccaaagatttcataagaagacttctggtcaaggatccaaagaagagaatgacaattcaagatagtttgcagcatccctggatcaagcctaaagatacacaacaggcacttagtagaaaagcatcagcagtaaacatggagaaattcaagaagtttgcagcccggaaaaaatggaaacaatccgttcgcttgatatcactgtgccaaagattatccaggtcattcctgtccagaagtaacatgagtgttgccagaagcgatgatactctggatgaggaagactcctttgtgatgaaagccatcatccatgccatcaacgatgacaatgtcccaggcctgcagcaccttctgggctcattatccaactatgatgttaaccaacccaacaagcacgggacacctccattactcattgctgctggctgtgggaatattcaaatactacagttgctcattaaaagaggctcgagaatcgatgtccaggataagggcgggtccaatgccgtctactgggctgctcggcatggccacgtcgataccttgaaatttctcagtgagaacaaatgccctttggatgtgaaagacaagtctggagagatggccctccacgtggcagctcgctatggccatgctgacgtggctcagttactgtgcagcttcggctcaaatcccaatatccaggacaaggaagaagaaacccccctgcactgtgctgcttggcacggctattactctgtggccaaagccctttgtgaagccggctgtaacgtgaacatcaagaaccgagaaggagagacgcccctcctgacagcctctgccaggggctaccacgacatcgtggagtgtctggccgaacatggagccgaccttaatgcttgcgacaaggacggacacattgcccttcatctggctgtaagacggtgtcagatggaggtaatcaagactctcctcagccaagggtgtttcgtcgattatcaagacaggcacggcaatactcccctccatgtggcatgtaaagatggcaacatgcctatcgtggtggccctctgtgaagcaaactgcaatttggacatctccaacaagtatgggcgaacgcctctgcaccttgcggccaacaacggaatcctagacgtggtccggtatctctgtctgatgggagccagcgttgaggcgctgaccacggacggaaagacggcagaagatcttgctagatcggaacagcacgagcacgtagcaggtctccttgcaagacttcgaaaggatacgcaccgaggactcttcatccagcagctccgacccacacagaacctgcagccaagaattaagctcaagctgtttggccactcgggatccgggaaaaccacccttgtagaatctctcaagtgtgggctgctgaggagctttttcagaaggcgtcggcccagactgtcttccaccaactccagcaggttcccaccttcacccctggcttctaagcccacagtctcagtgagcatcaacaacctgtacccaggctgcgagaacgtgagtgtgaggagccgcagcatgatgttcgagccgggtcttaccaaagggatgctggaggtgtttgtggccccgacccaccacccgcactgctcggccgatgaccagtccaccaaggccatcgacatccagaacgcttatttgaatggagttggcgatttcagcgtgtgggagttctctggaaatcctgtgtatttctgctgttatgactattttgctgcaaatgatcccacgtcaatccatgttgttgtctttagtctagaagagccctatgagatccagctgaaccaagtgattttctggctcagtttcctgaagtcccttgtcccagttgaagaacccatagccttcggtggcaagctgaagaacccactccaagttgtcctggtggccacccacgctgacatcatgaatgttcctcgaccggctggaggcgagtttggatatgacaaagacacatcgttgctgaaagagattaggaacaggtttggaaatgatcttcacatttcaaataagctgtttgttctggatgctggggcttctgggtcaaaggacatgaaggtacttcgaaatcatctgcaagaaatacgaagccagattgtttcggtctgtcctcccatgactcacctgtgtgagaaaatcatctccacgctgccttcctggaggaagctcaatggacccaaccagctgatgtcgctgcagcagtttgtgtacgacgtgcaggaccagctgaaccccctggccagcgaggaggacctcaggcgcattgctcagcagctccacagcacaggcgagatcaacatcatgcaaagtgaaacagttcaggacgtgctgctcctggacccccgctggctctgcacaaacgtcctggggaagttgctgtccgtggagaccccacgggcgctgcaccactaccggggccgctacaccgtggaggacatccagcgcctggtgcccgacagcgacgtggaggagctgctgcagatcctcgatgccatggacatctgcgcccgggacctgagcagcgggaccatggtggacgtcccagccctgatcaagacagacaacctgcaccgctcctgggctgatgaggaggacgaggtgatggtgtatggtggcgtgcgcatcgtgcccgtggaacacctcacccccttcccatgtggcatctttcacaaggtccaggtgaacctgtgccggtggatccaccagcaaagcacagagggcgacgcggacatccgcctgtgggtgaatggctgcaagctggccaaccgtggggccgagctgctggtgctgctggtcaaccacggccagggcattgaggtccaggtccgcggcctggagacggagaagatcaagtgctgcctgctgctggactcggtgtgcagcaccattgagaacgtcatggccaccacgctgccagggctcctgaccgtgaagcattacctgagcccccagcagctgcgggagcaccatgagcccgtcatgatctaccagccacgggacttcttccgggcacagactctgaaggaaacctcactgaccaacaccatgggggggtacaaggaaagcttcagcagcatcatgtgcttcgggtgtcacgacgtctactcacaggccagcctcggcatggacatccatgcatcagacctgaacctcctcactcggaggaaactgagtcgcctgctggacccgcccgaccccctggggaaggactggtgccttctcgccatgaacttaggcctccctgacctcgtggcaaagtacaacaccagtaacggggctcccaaggatttcctccccagccccctccacgccctgctgcgggaatggaccacctaccctgagagcacagtgggcaccctcatgtccaaactgagggagctgggtcgccgggatgccgcagactttttgctgaaggcatcctctgtgttcaaaatcaacctggatggcaatggccaggaggcctatgcctcgagctgcaacagcggcacctcttacaattccattagctctgttgtatcccggtgagggcagcctctggcttgggcagggtctgtttggactgcagaagcaagggggtgatgtagcccatccttccctttggagatgctgagggtgtttcttcctgcacccacagccagggggatgccactcctccctccggcttgacctgtttctctgccgctacctccctccccgtctcattccgttgtctgtggatggtcattgcagtttaagagcagaacagatcttttactttggccgcttgaaaagctagtgtacctcctctcagtgttttggactccatctctcatcctccagtaccttgcttcttactgataattttgctggaattcctaacttttcaatgacattttttttaactactatattgattgtcctttaaaaaagaaaagtgcatatttatccaaaatgtgtatttcttatacgcttttctttgttataccatttcctcagcttatctcttttatatttgtaggagaaactcccatgtatggaatcccactgtatgatttataaacagacaatatgtgagtgccttttgcagaagagggtgtgtttgaaatcatcggagtcagccaggagctgtcaccaaggaaacgctacctctctgtcccttgctgtatgctgatcatcgccagaggtgcttcaccctgagttttgttttgtattgttttctgacagtttttctgttttgtttggcaaggaaaggggagaagggaatcctcctccagggtgattttatgatcagtgttgttgctctaggaagacatttttccgtttgcttttgttccaatgtcaatgtgaacgtccacatgaaacctacacactgtcatgcttcatcattccctctcatctcaggtagaaggttgacacagttgtagggttacagagacctatgtaagaattcagaagacccctgactcatcatttgtggcagtcccttataattggtgcatagcagatggtttccacatttagatcctggtttcataacttcctgtacttgaagtctaaaagcagaaaataaaggaagcaagttttcttccatgattttaaattgtgatcgagttttaaattgataggagggaacatgtcctaattcttctgtcctgagaagcatgtaatgttaatgttatatcatatgtatatatatatatgcactatgtatatacatatatattaatactggtatttttacttaatctataaaatgtcgttaaaaagttgtttgtttttttctttttttataaataaactgttgctcgttgc

SEQ ID NO: 5280 - DNA, 2499 bp, Homo sapiens
  source 1..2499: mol_type = unassigned DNA; mol_type = unassigned DNA
agaacccgcagcgccggcctggcagggcagctcggaggtgggtgggccgcgccgccagcccgcttgcagggtccccattggccgcctgccggccgccctccgcccaaaaggcggcaaggagccgagaggctgcttcggagtgtgaggaggacagccggaccgagccaacgccggggactttgttccctccgcggaggggactcggcaactcgcagcggcagggtctggggccggcgcctgggagggatctgcgccccccactcactccctagctgtgttcccgccgccgccccggctagtctccggcgctggcgcctatggtcggcctccgacagcgctccggagggaccgggggagctcccaggcgcccgggactggagactgatgcatgagggggctacggaggcgcaggagcggtggtgatggtctgggaagcggagctgaagtgccctgggctttggtgaggcgtgacagtttatcatgaccgtgttcaggcaggaaaacgtggatgattactacgacaccggcgaggaacttggcagtggacagtttgcggttgtgaagaaatgccgtgagaaaagcaccggcctccagtatgccgccaaattcatcaagaaaaggaggactaagtccagccggcggggtgtgagccgcgaggacatcgagcgggaggtcagcatcctgaaggagatccagcaccccaatgtcatcaccctgcacgaggtctatgagaacaagacggacgtcatcctgatcttggaactcgttgcaggtggcgagctgtttgacttcttagctgaaaaggaatctttaactgaagaggaagcaactgaatttctcaaacaaattcttaatggtgtttactacctgcactcccttcaaatcgcccactttgatcttaagcctgagaacataatgcttttggatagaaatgtccccaaacctcggatcaagatcattgactttgggttggcccataaaattgactttggaaatgaatttaaaaacatatttgggactccagagtttgtcgctcctgagatagtcaactatgaacctcttggtcttgaggcagatatgtggagtatcggggtaataacctatatcctcctaagtggggcctccccatttcttggagacactaagcaagaaacgttagcaaatgtatccgctgtcaactacgaatttgaggatgaatacttcagtaataccagtgccctagccaaagatttcataagaagacttctggtcaaggatccaaagaagagaatgacaattcaagatagtttgcagcatccctggatcaagcctaaagatacacaacaggcacttagtagaaaagcatcagcagtaaacatggagaaattcaagaagtttgcagcccggaaaaaatggaaacaatccgttcgcttgatatcactgtgccaaagattatccaggtcattcctgtccagaagtaacatgagtgttgccagaagcgatgatactctggatgaggaagactcctttgtgatgaaagccatcatccatgccatcaacgatgacaatgtcccaggcctgcagcaccttctgggctcattatccaactatgatgttaaccaacccaacaagcacgggacacctccattactcattgctgctggctgtgggaatattcaaatactacagttgctcattaaaagaggctcgagaatcgatgtccaggataagggcgggtccaatgccgtctactgggctgctcggcatggccacgtcgataccttgaaatttctcagtgagaacaaatgccctttggatgtgaaagacaagtctggagagatggccctccacgtggcagctcgctatggccatgctgacgtggctcagttactgtgcagcttcggctcaaatcccaatatccaggacaaggaagaagaaacccccctgcactgtgctgcttggcacggctattactctgtggccaaagccctttgtgaagccggctgtaacgtgaacatcaagaaccgagaaggagagacgcccctcctgacagcctctgccaggggctaccacgacatcgtggagtgtctggccgaacatggagccgaccttaatgcttgcgacaaggtgccttatgggggaagactcatatgcactgggaagtgatctaggggtctagagggaccacaagactcctcagtttgtttccctaagataacaaacttgaatgcagcaaactgtaattaccccgtctcttctctgttccaaagattctgtgaacttttctatattgtatttaatagttaatattaatttatggcatataacaaaattcatgagttgatcaattgactttggtctctaaataatttttagcttttttagctttagagcaggtacagtgatgttcactgaatccgagacaattctcattgaggactgacattggcaacacgctattaatttttagataaacaaagaaatagatgttttacttatttctatcatccgctgtgttgt

SEQ ID NO: 5281 - DNA, 626 bp, Homo sapiens
  source 1..626: mol_type = unassigned DNA; mol_type = unassigned DNA
ccgcccaaaaggcggcaaggagccgagaggctgcttcggagtgtgaggaggacagccggaccgagccaacgccggggactttgttccctccgcggaggggactcggcaactcgcagcggcagggtctggggccggcgcctgggagggatctgcgccccccactcactccctagctgtgttcccgccgccgccccggctagtctccggcgctggcgcctatggtcggcctccgacagcgctccggagggaccgggggagctcccaggcgcccgggactggagactgatgcatgagggggctacggaggcgcaggagcggtggtgatggtctgggaagcggagctgaagtgccctgggctttggtgaggcgtgacagtttatcatgaccgtgttcaggcaggaaaacgtggatgattactacgacaccggcgaggaacttggcaggtgcagttagaagaaggtggaagaaaaaagaagttgacactccgattttccacatcatctaactaaaatggatttaaactaactttctctaactattaaatctttcttaggtaagtacagttgtatcccagctctagagttaatgtgctgggtgggtttttacaaataaaaaatctaaaacct

SEQ ID NO: 5282 - DNA, 5892 bp, Homo sapiens
  source 1..5892: mol_type = unassigned DNA; mol_type = unassigned DNA
ggaggacagccggaccgagccaacgccggggactttgttccctccgcggaggggactcggcaactcgcagcggcagggtctggggccggcgcctgggagggatctgcgccccccactcactccctagctgtgttcccgccgccgccccggctagtctccggcgctggcgcctatggtcggcctccgacagcgctccggagggaccgggggagctcccaggcgcccgggactggagactgatgcatgagggggctacggaggcgcaggagcggtggtgatggtctgggaagcggagctgaagtgccctgggctttggtgaggcgtgacagtttatcatgaccgtgttcaggcaggaaaacgtggatgattactacgacaccggcgaggaacttggcagtggacagtttgcggttgtgaagaaatgccgtgagaaaagcaccggcctccagtatgccgccaaattcatcaagaaaaggaggactaagtccagccggcggggtgtgagccgcgaggacatcgagcgggaggtcagcatcctgaaggagatccagcaccccaatgtcatcaccctgcacgaggtctatgagaacaagacggacgtcatcctgatcttggaactcgttgcaggtggcgagctgtttgacttcttagctgaaaaggaatctttaactgaagaggaagcaactgaatttctcaaacaaattcttaatggtgtttactacctgcactcccttcaaatcgcccactttgatcttaagcctgagaacataatgcttttggatagaaatgtccccaaacctcggatcaagatcattgactttgggttggcccataaaattgactttggaaatgaatttaaaaacatatttgggactccagagtttgtcgctcctgagatagtcaactatgaacctcttggtcttgaggcagatatgtggagtatcggggtaataacctatatcctcctaagtggggcctccccatttcttggagacactaagcaagaaacgttagcaaatgtatccgctgtcaactacgaatttgaggatgaatacttcagtaataccagtgccctagccaaagatttcataagaagacttctggtcaaggatccaaagaagagaatgacaattcaagatagtttgcagcatccctggatcaagcctaaagatacacaacaggcacttagtagaaaagcatcagcagtaaacatggagaaattcaagaagtttgcagcccggaaaaaatggaaacaatccgttcgcttgatatcactgtgccaaagattatccaggtcattcctgtccagaagtaacatgagtgttgccagaagcgatgatactctggatgaggaagactcctttgtgatgaaagccatcatccatgccatcaacgatgacaatgtcccaggcctgcagcaccttctgggctcattatccaactatgatgttaaccaacccaacaagcacgggacacctccattactcattgctgctggctgtgggaatattcaaatactacagttgctcattaaaagaggctcgagaatcgatgtccaggataagggcgggtccaatgccgtctactgggctgctcggcatggccacgtcgataccttgaaatttctcagtgagaacaaatgccctttggatgtgaaagacaagtctggagagatggccctccacgtggcagctcgctatggccatgctgacgtggctcagttactgtgcagcttcggctcaaatcccaatatccaggacaaggaagaagaaacccccctgcactgtgctgcttggcacggctattactctgtggccaaagccctttgtgaagccggctgtaacgtgaacatcaagaaccgagaaggagagacgcccctcctgacagcctctgccaggggctaccacgacatcgtggagtgtctggccgaacatggagccgaccttaatgcttgcgacaaggacggacacattgcccttcatctggctgtaagacggtgtcagatggaggtaatcaagactctcctcagccaagggtgtttcgtcgattatcaagacaggcacggcaatactcccctccatgtggcatgtaaagatggcaacatgcctatcgtggtggccctctgtgaagcaaactgcaatttggacatctccaacaagtatgggcgaacgcctctgcaccttgcggccaacaacggaatcctagacgtggtccggtatctctgtctgatgggagccagcgttgaggcgctgaccacggacggaaagacggcagaagatcttgctagatcggaacagcacgagcacgtagcaggtctccttgcaagacttcgaaaggatacgcaccgaggactcttcatccagcagctccgacccacacagaacctgcagccaagaattaagctcaagctgtttggccactcgggatccgggaaaaccacccttgtagaatctctcaagtgtgggctgctgaggagctttttcagaaggcgtcggcccagactgtcttccaccaactccagcaggttcccaccttcacccctggcttctaagcccacagtctcagtgagcatcaacaacctgtacccaggctgcgagaacgtgagtgtgaggagccgcagcatgatgttcgagccgggtcttaccaaagggatgctggaggtgtttgtggccccgacccaccacccgcactgctcggccgatgaccagtccaccaaggccatcgacatccagaacgcttatttgaatggagttggcgatttcagcgtgtgggagttctctggaaatcctgtgtatttctgctgttatgactattttgctgcaaatgatcccacgtcaatccatgttgttgtctttagtctagaagagccctatgagatccagctgaaccaagtgattttctggctcagtttcctgaagtcccttgtcccagttgaagaacccatagccttcggtggcaagctgaagaacccactccaagttgtcctggtggccacccacgctgacatcatgaatgttcctcgaccggctggaggcgagtttggatatgacaaagacacatcgttgctgaaagagattaggaacaggtttggaaatgatcttcacatttcaaataagctgtttgttctggatgctggggcttctgggtcaaaggacatgaaggtacttcgaaatcatctgcaagaaatacgaagccagattgtttcggtctgtcctcccatgactcacctgtgtgagaaaatcatctccacgctgccttcctggaggaagctcaatggacccaaccagctgatgtcgctgcagcagtttgtgtacgacgtgcaggaccagctgaaccccctggccagcgaggaggacctcaggcgcattgctcagcagctccacagcacaggcgagatcaacatcatgcaaagtgaaacagttcaggacgtgctgctcctggacccccgctggctctgcacaaacgtcctggggaagttgctgtccgtggagaccccacgggcgctgcaccactaccggggccgctacaccgtggaggacatccagcgcctggtgcccgacagcgacgtggaggagctgctgcagatcctcgatgccatggacatctgcgcccgggacctgagcagcgggaccatggtggacgtcccagccctgatcaagacagacaacctgcaccgctcctgggctgatgaggaggacgaggtgatggtgtatggtggcgtgcgcatcgtgcccgtggaacacctcacccccttcccatgtggcatctttcacaaggtccaggtgaacctgtgccggtggatccaccagcaaagcacagagggcgacgcggacatccgcctgtgggtgaatggctgcaagctggccaaccgtggggccgagctgctggtgctgctggtcaaccacggccagggcattgaggtccaggtccgcggcctggagacggagaagatcaagtgctgcctgctgctggactcggtgtgcagcaccattgagaacgtcatggccaccacgctgccagggctcctgaccgtgaagcattacctgagcccccagcagctgcgggagcaccatgagcccgtcatgatctaccagccacgggacttcttccgggcacagactctgaaggaaacctcactgaccaacaccatgggggggtacaaggaaagcttcagcagcatcatgtgcttcgggtgtcacgacgtctactcacaggccagcctcggcatggacatccatgcatcagacctgaacctcctcactcggaggaaactgagtcgcctgctggacccgcccgaccccctggggaaggactggtgccttctcgccatgaacttaggcctccctgacctcgtggcaaagtacaacaccagtaacggggctcccaaggatttcctccccagccccctccacgccctgctgcgggaatggaccacctaccctgagagcacagtgggcaccctcatgtccaaactgagggagctgggtcgccgggatgccgcagactttttgctgaaggcatcctctgtgttcaaaatcaacctggatggcaatggccaggaggcctatgcctcgagctgcaacagcggcacctcttacaattccattagctctgttgtatcccggtgagggcagcctctggcttgggcagggtctgtttggactgcagaagcaagggggtgatgtagcccatccttccctttggagatgctgagggtgtttcttcctgcacccacagccagggggatgccactcctccctccggcttgacctgtttctctgccgctacctccctccccgtctcattccgttgtctgtggatggtcattgcagtttaagagcagaacagatcttttactttggccgcttgaaaagctagtgtacctcctctcagtgttttggactccatctctcatcctccagtaccttgcttcttactgataattttgctggaattcctaacttttcaatgacattttttttaactactatattgattgtcctttaaaaaagaaaagtgcatatttatccaaaatgtgtatttcttatacgcttttctttgttataccatttcctcagcttatctcttttatatttgtaggagaaactcccatgtatggaatcccactgtatgatttataaacagacaatatgtgagtgccttttgcagaagagggtgtgtttgaaatcatcggagtcagccaggagctgtcaccaaggaaacgctacctctctgtcccttgctgtatgctgatcatcgccagaggtgcttcaccctgagttttgttttgtattgttttctgacagtttttctgttttgtttggcaaggaaaggggagaagggaatcctcctccagggtgattttatgatcagtgttgttgctctaggaagacatttttccgtttgcttttgttccaatgtcaatgtgaacgtccacatgaaacctacacactgtcatgcttcatcattccctctcatctcaggtagaaggttgacacagttgtagggttacagagacctatgtaagaattcagaagacccctgactcatcatttgtggcagtcccttataattggtgcatagcagatggtttccacatttagatcctggtttcataacttcctgtacttgaagtctaaaagcagaaaataaaggaagcaagttttcttccatgattttaaattgtgatcgagttttaaattgataggagggaacatgtcctaattcttctgtcctgagaagcatgtaatgttaatgttatatcatatgtatatatatatatgcactatgtatatacatatatattaatactggtatttttacttaatctataaaatgtcgttaaaaagttgtttgtttttttctttttttataaataaactgttgctcgtt

SEQ ID NO: 5283 - DNA, 579 bp, Homo sapiens
  source 1..579: mol_type = unassigned DNA; mol_type = unassigned DNA
actttgttccctccgcggaggggactcggcaactcgcagcggcagggtctggggccggcgcctgggagggatctgcgccccccactcactccctagctgtgttcccgccgccgccccggctagtctccggcgctggcgcctatggtcggcctccgacagcgctccggagggaccgggggagctcccaggcgcccgggactggagactgatgcatgagggggctacggaggcgcaggagcggtggtgatggtctgggaagcggagctgaagtgccctgggctttggtgaggcgtgacagtttatcatgaccgtgttcaggcaggaaaacgtggatgattactacgacaccggcgaggaacttggcaggtaaagggggtaccagaagcgtaccctcctggattgtggaaatgcataacgatggggccattgggtggtaaacaaatgcagtttgaatcaggcgtctccctcgccctttctggagatgcgcaaatcatagagaaaagagttactaacccagcggtaaaccgcctgatccaagggcctgggggtggaggagaggcagcagttcagggctagatt

SEQ ID NO: 5284 - DNA, 579 bp, Homo sapiens
  source 1..579: mol_type = unassigned DNA; mol_type = unassigned DNA
ggcgcgggggtgccaccgttgccgcaggctggagagagattgctcccagtgaggcgcgtaccgtctgggcgagggcttcattcttccgcggcgtccctggaggactggagactgatgcatgagggggctacggaggcgcaggagcggtggtgatggtctgggaagcggagctgaagtgccctgggctttggtgaggcgtgacagtttatcatgaccgtgttcaggcaggaaaacgtggatgattactacgacaccggcgaggaacttggcagtggacagtttgcggttgtgaagaaatgccgtgagaaaagcaccggcctccagtatgccgccaaattcatcaagaaaaggaggactaagtccagccggcggggtgtgagccgcgaggacatcgagcgggaggtcagcatcctgaaggagatccagcaccccaatgtcatcaccctgcacgaggtctatgagaacaagacggacgtcatcctgatcttggaactcgttgcaggtggcgagctgtttgacttcttagctgaaaaggaatctttaactgaagaggaagcaactgaatttctcaaacaaatt

SEQ ID NO: 5285 - DNA, 548 bp, Homo sapiens
  source 1..548: mol_type = unassigned DNA; mol_type = unassigned DNA
ttcattcttccgcggcgtccctggaggactggagactgatgcatgagggggctacggaggcgcaggagcggtggtgatggtctgggaagcggagctgaagtgccctgggctttggtgaggcgtgacagtttatcatgaccgtgttcaggcaggaaaacgtggatgattactacgacaccggcgaggaacttggcagtggacagtttgcggttgtgaagaaatgccgtgagaaaagcaccggcctccagtatgccgccaaattcatcaagaaaaggaggactaagtccagccggcggggtgtgagccgcgaggacatcgagcgggaggtcagcatcctgaaggagatccagcaccccaatgtcatcaccctgcacgaggtctatgagaacaagacggacgtcatcctgatcttggaactcctgagaacataatgcttttggatagaaatgtccccaaacctcggatcaagatcattgactttgggttggcccataaaattgactttggaaatgaatttaaaaacatatttgggactccagagtttgtcg

SEQ ID NO: 5286 - DNA, 4186 bp, Homo sapiens
  source 1..4186: mol_type = unassigned DNA; mol_type = unassigned DNA
gcaggagcggtggtgatggtctgggaagcggagctgaagtgccctgggctttggtgaggcgtgacagtttatcatgaccgtgttcaggcaggaaaacgtggatgattactacgacaccggcgaggaacttggcagtggacagtttgcggttgtgaagaaatgccgtgagaaaagcaccggcctccagtatgccgccaaattcatcaagaaaaggaggactaagtccagccggcggggtgtgagccgcgaggacatcgagcgggaggtcagcatcctgaaggagatccagcaccccaatgtcatcaccctgcacgaggtctatgagaacaagacggacgtcatcctgatcttggaactcgttgcaggtggcgagctgtttgacttcttagctgaaaaggaatctttaactgaagaggaagcaactgaatttctcaaacaaattcttaatggtgtttactacctgcactcccttcaaatcgcccactttgatcttaagcctgagaacataatgcttttggatagaaatgtccccaaacctcggatcaagatcattgactttgggttggcccataaaattgactttggaaatgaatttaaaaacatatttgggactccagagtttgtcgctcctgagatagtcaactatgaacctcttggtcttgaggcagatatgtggagtatcggggtaataacctatatcctcctaagtggggcctccccatttcttggagacactaagcaagaaacgttagcaaatgtatccgctgtcaactacgaatttgaggatgaatacttcagtaataccagtgccctagccaaagatttcataagaagacttctggtcaaggatccaaagaagagaatgacaattcaagatagtttgcagcatccctggatcaagcctaaagatacacaacaggcacttagtagaaaagcatcagcagtaaacatggagaaattcaagaagtttgcagcccggaaaaaatggaaacaatccgttcgcttgatatcactgtgccaaagattatccaggtcattcctgtccagaagtaacatgagtgttgccagaagcgatgatactctggatgaggaagactcctttgtgatgaaagccatcatccatgccatcaacgatgacaatgtcccaggcctgcagcaccttctgggctcattatccaactatgatgttaaccaacccaacaagcacgggacacctccattactcattgctgctggctgtgggaatattcaaatactacagttgctcattaaaagaggctcgagaatcgatgtccaggataagggcgggtccaatgccgtctactgggctgctcggcatggccacgtcgataccttgaaatttctcagtgagaacaaatgccctttggatgtgaaagacaagtctggagagatggccctccacgtggcagctcgctatggccatgctgacgtggctcagttactgtgcagcttcggctcaaatcccaatatccaggacaaggaagaagaaacccccctgcactgtgctgcttggcacggctattactctgtggccaaagccctttgtgaagccggctgtaacgtgaacatcaagaaccgagaaggagagacgcccctcctgacagcctctgccaggggctaccacgacatcgtggagtgtctggccgaacatggagccgaccttaatgcttgcgacaaggacggacacattgcccttcatctggctgtaagacggtgtcagatggaggtaatcaagactctcctcagccaagggtgtttcgtcgattatcaagacaggcacggcaatactcccctccatgtggcatgtaaagatggcaacatgcctatcgtggtggccctctgtgaagcaaactgcaatttggacatctccaacaagtatgggcgaacgcctctgcaccttgcggccaacaacggaatcctagacgtggtccggtatctctgtctgatgggagccagcgttgaggcgctgaccacggacggaaagacggcagaagatcttgctagatcggaacagcacgagcacgtagcaggtctccttgcaagacttcgaaaggatacgcaccgaggactcttcatccagcagctccgacccacacagaacctgcagccaagaattaagctcaagctgtttggccactcgggatccgggaaaaccacccttgtagaatctctcaagtgtgggctgctgaggagctttttcagaaggcgtcggcccagactgtcttccaccaactccagcaggttcccaccttcacccctggcttctaagcccacagtctcagtgagcatcaacaacctgtacccaggctgcgagaacgtgagtgtgaggagccgcagcatgatgttcgagccgggtcttaccaaagggatgctggaggtgtttgtggccccgacccaccacccgcactgctcggccgatgaccagtccaccaaggccatcgacatccagaacgcttatttgaatgccttcggtggcaagctgaagaacccactccaagttgtcctggtggccacccacgctgacatcatgaatgttcctcgaccggctggaggcgagtttggatatgacaaagacacatcgttgctgaaagagattaggaacaggtttggaaatgatcttcacatttcaaataagctgtttgttctggatgctggggcttctgggtcaaaggacatgaaggtacttcgaaatcatctgcaagaaatacgaagccagattgtttcggtctgtcctcccatgactcacctgtgtgagaaaatcatctccacgctgccttcctggaggaagctcaatggacccaaccagctgatgtcgctgcagcagtttgtgtacgacgtgcaggaccagctgaaccccctggccagcgaggaggacctcaggcgcattgctcagcagctccacagcacaggcgagatcaacatcatgcaaagtgaaacagttcaggacgtgctgctcctggacccccgctggctctgcacaaacgtcctggggaagttgctgtccgtggagaccccacgggcgctgcaccactaccggggccgctacaccgtggaggacatccagcgcctggtgcccgacagcgacgtggaggagctgctgcagatcctcgatgccatggacatctgcgcccgggacctgagcagcgggaccatggtggacgtcccagccctgatcaagacagacaacctgcaccgctcctgggctgatgaggaggacgaggtgatggtgtatggtggcgtgcgcatcgtgcccgtggaacacctcacccccttcccatgtggcatctttcacaaggtccaggtgaacctgtgccggtggatccaccagcaaagcacagagggcgacgcggacatccgcctgtgggtgaatggctgcaagctggccaaccgtggggccgagctgctggtgctgctggtcaaccacggccagggcattgaggtccaggtccgcggcctggagacggagaagatcaagtgctgcctgctgctggactcggtgtgcagcaccattgagaacgtcatggccaccacgctgccagggctcctgaccgtgaagcattacctgagcccccagcagctgcgggagcaccatgagcccgtcatgatctaccagccacgggacttcttccgggcacagactctgaaggaaacctcactgaccaacaccatgggggggtacaaggaaagcttcagcagcatcatgtgcttcgggtgtcacgacgtctactcacaggccagcctcggcatggacatccatgcatcagacctgaacctcctcactcggaggaaactgagtcgcctgctggacccgcccgaccccctggggaaggactggtgccttctcgccatgaacttaggcctccctgacctcgtggcaaagtacaacaccagtaacggggctcccaaggatttcctccccagccccctccacgccctgctgcgggaatggaccacctaccctgagagcacagtgggcaccctcatgtccaaactgagggagctgggtcgccgggatgccgcagactttttgctgaaggcatcctctgtgttcaaaatcaacctggatggcaatggccaggaggcctatgcctcgagctgcaacagcggcacctcttacaattccattagctctgttgtatcccggtgagggcagcctctggcttgg

SEQ ID NO: 5287 - DNA, 4334 bp, Homo sapiens
  source 1..4334: mol_type = unassigned DNA; mol_type = unassigned DNA
caggagcggtggtgatggtctgggaagcggagctgaagtgccctgggctttggtgaggcgtgacagtttatcatgaccgtgttcaggcaggaaaacgtggatgattactacgacaccggcgaggaacttggcagtggacagtttgcggttgtgaagaaatgccgtgagaaaagcaccggcctccagtatgccgccaaattcatcaagaaaaggaggactaagtccagccggcggggtgtgagccgcgaggacatcgagcgggaggtcagcatcctgaaggagatccagcaccccaatgtcatcaccctgcacgaggtctatgagaacaagacggacgtcatcctgatcttggaactcgttgcaggtggcgagctgtttgacttcttagctgaaaaggaatctttaactgaagaggaagcaactgaatttctcaaacaaattcttaatggtgtttactacctgcactcccttcaaatcgcccactttgatcttaagcctgagaacataatgcttttggatagaaatgtccccaaacctcggatcaagatcattgactttgggttggcccataaaattgactttggaaatgaatttaaaaacatatttgggactccagagtttgtcggagtatcggggtaataacctatatcctcctaagtggggcctccccatttcttggagacactaagcaagaaacgttagcaaatgtatccgctgtcaactacgaatttgaggatgaatacttcagtaataccagtgccctagccaaagatttcataagaagacttctggtcaaggatccaaagaagagaatgacaattcaagatagtttgcagcatccctggatcaagcctaaagatacacaacaggcacttagtagaaaagcatcagcagtaaacatggagaaattcaagaagtttgcagcccggaaaaaatggaaacaatccgttcgcttgatatcactgtgccaaagattatccaggtcattcctgtccagaagtaacatgagtgttgccagaagcgatgatactctggatgaggaagactcctttgtgatgaaagccatcatccatgccatcaacgatgacaatgtcccaggcctgcagcaccttctgggctcattatccaactatgatgttaaccaacccaacaagcacgggacacctccattactcattgctgctggctgtgggaatattcaaatactacagttgctcattaaaagaggctcgagaatcgatgtccaggataagggcgggtccaatgccgtctactgggctgctcggcatggccacgtcgataccttgaaatttctcagtgagaacaaatgccctttggatgtgaaagacaagtctggagagatggccctccacgtggcagctcgctatggccatgctgacgtggctcagttactgtgcagcttcggctcaaatcccaatatccaggacaaggaagaagaaacccccctgcactgtgctgcttggcacggctattactctgtggccaaagccctttgtgaagccggctgtaacgtgaacatcaagaaccgagaaggagagacgcccctcctgacagcctctgccaggggctaccacgacatcgtggagtgtctggccgaacatggagccgaccttaatgcttgcgacaaggacggacacattgcccttcatctggctgtaagacggtgtcagatggaggtaatcaagactctcctcagccaagggtgtttcgtcgattatcaagacaggcacggcaatactcccctccatgtggcatgtaaagatggcaacatgcctatcgtggtggccctctgtgaagcaaactgcaatttggacatctccaacaagtatgggcgaacgcctctgcaccttgcggccaacaacggaatcctagacgtggtccggtatctctgtctgatgggagccagcgttgaggcgctgaccacggacggaaagacggcagaagatcttgctagatcggaacagcacgagcacgtagcaggtctccttgcaagacttcgaaaggatacgcaccgaggactcttcatccagcagctccgacccacacagaacctgcagccaagaattaagctcaagctgtttggccactcgggatccgggaaaaccacccttgtagaatctctcaagtgtgggctgctgaggagctttttcagaaggcgtcggcccagactgtcttccaccaactccagcaggttcccaccttcacccctggcttctaagcccacagtctcagtgagcatcaacaacctgtacccaggctgcgagaacgtgagtgtgaggagccgcagcatgatgttcgagccgggtcttaccaaagggatgctggaggtgtttgtggccccgacccaccacccgcactgctcggccgatgaccagtccaccaaggccatcgacatccagaacgcttatttgaatggagttggcgatttcagcgtgtgggagttctctggaaatcctgtgtatttctgctgttatgactattttgctgcaaatgatcccacgtcaatccatgttgttgtctttagtctagaagagccctatgagatccagctgaaccaagtgattttctggctcagtttcctgaagtcccttgtcccagttgaagaacccatagccttcggtggcaagctgaagaacccactccaagttgtcctggtggccacccacgctgacatcatgaatgttcctcgaccggctggaggcgagtttggatatgacaaagacacatcgttgctgaaagagattaggaacaggtttggaaatgatcttcacatttcaaataagctgtttgttctggatgctggggcttctgggtcaaaggacatgaaggtacttcgaaatcatctgcaagaaatacgaagccagattgtttcggtctgtcctcccatgactcacctgtgtgagaaaatcatctccacgctgccttcctggaggaagctcaatggacccaaccagctgatgtcgctgcagcagtttgtgtacgacgtgcaggaccagctgaaccccctggccagcgaggaggacctcaggcgcattgctcagcagctccacagcacaggcgagatcaacatcatgcaaagtgaaacagttcaggacgtgctgctcctggacccccgctggctctgcacaaacgtcctggggaagttgctgtccgtggagaccccacgggcgctgcaccactaccggggccgctacaccgtggaggacatccagcgcctggtgcccgacagcgacgtggaggagctgctgcagatcctcgatgccatggacatctgcgcccgggacctgagcagcgggaccatggtggacgtcccagccctgatcaagacagacaacctgcaccgctcctgggctgatgaggaggacgaggtgatggtgtatggtggcgtgcgcatcgtgcccgtggaacacctcacccccttcccatgtggcatctttcacaaggtccaggtgaacctgtgccggtggatccaccagcaaagcacagagggcgacgcggacatccgcctgtgggtgaatggctgcaagctggccaaccgtggggccgagctgctggtgctgctggtcaaccacggccagggcattgaggtccaggtccgcggcctggagacggagaagatcaagtgctgcctgctgctggactcggtgtgcagcaccattgagaacgtcatggccaccacgctgccagggctcctgaccgtgaagcattacctgagcccccagcagctgcgggagcaccatgagcccgtcatgatctaccagccacgggacttcttccgggcacagactctgaaggaaacctcactgaccaacaccatgggggggtacaaggaaagcttcagcagcatcatgtgcttcgggtgtcacgacgtctactcacaggccagcctcggcatggacatccatgcatcagacctgaacctcctcactcggaggaaactgagtcgcctgctggacccgcccgaccccctggggaaggactggtgccttctcgccatgaacttaggcctccctgacctcgtggcaaagtacaacaccagtaacggggctcccaaggatttcctccccagccccctccacgccctgctgcgggaatggaccacctaccctgagagcacagtgggcaccctcatgtccaaactgagggagctgggtcgccgggatgccgcagactttttgctgaaggcatcctctgtgttcaaaatcaacctggatggcaatggccaggaggcctatgcctcgagctgcaacagcggcacctcttacaattccattagctctgttgtatcccggtgagggcagcctctggcttgg

SEQ ID NO: 5288 - DNA, 327 bp, Homo sapiens
  source 1..327: mol_type = unassigned DNA; mol_type = unassigned DNA
tttggaaatgaatttaaaaacatatttgggactccagagtttgtcgctcctgagatagtcaactatgaacctcttggtcttgaggcagatatgtggtaaggagtatgtccttggtgttgtttgctttctgatttatttgactattcttctgacatgtttttttgtttgttttgtgttgtttttaggagtatcggggtaataacctatatcctcctaagtggggcctccccatttcttggagacactaagcaagaaacgttagcaaatgtatccgctgtcaactacgaatttgaggatgaatacttcagtaataccagtgccctagcc

SEQ ID NO: 5289 - DNA, 567 bp, Homo sapiens
  source 1..567: mol_type = unassigned DNA; mol_type = unassigned DNA
atgtgggcttaatactcactgtgtggtggacaccccaacctcaggtccccatcctagccactataggggcatctgcccaaggtgggtgggtggaaccaaaggggacagagtggaaccaggcaggcctgggtgtaggccttgggttctggtctccatagcctgctcacagatgtggctctgaatcaccggctccttttcttctgcagtctggagagatggccctccacgtggcagctcgctatggccatgctgacgtggctcagttactgtgcagcttcggctcaaatcccaatatccaggacaaggaagaagaaacccccctgcactgtgctgcttggcacggctattactctgtggccaaagccctttgtgaagccggctgtaacgtgaacatcaagaaccgagaaggagagacgcccctcctgacagcctctgccaggggctaccacgacatcgtggagtgtctggccgaacatggagccgaccttaatgcttgcgacaaggacggacacattgcccttcatctggctgtaagacggtgtcagatggaggtaatcaagactctcc

SEQ ID NO: 5290 - DNA, 853 bp, Homo sapiens
  source 1..853: mol_type = unassigned DNA; mol_type = unassigned DNA
atactcactgtgtggtggacaccccaacctcaggtccccatcctagccactataggggcatctgcccaaggtgggtgggtggaaccaaaggggacagagtggaaccaggcaggcctgggtgtaggccttgggttctggtctccatagcctgctcacagatgtggctctgaatcaccggctccttttcttctgcagtctggagagatggccctccacgtggcagctcgctatggccatgctgacgtggctcagttactgtgcagcttcggctcaaatcccaatatccaggacaaggaagaagaaacccccctgcactgtgctgcttggcacggctattactctgtggccaaagccctttgtgaagccggctgtaacgtgaacatcaagaaccgagaaggagagacgcccctcctgacagcctctgccaggggctaccacgacatcgtggagtgtctggccgaacatggagccgaccttaatgcttgcgacaaggtgccttatgggggaagactcatatgcactgggaagtgatctaggggtctagagggaccacaagactcctcagtttgtttccctaagataacaaacttgaatgcagcaaactgtaattaccccgtctcttctctgttccaaagattctgtgaacttttctatattgtatttaatagttaatattaatttatggcatataacaaaattcatgagttgatcaattgactttggtctctaaataatttttagcttttttagctttagagcaggtacagtgatgttcactgaatccgagacaattctcattgaggactgacattggcaacacgctattaatttttagataaacaaagaaatagat

SEQ ID NO: 5291 - DNA, 696 bp, Homo sapiens
  source 1..696: mol_type = unassigned DNA; mol_type = unassigned DNA
gccggctgtaacgtgaacatcaagaaccgagaaggagagacgcccctcctgacagcctctgccaggggctaccacgacatcgtggagtgtctggccgaacatggagccgaccttaatgcttgcgacaaggacggacacattgcccttcatctggctgtaagacggtgtcagatggaggtaatcaagactctcctcagccaagggtgtttcgtcgattatcaagacaggcacggcaatactcccctccatgtggcatgtaaagatggcaacatgcctatcgtggtggccctctgtgaagcaaactgcaatttggacatctccaacaagtatgggcgaacgcctctgcaccttgcggccaacaacggaatcctagacgtggtccggtatctctgtctgatgggagccagcgttgaggcgctgaccacgtgatctctaaaactgcaacagaacagcccctacatgtcccttttctccccagtggcaggggaacagtgacagcttctgcctctcaggggtgacttcaaggactgaggcttgcagagagcactgagagctgggtcgagcacatattatgaggtggtgttcaataaatacttgctgtcatcgtgtatgttcatggtgtagatacagaaacaaatttattcagtgtgaaactgcagcctatgaaaaatctctaaataaaaagcaagcataaaa

SEQ ID NO: 5292 - DNA, 1064 bp, Homo sapiens
  source 1..1064: mol_type = unassigned DNA; mol_type = unassigned DNA
cccccgctgtgagagacatgatgtcatggaaggcagggtggtgcagtctaatgatgacactctgcacctcttcaagcgagtagttcacctggtctcagaaccatgtttcttatcaaaaactttagatattcctgggcacccctatgaattcagtacagttccctgggttaccttggcacacaatttgggaaccataggcacaaacaaggcttatgggcttgtcctggtattttcactaattaggatgtcttcaatatctgtcttccatgtcttcttccctggctgtgtctaaatttgaactatggtgcagatcttgctggaactctggaccttgagcccttgactcctgtctctttcaggccagcacagcaggaaacttacttaagttatctttgaagttgtattttgaagctcctcttttaattgcaaagtacttggaaaggttctgcctggctggcctgccccagtggagagcaagtttcaggagaagggagatggctccttcctcctttctggtgggccctgaccccttccttaaccttgtgtctccggaatgtcatcctcagcaactgcgtgagaagaacgacctttggccttttttctctcttcccagtatgggcgaacgcctctgcaccttgcggccaacaacggaatcctagacgtggtccggtatctctgtctgatgggagccagcgttgaggcgctgaccacggacggaaagacggcagaagatcttgctagatcggaacagcacgagcacgtagcaggtctccttgcaagacttcgaaaggtgagaagttctgttataggtctgaagttctctacctgtgtttatgtgaaaaagtctcagtctttttccttatttgagaatgagcaaaatgaggctctagacagccaggttttaggaacagtggtccctgtcctgtggtttacatgtcagtcggtataaatgcatcagctccctatctgttttcttctctatttggacttggaaatcatttagcatgtttgcagttgccgtgcctggttttccttctcccactctctctataataaaccactcc

SEQ ID NO: 5293 - DNA, 341 bp, Homo sapiens
  source 1..341: mol_type = unassigned DNA; mol_type = unassigned DNA
acaccgagacgtgctctttgtccacctggcttgcttctcacacctgctatgcttgtttctgcctcagacccacggaattggcgtatggaacacacacagctctccttttcagagaaaagaaactaatgcatttttctccaacaggacggaaagacggcagaagatcttgctagatcggaacagcacgagcacgtagcaggtctccttgcaagacttcgaaaggatacgcaccgaggactcttcatccagcagctccgacccacacagaacctgcagccaagaattaagctcaagctgtttggccactcgggatccgggaaaaccacccttgtagaatctct

SEQ ID NO: 5294 - DNA, 487 bp, Homo sapiens
  source 1..487: mol_type = unassigned DNA; mol_type = unassigned DNA
cattctggtccactttgagcaattttccttgtggcctaggagataggcttatcctgtcgttggccatgctggggccttctagggtcacagtgcacagcaggcgtggggccttcatctctgtggcatgttgcacttgtacctggagagtcggcctgggcatgaggccaacacaccgccctcacctgggcaggagaggcagccaggtaggaggacccaccccctgaagcagttccctctctgcccccagccttcggtggcaagctgaagaacccactccaagttgtcctggtggccacccacgctgacatcatgaatgttcctcgaccggctggaggcgagtttggatatgacaaagacacatcgttgctgaaagagattaggaacaggtttggaaatgatcttcacatttcaaataagctgtttgttctggatgctggggcttctgggtcaaaggacatgaaggtacttcgaaatcatctgcaagaaa

SEQ ID NO: 5295 - DNA, 5772 bp, Homo sapiens
  source 1..5772: mol_type = unassigned DNA; mol_type = unassigned DNA
ggcgcgggggtgccaccgttgccgcaggctggagagagattgctcccagtgaggcgcgtaccgtctgggcgagggcttcattcttccgcggcgtccctggaggactggagactgatgcatgagggggctacggaggcgcaggagcggtggtgatggtctgggaagcggagctgaagtgccctgggctttggtgaggcgtgacagtttatcatgaccgtgttcaggcaggaaaacgtggatgattactacgacaccggcgaggaacttggcagtggacagtttgcggttgtgaagaaatgccgtgagaaaagcaccggcctccagtatgccgccaaattcatcaagaaaaggaggactaagtccagccggcggggtgtgagccgcgaggacatcgagcgggaggtcagcatcctgaaggagatccagcaccccaatgtcatcaccctgcacgaggtctatgagaacaagacggacgtcatcctgatcttggaactcgttgcaggtggcgagctgtttgacttcttagctgaaaaggaatctttaactgaagaggaagcaactgaatttctcaaacaaattcttaatggtgtttactacctgcactcccttcaaatcgcccactttgatcttaagcctgagaacataatgcttttggatagaaatgtccccaaacctcggatcaagatcattgactttgggttggcccataaaattgactttggaaatgaatttaaaaacatatttgggactccagagtttgtcgctcctgagatagtcaactatgaacctcttggtcttgaggcagatatgtggagtatcggggtaataacctatatcctcctaagtggggcctccccatttcttggagacactaagcaagaaacgttagcaaatgtatccgctgtcaactacgaatttgaggatgaatacttcagtaataccagtgccctagccaaagatttcataagaagacttctggtcaaggatccaaagaagagaatgacaattcaagatagtttgcagcatccctggatcaagcctaaagatacacaacaggcacttagtagaaaagcatcagcagtaaacatggagaaattcaagaagtttgcagcccggaaaaaatggaaacaatccgttcgcttgatatcactgtgccaaagattatccaggtcattcctgtccagaagtaacatgagtgttgccagaagcgatgatactctggatgaggaagactcctttgtgatgaaagccatcatccatgccatcaacgatgacaatgtcccaggcctgcagcaccttctgggctcattatccaactatgatgttaaccaacccaacaagcacgggacacctccattactcattgctgctggctgtgggaatattcaaatactacagttgctcattaaaagaggctcgagaatcgatgtccaggataagggcgggtccaatgccgtctactgggctgctcggcatggccacgtcgataccttgaaatttctcagtgagaacaaatgccctttggatgtgaaagacaagtctggagagatggccctccacgtggcagctcgctatggccatgctgacgtggctcagttactgtgcagcttcggctcaaatcccaatatccaggacaaggaagaagaaacccccctgcactgtgctgcttggcacggctattactctgtggccaaagccctttgtgaagccggctgtaacgtgaacatcaagaaccgagaaggagagacgcccctcctgacagcctctgccaggggctaccacgacatcgtggagtgtctggccgaacatggagccgaccttaatgcttgcgacaaggacggacacattgcccttcatctggctgtaagacggtgtcagatggaggtaatcaagactctcctcagccaagggtgtttcgtcgattatcaagacaggcacggcaatactcccctccatgtggcatgtaaagatggcaacatgcctatcgtggtggccctctgtgaagcaaactgcaatttggacatctccaacaagtatgggcgaacgcctctgcaccttgcggccaacaacggaatcctagacgtggtccggtatctctgtctgatgggagccagcgttgaggcgctgaccacggacggaaagacggcagaagatcttgctagatcggaacagcacgagcacgtagcaggtctccttgcaagacttcgaaaggatacgcaccgaggactcttcatccagcagctccgacccacacagaacctgcagccaagaattaagctcaagctgtttggccactcgggatccgggaaaaccacccttgtagaatctctcaagtgtgggctgctgaggagctttttcagaaggcgtcggcccagactgtcttccaccaactccagcaggttcccaccttcacccctggcttctaagcccacagtctcagtgagcatcaacaacctgtacccaggctgcgagaacgtgagtgtgaggagccgcagcatgatgttcgagccgggtcttaccaaagggatgctggaggtgtttgtggccccgacccaccacccgcactgctcggccgatgaccagtccaccaaggccatcgacatccagaacgcttatttgaatggagttggcgatttcagcgtgtgggagttctctggaaatcctgtgtatttctgctgttatgactattttgctgcaaatgatcccacgtcaatccatgttgttgtctttagtctagaagagccctatgagatccagctgaaccaagtgattttctggctcagtttcctgaagtcccttgtcccagttgaagaacccatagccttcggtggcaagctgaagaacccactccaagttgtcctggtggccacccacgctgacatcatgaatgttcctcgaccggctggaggcgagtttggatatgacaaagacacatcgttgctgaaagagattaggaacaggtttggaaatgatcttcacatttcaaataagctgtttgttctggatgctggggcttctgggtcaaaggacatgaaggtacttcgaaatcatctgcaagaaatacgaagccagattgtttcggtctgtcctcccatgactcacctgtgtgagaaaatcatctccacgctgccttcctggaggaagctcaatggacccaaccagctgatgtcgctgcagcagtttgtgtacgacgtgcaggaccagctgaaccccctggccagcgaggaggacctcaggcgcattgctcagcagctccacagcacaggcgagatcaacatcatgcaaagtgaaacagttcaggacgtgctgctcctggacccccgctggctctgcacaaacgtcctggggaagttgctgtccgtggagaccccacgggcgctgcaccactaccggggccgctacaccgtggaggacatccagcgcctggtgcccgacagcgacgtggaggagctgctgcagatcctcgatgccatggacatctgcgcccgggacctgagcagcgggaccatggtggacgtcccagccctgatcaagacagacaacctgcaccgctcctgggctgatgaggaggacgaggtgatggtgtatggtggcgtgcgcatcgtgcccgtggaacacctcacccccttcccatgtggcatctttcacaaggtccaggtgaacctgtgccggtggatccaccagcaaagcacagagggcgacgcggacatccgcctgtgggtgaatggctgcaagctggccaaccgtggggccgagctgctggtgctgctggtcaaccacggccagggcattgaggtccaggtccgcggcctggagacggagaagatcaagtgctgcctgctgctggactcggtgtgcagcaccattgagaacgtcatggccaccacgctgccagggctcctgaccgtgaagcattacctgagcccccagcagctgcgggagcaccatgagcccgtcatgatctaccagccacgggacttcttccgggcacagactctgaaggaaacctcactgaccaacaccatgggggggtacaaggaaagcttcagcagcatcatgtgcttcgggtgtcacgacgtctactcacaggccagcctcggcatggacatccatgcatcagacctgaacctcctcactcggaggaaactgagtcgcctgctggacccgcccgaccccctggggaaggactggtgccttctcgccatgaacttaggcctccctgacctcgtggcaaagtacaacaccagtaacggggctcccaaggatttcctccccagccccctccacgccctgctgcgggaatggaccacctaccctgagagcacagtgggcaccctcatgtccaaactgagggagctgggtcgccgggatgccgcagactttttgctgaaggcatcctctgtgttcaaaatcaacctggatggcaatggccaggaggcctatgcctcgagctgcaacagcggcacctcttacaattccattagctctgttgtatcccggtgagggcagcctctggcttgggcagggtctgtttggactgcagaagcaagggggtgatgtagcccatccttccctttggagatgctgagggtgtttcttcctgcacccacagccagggggatgccactcctccctccggcttgacctgtttctctgccgctacctccctccccgtctcattccgttgtctgtggatggtcattgcagtttaagagcagaacagatcttttactttggccgcttgaaaagctagtgtacctcctctcagtgttttggactccatctctcatcctccagtaccttgcttcttactgataattttgctggaattcctaacttttcaatgacattttttttaactactatattgattgtcctttaaaaaagaaaagtgcatatttatccaaaatgtgtatttcttatacgcttttctttgttataccatttcctcagcttatctcttttatatttgtaggagaaactcccatgtatggaatcccactgtatgatttataaacagacaatatgtgagtgccttttgcagaagagggtgtgtttgaaatcatcggagtcagccaggagctgtcaccaaggaaacgctacctctctgtcccttgctgtatgctgatcatcgccagaggtgcttcaccctgagttttgttttgtattgttttctgacagtttttctgttttgtttggcaaggaaaggggagaagggaatcctcctccagggtgattttatgatcagtgttgttgctctaggaagacatttttccgtttgcttttgttccaatgtcaatgtgaacgtccacatgaaacctacacactgtcatgcttcatcattccctctcatctcaggtagaaggttgacacagttgtagggttacagagacctatgtaagaattcagaagacccctgactcatcatttgtggcagtcccttataattggtgcatagcagatggtttccacatttagatcctggtttcataacttcctgtacttgaagtctaaaagcagaaaataaaggaagcaagttttcttccatgattttaaattgtgatcgagttttaaattgataggagggaacatgtcctaattcttctgtcctgagaagcatgtaatgttaatgttatatcatatgtatatatatatatgcactatgtatatacatatatattaatactggtatttttacttaatctataaaatgtcgttaaaaagttgtttgtttttttctttttttataaataaactgttgctcgttgcatt

SEQ ID NO: 5296 - DNA, 5899 bp, Homo sapiens
  source 1..5899: mol_type = unassigned DNA; mol_type = unassigned DNA
agagcgcgccagcgagcccggagcgcggagctgggaggagcagcgagcgccgcgcagaacccgcagcgccggcctggcagggcagctcggaggtgggtgggccgcgccgccagcccgcttgcagggtccccattggccgcctgccggccgccctccgcccaaaaggcggcaaggagccgagaggctgcttcggagtgtgaggaggacagccggaccgagccaacgccggggactttgttccctccgcggaggggactcggcaactcgcagcggcagggtctggggccggcgcctgggagggatctgcgccccccactcactccctagctgtgttcccgccgccgccccggctagtctccggcgctggcgcctatggtcggcctccgacagcgctccggagggaccgggggagctcccaggcgcccgggactggagactgatgcatgagggggctacggaggcgcaggagcggtggtgatggtctgggaagcggagctgaagtgccctgggctttggtgaggcgtgacagtttatcatgaccgtgttcaggcaggaaaacgtggatgattactacgacaccggcgaggaacttggcagtggacagtttgcggttgtgaagaaatgccgtgagaaaagcaccggcctccagtatgccgccaaattcatcaagaaaaggaggactaagtccagccggcggggtgtgagccgcgaggacatcgagcgggaggtcagcatcctgaaggagatccagcaccccaatgtcatcaccctgcacgaggtctatgagaacaagacggacgtcatcctgatcttggaactcgttgcaggtggcgagctgtttgacttcttagctgaaaaggaatctttaactgaagaggaagcaactgaatttctcaaacaaattcttaatggtgtttactacctgcactcccttcaaatcgcccactttgatcttaagcctgagaacataatgcttttggatagaaatgtccccaaacctcggatcaagatcattgactttgggttggcccataaaattgactttggaaatgaatttaaaaacatatttgggactccagagtttgtcgctcctgagatagtcaactatgaacctcttggtcttgaggcagatatgtggagtatcggggtaataacctatatcctcctaagtggggcctccccatttcttggagacactaagcaagaaacgttagcaaatgtatccgctgtcaactacgaatttgaggatgaatacttcagtaataccagtgccctagccaaagatttcataagaagacttctggtcaaggatccaaagaagagaatgacaattcaagatagtttgcagcatccctggatcaagcctaaagatacacaacaggcacttagtagaaaagcatcagcagtaaacatggagaaattcaagaagtttgcagcccggaaaaaatggaaacaatccgttcgcttgatatcactgtgccaaagattatccaggtcattcctgtccagaagtaacatgagtgttgccagaagcgatgatactctggatgaggaagactcctttgtgatgaaagccatcatccatgccatcaacgatgacaatgtcccaggcctgcagcaccttctgggctcattatccaactatgatgttaaccaacccaacaagcacgggacacctccattactcattgctgctggctgtgggaatattcaaatactacagttgctcattaaaagaggctcgagaatcgatgtccaggataagggcgggtccaatgccgtctactgggctgctcggcatggccacgtcgataccttgaaatttctcagtgagaacaaatgccctttggatgtgaaagacaagtctggagagatggccctccacgtggcagctcgctatggccatgctgacgtggctcagttactgtgcagcttcggctcaaatcccaatatccaggacaaggaagaagaaacccccctgcactgtgctgcttggcacggctattactctgtggccaaagccctttgtgaagccggctgtaacgtgaacatcaagaaccgagaaggagagacgcccctcctgacagcctctgccaggggctaccacgacatcgtggagtgtctggccgaacatggagccgaccttaatgcttgcgacaaggacggacacattgcccttcatctggctgtaagacggtgtcagatggaggtaatcaagactctcctcagccaagggtgtttcgtcgattatcaagacaggcacggcaatactcccctccatgtggcatgtaaagatggcaacatgcctatcgtggtggccctctgtgaagcaaactgcaatttggacatctccaacaagtatgggcgaacgcctctgcaccttgcggccaacaacggaatcctagacgtggtccggtatctctgtctgatgggagccagcgttgaggcgctgaccacggacggaaagacggcagaagatcttgctagatcggaacagcacgagcacgtagcaggtctccttgcaagacttcgaaaggatacgcaccgaggactcttcatccagcagctccgacccacacagaacctgcagccaagaattaagctcaagctgtttggccactcgggatccgggaaaaccacccttgtagaatctctcaagtgtgggctgctgaggagctttttcagaaggcgtcggcccagactgtcttccaccaactccagcaggttcccaccttcacccctggcttctaagcccacagtctcagtgagcatcaacaacctgtacccaggctgcgagaacgtgagtgtgaggagccgcagcatgatgttcgagccgggtcttaccaaagggatgctggaggtgtttgtggccccgacccaccacccgcactgctcggccgatgaccagtccaccaaggccatcgacatccagaacgcttatttgaatgccttcggtggcaagctgaagaacccactccaagttgtcctggtggccacccacgctgacatcatgaatgttcctcgaccggctggaggcgagtttggatatgacaaagacacatcgttgctgaaagagattaggaacaggtttggaaatgatcttcacatttcaaataagctgtttgttctggatgctggggcttctgggtcaaaggacatgaaggtacttcgaaatcatctgcaagaaatacgaagccagattgtttcggtctgtcctcccatgactcacctgtgtgagaaaatcatctccacgctgccttcctggaggaagctcaatggacccaaccagctgatgtcgctgcagcagtttgtgtacgacgtgcaggaccagctgaaccccctggccagcgaggaggacctcaggcgcattgctcagcagctccacagcacaggcgagatcaacatcatgcaaagtgaaacagttcaggacgtgctgctcctggacccccgctggctctgcacaaacgtcctggggaagttgctgtccgtggagaccccacgggcgctgcaccactaccggggccgctacaccgtggaggacatccagcgcctggtgcccgacagcgacgtggaggagctgctgcagatcctcgatgccatggacatctgcgcccgggacctgagcagcgggaccatggtggacgtcccagccctgatcaagacagacaacctgcaccgctcctgggctgatgaggaggacgaggtgatggtgtatggtggcgtgcgcatcgtgcccgtggaacacctcacccccttcccatgtggcatctttcacaaggtccaggtgaacctgtgccggtggatccaccagcaaagcacagagggcgacgcggacatccgcctgtgggtgaatggctgcaagctggccaaccgtggggccgagctgctggtgctgctggtcaaccacggccagggcattgaggtccaggtccgcggcctggagacggagaagatcaagtgctgcctgctgctggactcggtgtgcagcaccattgagaacgtcatggccaccacgctgccagggctcctgaccgtgaagcattacctgagcccccagcagctgcgggagcaccatgagcccgtcatgatctaccagccacgggacttcttccgggcacagactctgaaggaaacctcactgaccaacaccatgggggggtacaaggaaagcttcagcagcatcatgtgcttcgggtgtcacgacgtctactcacaggccagcctcggcatggacatccatgcatcagacctgaacctcctcactcggaggaaactgagtcgcctgctggacccgcccgaccccctggggaaggactggtgccttctcgccatgaacttaggcctccctgacctcgtggcaaagtacaacaccagtaacggggctcccaaggatttcctccccagccccctccacgccctgctgcgggaatggaccacctaccctgagagcacagtgggcaccctcatgtccaaactgagggagctgggtcgccgggatgccgcagactttttgctgaaggcatcctctgtgttcaaaatcaacctggatggcaatggccaggaggcctatgcctcgagctgcaacagcggcacctcttacaattccattagctctgttgtatcccggtgagggcagcctctggcttgggcagggtctgtttggactgcagaagcaagggggtgatgtagcccatccttccctttggagatgctgagggtgtttcttcctgcacccacagccagggggatgccactcctccctccggcttgacctgtttctctgccgctacctccctccccgtctcattccgttgtctgtggatggtcattgcagtttaagagcagaacagatcttttactttggccgcttgaaaagctagtgtacctcctctcagtgttttggactccatctctcatcctccagtaccttgcttcttactgataattttgctggaattcctaacttttcaatgacattttttttaactactatattgattgtcctttaaaaaagaaaagtgcatatttatccaaaatgtgtatttcttatacgcttttctttgttataccatttcctcagcttatctcttttatatttgtaggagaaactcccatgtatggaatcccactgtatgatttataaacagacaatatgtgagtgccttttgcagaagagggtgtgtttgaaatcatcggagtcagccaggagctgtcaccaaggaaacgctacctctctgtcccttgctgtatgctgatcatcgccagaggtgcttcaccctgagttttgttttgtattgttttctgacagtttttctgttttgtttggcaaggaaaggggagaagggaatcctcctccagggtgattttatgatcagtgttgttgctctaggaagacatttttccgtttgcttttgttccaatgtcaatgtgaacgtccacatgaaacctacacactgtcatgcttcatcattccctctcatctcaggtagaaggttgacacagttgtagggttacagagacctatgtaagaattcagaagacccctgactcatcatttgtggcagtcccttataattggtgcatagcagatggtttccacatttagatcctggtttcataacttcctgtacttgaagtctaaaagcagaaaataaaggaagcaagttttcttccatgattttaaattgtgatcgagttttaaattgataggagggaacatgtcctaattcttctgtcctgagaagcatgtaatgttaatgttatatcatatgtatatatatatatgcactatgtatatacatatatattaatactggtatttttacttaatctataaaatgtcgttaaaaagttgtttgtttttttctttttttataaataaactgttgctcgttgcatt

SEQ ID NO: 5297 - DNA, 4835 bp, Homo sapiens
  source 1..4835: mol_type = unassigned DNA; mol_type = unassigned DNA
gattgtatgttccaggcctcaatgaggagtccaaacatggagccattcaagcagcagaaggtggaggacttttatgacatcggagaggagctggggagtggccagtttgccatcgtgaagaagtgccgggagaagagcacggggcttgagtatgcagccaagttcatcaagaagcggcagagccgggcgagccggcgcggtgtgagccgggaggagatcgagcgggagagtgtctggaggagagctcttcgatttcctggcccagaaggagtcactgagtgaggaggaggccaccagcttcattaagcagatcctggatggggtgaactaccttcacacaaagaaaattgctcactttgatctcaagccagaaaacattatgttgttagacaagaatattcccattccacacatcaagctgattgactttggtctggctcacgaaatagaagatggagttgaatttaagaatatttttgggacgccggaatttgttgctccagaaattgtgaactacgagcccctgggtctggaggctgacatgtggagcataggcgtcatcacctacatcctcttaagtggagcatcccctttcctgggagacacgaagcaggaaacactggcaaatatcacagcagtgagttacgactttgatgaggaattcttcagccagacgagcgagctggccaaggactttattcggaagcttctggttaaagagacccggaaacggctcacaatccaagaggctctcagacacccctggatcacgccggtggacaaccagcaagccatggtgcgcagggagtctgtggtcaatctggagaacttcaggaagcagtatgtccgcaggcggtggaagctttccttcagcatcgtgtccctgtgcaaccacctcacccgctcgctgatgaagaaggtgcacctgaggccggatgaggacctggtgggtaaatgcatgccctcttcttgggcagaattctggggtagcctggagctcagggatgggtgagttccctttcccctcacaaggcaggtgggtgttcactgtttccagccagttctgctggcccagtcctcctcttccctgaaggctgaagtgtgatcttcagaggagtgtgttctggggacctctgggtggtgccgggaggggaccactgatgcagcagcatgaactcctggaggatctcccatcctttcctggtgggccttcagaggggccgctgctgccggctgaccacagacaacccaaaatgtatttctgataacccaaaagctgctttagaatgggagctttacattcttttttccatatttctatttctgctttgtttcagattaccatcatcataatatttagacaatatcttatatttgattactttattgccattttgtatacatttaaagggagtagcttataacagaatatactggtgaagagggtgccctctgcagtcagactaccaggattcaaatctgccacttaccgtgtgaccttgaggaaattacttaacctctctgtgctgatagttcatcatttgtaaaatagggttaataatagttcctaaagattaaataatgacatattcttcctcttcttcttcttctttttttttttttttttgtttgtttagacagagtttcactcttattgcttaggttggagtgcaatggcgcgatctcggctcaccgcaacctctgcctcctggcttcaagcgattctcctgcgtcagcctcctgagtagctgggattacagtcatgcgccaccacacccagctaattttgtatttttagtagagatggggtttctccatgttggtcaggctggtctcgaactcccgacttcaggtgatctgcccgcctcggcctcccaaaatgctgggattacaggcataagccaccatgccaggccaataatgacatattcttaaagcctggcatgtaagtgctcagtaagcgttagcaattgttgttgtttaaaaccttcctgtaggctggcagtagtggttcgtgcctatagtcccagcactttgggtggctgaggcgggaggttcatttaaggccaggagttaaagaccagcccaggcaacaacagtgagaccctgactctacaaaacaaaaacaaacaaacaaacaaaaaaattagccaggtatggtgacaggcacctatagtcctagctactcagggagctgaggtgggaggatcacttgagcccaggagttaaaggctgcagtgcagtggcaccatctcagctcgctgcaacctctgcctcccgggttcaagagattctcctgccttagcctcctgactagctgggattacaggcatgagccaccacgcccagccaaaaagaatgtcagtttctttccaaacttttgttcttgtacaaatattcttaaatagtactctttttactcaaatagcaagcaccatcagctcaaaggttcatcctagaagtggaaaaatgttgggtcccagatatctgttatgcagttttcccaaagggactttccttaaaaaaaaaaaaaaaaagagtaatgataggtccttttgtttaggaagcactggaattgaacattggacaacagatattttaggaatgaagtcactgtggattagtacttcttttaataattttataattacattagatcatcatgacttggatgaaaagacattatggcctcggggtggctgcctcagctctggtttgccatgtaggaactgacagacagtactttatactcatttcctgttttataaaaatggagctcagaagtcatttccctggaaacactggtcagcaaggcggctgaaggtgcagcccatcaaagaagaaggggcatgggatggtggctgtcaagcatggggagtaccttgtggctcacacccatcctccagtctctctaggctgagctcaggagacccagcagccacagaccacccagccaagtggccttgattatatggcagccacaaagggaactagatgtaattttctttattataatttggcctctcctgatgtctggtttcccttagatgccctgctgctttccttcctccaagcagttggtctggcctcgtttcagatccctcccatcccccagcccctggatggatcagcaggcttgctttcaccacccacctccctggcttgtagtcccgtggtccaggtgaatcaacccaggttgcccagcacagccccattcctggcgtctcatgatcctcctgccctggacctctttctcttttttttctccagaggaactgtgagagtgacactgaggaggacatcgccaggaggaaagccctccacccacggaggaggagcagcacctcctaactggcctgacctgcagtggccgccagggaggtctgggcccagcggggctcccttctgtgcagacttttggacccagctcagcaccagcacccgggcgtcctgagcactttgcaagagagatgggcccaaggaattcagaagagcttgcaggcaagccaggagaccctgggagctgtggctgtcttctgtggaggaggctccagcattcccaaagctcttaattctccataaaatgggctttcctctgtctgccatcctcagagtctggggtgggagtgtggacttaggaaaacaatataaaggacatcctcatcatcacggggtgaaggtcagactaaggcagccttcttcacaggctgagggggttcagaaccagcctggccaaaaattacaccagagagacagagtcctccccattgggaacagggtgattgaggaaagtgaaccttgggtgtgagggaccaatcctgtgacctcccagaaccatggaagccaggacgtcaggctgaccaacacctcagaccttctgaagcagcccattgctggcccgccatgttgtaattttgctcatttttattaaacttctggtttacctgatgcttggcttcttttagggctacccccatctcatttcctttagcccgtgtgcctgtaactctgagggggggcacccagtggggtgctgagtgggcagaatctcagaaggtcctcctgaaccgtccgcgcaggcctgcagtgggcctgcctcctccttgcttccctaacaggaaggtgtccagttcaagagaacccacccagagactgggagtggtggctcacgcctataatccctgcgctttggcagtccgaggcaggggaattgcttgaactcaggagttggagaccagcctgggcaacatggcaaaacgcagtctgtacaaaaaatacaaaaaattagccaggtgtaggggtaggcacctggcatcccagctactccaggggctgaggtgacagcattgcttaagcccagaaggtcgaggctgcagtgagctgagatcacgccactgcactccagtctgggtgacagagagagaccatatccaaaaaaaaaaaaagttgccagagacgagtatgcccatgctccctctacctcactgccaccactcctgctgttaggagctgagtgtgtctccctaaaatttctatgttgaagtcttaacccttggtaccacagaatatcactgtatttggagatggggtctttagaaaggcacttaaattaaaatgagctcactgatatgggccccgatgcaatataattggtgtccttataagaaggggaggttaggacacgcaggaaagaccacatgaaggcccaggagtgggagggggaatagccatcgacaaactaagggggcctcagaggaaaccaaccctgctgacacctcaatcttagactctggcctcaaaaattgtaagaaaataaacttctgtcttttaagcca

SEQ ID NO: 5298 - DNA, 1741 bp, Homo sapiens
  source 1..1741: mol_type = unassigned DNA; mol_type = unassigned DNA
gaccgcggcagctcagcctcccgccgattgtatgttccaggcctcaatgaggagtccaaacatggagccattcaagcagcagaaggtggaggacttttatgacatcggagaggagctggggagtggccagtttgccatcgtgaagaagtgccgggagaagagcacggggcttgagtatgcagccaagttcatcaagaagcggcagagccgggcgagccggcgcggtgtgagccgggaggagatcgagcgggaggtgagcatcctgcggcaggtgctgcaccacaatgtcatcacgctgcacgacgtctatgagaaccgcaccgacgtggtgctcatccttgagctagtgtctggaggagagctcttcgatttcctggcccagaaggagtcactgagtgaggaggaggccaccagcttcattaagcagatcctggatggggtgaactaccttcacacaaagaaaattgctcactttgatctcaagccagaaaacattatgttgttagacaagaatattcccattccacacatcaagctgattgactttggtctggctcacgaaatagaagatggagttgaatttaagaatatttttgggacgccggaatttgttgctccagaaattgtgaactacgagcccctgggtctggaggctgacatgtggagcataggcgtcatcacctacatcctcttaagtggagcatcccctttcctgggagacacgaagcaggaaacactggcaaatatcacagcagtgagttacgactttgatgaggaattcttcagccagacgagcgagctggccaaggactttattcggaagcttctggttaaagagacccggaaacggctcacaatccaagaggctctcagacacccctggatcacgccggtggacaaccagcaagccatggtgcgcagggagtctgtggtcaatctggagaacttcaggaagcagtatgtccgcaggcggtggaagctttccttcagcatcgtgtccctgtgcaaccacctcacccgctcgctgatgaagaaggtgcacctgaggccggatgaggacctgaggaactgtgagagtgacactgaggaggacatcgccaggaggaaagccctccacccacggaggaggagcagcacctcctaactggcctgacctgcagtggccgccagggaggtctgggcccagcggggctcccttctgtgcagacttttggacccagctcagcaccagcacccgggcgtcctgagcactttgcaagagagatgggcccaaggaattcagaagagcttgcaggcaagccaggagaccctgggagctgtggctgtcttctgtggaggaggctccagcattcccaaagctcttaattctccataaaatgggctttcctctgtctgccatcctcagagtctggggtgggagtgtggacttaggaaaacaatataaaggacatcctcatcatcacggggtgaaggtcagactaaggcagccttcttcacaggctgagggggttcagaaccagcctggccaaaaattacaccagagagacagagtcctccccattgggaacagggtgattgaggaaagtgaaccttgggtgtgagggaccaatcctgtgacctcccagaaccatggaagccaggacgtcaggctgaccaacacctcagaccttctgaagcagcccattgctggcccgccatgttgtaattttgctcatttttattaaacttctggtttacctga

SEQ ID NO: 5299 - DNA, 539 bp, Homo sapiens
  source 1..539: mol_type = unassigned DNA; mol_type = unassigned DNA
ctttcctgggaaaacagccggtggacaaccagcaagccatggtgcgcagggagtctgtggtcaatctggagaacttcaggaagcagtatgtccgcaggcggtggaagctttccttcagcatcgtgtccctgtgcaaccacctcacccgctcgctgatgaagaaggtgcacctgaggccggatgaggacctgaggaactgtgagagtgacactgaggaggacatcgccaggaggaaagccctccacccacggaggaggagcagcacctcctaactggcctgacctgcagtggccgccagggaggtctgggcccagcggggctcccttctgtgcagacttttggacccagctcagcaccagcacccgggcgtcctgagcactttgcaagagagatgggcccaaggaattcagaagagcttgcaggcaagccaggagaccctgggagctgtggctgtcttctgtggaggaggctccagcattcccaaagctcttaattctccataaaatgggctttcctctgtctgccatcctcagagtctg

SEQ ID NO: 5300 - DNA, 584 bp, Homo sapiens
  source 1..584: mol_type = unassigned DNA; mol_type = unassigned DNA
atgaagaaggtgcacctgaggccggatgaggacctgacagagtttcactcttattgcttaggttggagtgcaatggcgcgatctcggctcaccgcaacctctgcctcctggcttcaagcgattctcctgcgtcagcctcctgagtagctgggattacagtcatgcgccaccacacccagctaattttgtatttttagtagagatggggtttctccatgttggtcaggctggtctcgaactcccgacttcaggtgatctgcccgcctcggcctcccaaaatgctgggattacaggcataagccaccatgccaggccaataatgacatattcttaaagcctggcatgtaagtgctcagtaagcgttagcaattgttgttgtttaaaaccttcctgtaggctggcagtagtggttcgtgcctatagtcccagcactttgggtggctgaggcgggaggttcatttaaggccaggagttaaagaccagcccaggcaacaacagtgagaccctgactctacaaaacaaaaacaaacaaacaaacaaaaaaattagccagatcatcatgacttggatgaaaagacattatg

SEQ ID NO: 5301 - DNA, 537 bp, Homo sapiens
  source 1..537: mol_type = unassigned DNA; mol_type = unassigned DNA
agccttccagctccctgcagcagtcatggggcagggttccccgagtccgtaatccccatttccacctactttcccttagttatttgattccctgtctgtcgtactcagcttaagtggagcatcccctttcctgggagacacgaagcaggaaacactggcaaatatcacagcagtgagttacgactttgatgaggaattcttcagccagacgagcgagctggccaaggactttattcggaagcttctggttaaagagacccggaaacggctcacaatccaagaggctctcagacacccctggatcacgccggtggacaaccagcaagccatggtgcgcagggagtctgtggtcaatctggagaacttcaggaagcagtatgtccgcaggcggtggaagctttccttcagcatcgtgtccctgtgcaaccacctcacccgctcgctgatgaagaaggtgcacctgaggccggatgaggacctggtgggtaaatgcatgccctcttcttgggcagaattctggggtagcctggagctcag

SEQ ID NO: 5302 - DNA, 8086 bp, Homo sapiens
  source 1..8086: mol_type = unassigned DNA; mol_type = unassigned DNA
gaccgcggcagctcagcctcccgccgattgtatgttccaggcctcaatgaggagtccaaacatggagccattcaagcagcagaaggtggaggacttttatgacatcggagaggagctggggagtggccagtttgccatcgtgaagaagtgccgggagaagagcacggggcttgagtatgcagccaagttcatcaagaagcggcagagccgggcgagccggcgcggtgtgagccgggaggagatcgagcgggaggtgagcatcctgcggcaggtgctgcaccacaatgtcatcacgctgcacgacgtctatgagaaccgcaccgacgtggtgctcatccttgagctagtgtctggaggagagctcttcgatttcctggcccagaaggagtcactgagtgaggaggaggccaccagcttcattaagcagatcctggatggggtgaactaccttcacacaaagaaaattgctcactttgatctcaagccagaaaacattatgttgttagacaagaatattcccattccacacatcaagctgattgactttggtctggctcacgaaatagaagatggagttgaatttaagaatatttttgggacgccggaatttgttgctccagaaattgtgaactacgagcccctgggtctggaggctgacatgtggagcataggcgtcatcacctacatcctcttaagtggagcatcccctttcctgggagacacgaagcaggaaacactggcaaatatcacagcagtgagttacgactttgatgaggaattcttcagccagacgagcgagctggccaaggactttattcggaagcttctggttaaagagacccggaaacggctcacaatccaagaggctctcagacacccctggatcacgtcaaaaggagaaggcagagcccctgaacagcggaagacagagcccacccagctgaagaccaagcacctgagagagtacactctcaaatgccactcaagcatgcctcccaacaactcctatgtcaacttcgagcgttttgcctgtgtggtggaagacgtggctcgggtcgacctgggatgccgtgccctggtggaggcccacgataccatccaggacgatgtggaggccctggtctccatcttcaatgagaaggaagcttggtaccgagaggagaatgagagcgcccggcatgacctgtcccagctcaggtatgagttccgcaaggtggagtcattgaagaagctgctgcgagaagacatccaggccacgggatgtagcctcggaagcatggccaggaaactggaccatctgcaagcccagtttgagattctgaggcaggagctctccgcagacctgcagtggattcaggagctggtgggcagcttccagctggagagtgggagctctgagggcctgggctccacattctaccaggacaccagtgaatccctgtcagagctgctcagcagatcatgcactgaggaatttctggcaggctggaagctctaatcgccagaatccagtcagtgatgcatcccaagaggtttgcagaagcatgttctcatccaccctgctgcggcctccagctagaattatcctgcaggggtgtgtgtctgtagtatagccttccagcccctccacagaatccagaattgctgaggtgccagttaattcttcattctgcacctcccctcaccaatctggttttctgggagggctctggcagggcagccaagctgttaaaacaattagagagtgagtacccctcagggtccccttctgcagagggaggatggctggccctggggaaatgcttgagaattgatttgtgatgaaggatttgttcatatctcactttctgcctacataccttatggactgtagatcttgggtaatatttgagttaattaggaataactaagtcagcatggtgctttcctgctacagaagcagggatttacaatgcatagagaaaataatattgcctttcgtttgcattgatttttcacttaccaagcactcatgtctgacaaatgacctcacttggtccttaaaagaactcagtgagataggaaggtgggtggcattattattattattatttacatgtaactgatgagaaaattgactcagagagggaaaatgatatagtcaatcagtacagatgaaacagaaacccaggatgcccatctctaagatgaggtatatgggagaaagtagtaaggctttgctgtaaatatctaccttaatattaaagtccaggtcccagaggtaaagtaagcaacttcatgtattctgccaggtgtaggtggaatgcatacacctgcagatgattgtcccaggagctctgtcccagaaggcaaagtcattgtccctacccatccctgtctctgtctgaagaccagcctgcaagcaggagagaaggaaggaaggagtcttcccattctccaccctttctcctcttctggctaacggccccaactctgtgtcgagaataaaggccagaaggtcctcaacaggaggttccttttcttatgtacctaggccattgggccttgaaggcctaagaagttccgtgagggtttttgaaaagggcaaacataaagatggggaagcgcaaggccacatggtcgtttcatgacccaaagctttgagcacccctccccaaggattataagatctcatctccctttctctgggggaggggacagtcaaccaactcatgtcaacagagcatggcatatgagcctagtgctgagctagaagcttgtgggtaggggcataacttgtatagttcaaagtgtcttcatggcctcacaaaacatccctatcttagaggcagactaaacgatattcccaatttagagctgaggaaacagggagaggatgggattttcccaaggtcacatcattatggcaaaagtagagaccttctaatgacaagtctgttgctctttctgcttcccctggctgcgccaggctccagaagtttactccctgcttgtgggggcagctcacacctggattcatccatccatttataaattatacttaggcaccaaccaacttccagatgcccggcttgactctggggatacaatgtttagtaaaaataggcctgattcctgtctcacggagtgctcagtccagcgaaggatttgaacattgaccaagaatcacagagagatagagctgcagcttgtgttcatgctgggagagaagcacatagcactgcaggggcctgccgtcagggtctgacagcatcgggggaagcgtcctgaagcagtgacactggaacggaggtcagctaagccaaccagggagagagaagtttcccaacagagccatcataccagagctctgtgatgagaggcggtgtggaaggttgagaatgtgaggactgaaagctggaggggagagaataggaatacagtgcggaaatgaccggagaacaagcaggagcagcagggctttggccatgtggaagagctctgcccttatcccgaaagtcatgagaagccagcgggttccaggtgctggggagggaatgccccgtgaacagctcagacaggaagtggtttaggacaagacaggaaagcttcatctcatgaaaccatttcttcagaatcctgtctccttttctatatgcatgaaggatcatttcaaatatcatatacaatatttgtaacagaaacttacttcatcagctatgagaaaccgtggtgataagatgcatcatcattttatggaccactaagaaaaaaggcccaagatggggcgtctaataggaaactctctctacccccaccacataaagctgtgatgccctcaatgagagggtaaatgagaaatagagccaccatgcagaaagggggagcaaggaaacccatgcatctcaaccttgacactaaatgggggtgaaaaatccttccctgagaacaggagtcccaagccggtggtactcatgcaggtttgctttctgaatttgcactatcagtgtgatccaaaagaacatcaagcagagagtgtaatgtccaacagtctgaggctgggtggccctggatggctggcaaaaacagtactatcctctcccggagcacctgccttctgtccgggccaacagtaagaatatgataccatcatctgggagatgcctcctgacttcagagatccaaaaatgtatatcttggaaccaatgaaagatggcaaaagctccatttcctacatcttaccccagagaattggttcaaatgacctgtctacagtctctccaaggtcttacctgccctgtcacgggaagttgtatacttgtttggtgctgagacactgcaaatattaaatgtccctttggccgtgttaacagaccttgaccttcacacagccaggtttctaaggagaggaagccactgatggggcaacacagggcaagctttttagtgaaggtcaaaatagaatgcaggcccagtgtggtggctcatgcctgtaatcccagcactttgggaggctgaggtgggtggatcacttgaggtcaggagtgtgagaccagcctggccaacatggagaaatcctgtctctactaaagatataaaaattagctgggcatggtggtgggtgcctgtagtcccagctactcaggacactcgggaggctgaggcaggagaatcgcttgaacctggaaggcggaggttgcagtgagccaagatcacgccattgcactccagcctgggtgacagagtgagactctgtctcaaaaaaataaaaaatagaatacagtaaaagagtaaaatgttggcaatgatttgaatggggaaaattgggaaaagggagggagaagtggttgttttagaatcatgatcagctatacacagtgctgagagtcacccatttagttggccgtgagctggactccgaactctaagtggttttccttatagcagtgacatcgtcctctctatgctcatgtccagtcactgtaactgtttctcacttagacgtgtcgtaaacagacctttttctgtacaaagagcttctaaagacaaatgaaagagagttgagaaatgcccccaagtcttttggggaaagcagaggagaccatgaccttcctctgtgtcctggccagctgaagtcccgtccttccatggcattggaacctgatgctgggggagcccgggggcctgtgggatgcagccacaggacctgcttatctctgctccccacacgccctcagctgactttttacaacagtgtggagggctaacaatggcgggaagggctgtgagaatggactgtttcgctggtgcctagaggaaggaaggcttgtgggtgctgctctgtgggcaggcccctctgccattgaggatttttaattcaccaaattgcaatttttttggtgggggagccgcacagagtctcactctgccgcccaggctggagtgcagtggcatgatctcggctcactccaacctctgcctcccaggttcaagcaattctcctgcctcagtctcctgagtagctgggactataggtgcgcagcaccatgcccggctaatttttgtatttttagtagagatgggggtttcaccacattggtcaggctggtctcgaactcctgacctcaggtgatccacccacctcggccttccaaagtgctggaattacaggcgtgagccactgcacccagcccagactgcaaataaaaggtcggcttctgtgctctgttcaaacaccatcctgggctgtttgggaggggaaagtgagtgtatgacatcgccctgaataacaattctcaaggaagctggcaagctggcccttggggaaggcagctgcctgtccctgctgtgaggcaggtgctcacagcctagcattgcctgactgtgtgtcagaaggtggggtgatggtttggtaatcgatgattctgcagctgtgggagcctggcagtgaagggatggagcagaggaataatggcagaaagagctggagtctcccccatgggccccctcccctcccttacaggtgatcatgaagatggtggcttcctacctcactccatcacgcagcacaggtggcccggcccttgctggaggtggctgtgtgcccagctgtcacccctactgtcaatcttctgtaaatgtctgtgggactggatgccttttttccttggtccgtgaaattcctgacccagcagtgggcatgttcacgttgcaaaagggtccagtcccgttgaacaaacactgattgtgctctggctcagggggaggtgacagacaaggacaagataacctcaaataaaagattcagtgtctggggcagatggggacccagccaactagattggaaaagctatggtgagtgataaaatagagcttcctcatctcctagaaatcaaaggagagaggaattctgattgagaaagggtaagagggttgcagagaagagaggccttcccagggacgccgtccccaccagtgaccgccctcctccactcccaagctgtgtcccttgaggaaggcatgagtaaaatctggaaggggggtggggctgagccaagattggggttaggaacttggaacagttgaatggagattaaagagagggagattacacagatttaaaagagtgttttaaactttttgttatggtcccctcagcaggaaaattgccaaaacttgcacagaagtataaggaatgggatagtggattccaggacctatgaccccgctccagcaggaatcaagtcatgcgggtcctctttcattcatctctcccattacttttcttctggggtattttaaagcaaatttcagacttatttaactcataagttctccagcataaatctctgctaaggattttcttcttctttttttctttttttttttttgagacagagtttcactctcgttgcccaggctggagtgcaatggcgcgatcttggctcactgcaacctccatcttccaggttcaagcaattctcctgcctcagcctcctgagtagctgagattacaggcacccaccaccacacccaactagtttttgtatttttagtagagatggggtttcatcatgttggccaggctagtcttgaactcctgacctcaggtgatctgcctgcctcggcctcccgaagtgctgagattacaggcatgagccaccgcacccagccaggactttctttttaatacaaccccatgccattatcacacttgacaaaatcagcaataattccttcatctcatctggattcccattccatcctcacatgtccccaccactcccaacagtgtcccattacagctggtttgttcaaatcaggatccaaacagtccacatgtggcatttggttgctacgtctctcaagtctcttgggttttataacagtacaaaaggaagaacctttgaagcttttcctggggacaaaaaattgctcagaaaactgatggtcccatagaagaataaaaaacagagcgtatccatgtcaagacctaactcagaaatgtgagaccaggccaagcaaggaaaggaatgtttctgcctccttccactggcttgttcactgtagggggcagccttcaggctcacagcctttctgcagctgtccctcccacttaggaggaggcagagcctcaagcctcccacaagccccatgtgctcctttcctgggaaaacaggtgggtgaaggcagcagagcccaggcttcagccatcaaaacatccagcgaaggggaggggtggaggggtgccacctataaaactccattgagggaagggcagcggggaggggtcctgggcaggagagaagtgggtgtgagagtgccctggctttcactggagtaaggggctggagagatggcacagatgggggttggaggtgcaatctgcttgcagttcctaaagaagacctagtatctagagaaaatcgttgtgtggggggtggagttgggggagtcgcctcttcagtaaagccaggattcctttttcatgccttagcagcggctgctgcttcctgcccctgcctgtggatgttggtactgacctggcacaccccactggactttttcaaaggcatttgcagctgcataaacaaaacttgactacccc

SEQ ID NO: 5303 - DNA, 484 bp, Homo sapiens
  source 1..484: mol_type = unassigned DNA; mol_type = unassigned DNA
ttcctgggagacacgaagcaggaaacactggcaaatatcacagcagtgagttacgactttgatgaggaattcttcagccagacgagcgagctggccaaggactttattcggaagcttctggttaaagagacccggaaacggctcacaatccaagaggctctcagacacccctggatcacggtaagggcacagccatgagttccaatgggcaaagggtccctgctctgtcgccagggttggcctgggcagccagatgcagagggcccatggagaggcctttgctttaaacactgaccctgggcacagatgaaagctagccaggggccccagagggcctgggcttattcgaataggtttatttgcttgctattttaagtttgtgtgtctcaaattcaggtaacttatgaaatgaaaccctcacaaaccacagttgaaaccctttttctttggggccaacttacacagtgttctttgttgaagggta

SEQ ID NO: 5304 - DNA, 909 bp, Homo sapiens
  source 1..909: mol_type = unassigned DNA; mol_type = unassigned DNA
gaggactgcagggccgagcccagcgcaccccgccgcgtcccccgttcccgccgcgcccgccgcgcccgccgcgcccgccgcgcccgccgctcccgccgcgcctgccgcggccgcgaccgcggcagctcagcctcccgccgattgtatgttccaggcctcaatgaggagtccaaacatggagccattcaagcagcagaaggtggaggacttttatgacatcggagaggagctggggagtggccagtttgccatcgtgaagaagtgccgggagaagagcacggggcttgagtatgcagccaagttcatcaagaagcggcagagccgggcgagccggcgcggtgtgagccgggaggagatcgagcgggaggtgagcatcctgcggcaggtgctgcaccacaatgtcatcacgctgcacgacgtctatgagaaccgcaccgacgtggtgctcatccttgagctagtgtctggaggagagctcttcgatttcctggcccagaaggagtcactgagtgaggaggaggccaccagcttcattaagcagatcctggatggggtgaactaccttcacacaaagaaaattgctcactttgatctcaagccagaaaacattatgttgttagacaagaatattcccattccacacatcaagctgattgactttggtctggctcacgaaatagaagatggagttgaatttaagaatatttttgggacgccggaatttgttgctccagaaattgtgaactacgagcccctgggtctggaggctgacatgtgggttcagagctcgatgactccaaacacaccccgggctgctgctgaagagcaggatggagatgggtgtggagcatgagacggcatccagggtctgctgtggaggaggagcataggcgtcatcacctacatcct

SEQ ID NO: 5305 - DNA, 570 bp, Homo sapiens
  source 1..570: mol_type = unassigned DNA; mol_type = unassigned DNA
attgcgtgcagccatacagcagactttagagagaggggtgtcagagaggggctccctacaccagtcctcctgaggggggtagggaactgtgagctggccggatgcaaaacggtatagtacagtggtctcttgtaactcaggctgtagactgagagcaaaatgaacttggttaaaagcaagaaagcctcctccaccacagcagcaccctagacaagctggtggtttctaaaagtggccagtttgccatcgtgaagaagtgccgggagaagagcacggggcttgagtatgcagccaagttcatcaagaagcggcagagccgggcgagccggcgcggtgtgagccgggaggagatcgagcgggagagtgtctggaggagagctcttcgatttcctggcccagaaggagtcactgagtgaggaggaggccaccagcttcattaagcagatcctggatggggtgaactaccttcacacaaagaaaattgctcactttgatctcaagccagaaaacattatgttgttagacaagaatattcccattccacacatcaagctgattgactttggtctg

SEQ ID NO: 5306 - DNA, 566 bp, Homo sapiens
  source 1..566: mol_type = unassigned DNA; mol_type = unassigned DNA
cccgccgcgcccgccgcgcccgccgcgcccgccgctcccgccgcgcctgccgcggccgcgaccgcggcagctcagcctcccgccgattgtatgttccaggcctcaatgaggagtccaaacatggagccattcaagcagcagaaggtggaggacttttatgacatcggagaggagctggggaggttcttggctggcattctgttgttccagactctccacctgctgctgactttgctgctgctccctgcgtgtttctcactcctgtcatgcccatctagttcccagcgcactgcccacctggctttgtggccagtttgccatcgtgaagaagtgccgggagaagagcacggggcttgagtatgcagccaagttcatcaagaagcggcagagccgggcgagccggcgcggtgtgagccgggaggagatcgagcgggaggtgagcatcctgcggcaggtgctgcaccacaatgtcatcacgctgcacgacgtctatgagaaccgcaccgacgtggtgctcatccttgagctagtgtctggaggagagctcttcgatttcctggcccaga

SEQ ID NO: 5307 - DNA, 724 bp, Homo sapiens
  source 1..724: mol_type = unassigned DNA; mol_type = unassigned DNA
gaatccagctgctatgtcacgagaactcaagccaccctgtggagaattccacacggagtgcagctgaggcctcccaacaacaaccagcagcaatttgcaaaccatgtgtctcctacagctactggtgtgttttttgcatattggccttccaacatttcttgttgaattatttcaggctcaccttggtcataatgagtggatctggctttacccagggcttcagcctttagcatttcacatgaggaatatccactgagctgggggtcaagaggcctgacctttaatcttggctctgccccaggcaagtgtgaacttgggtaagaacactgaggccaggaaatgttgagtgacgtgtccatactcacatagcatggaagaatcagaggccatggggtcaggacctatgggcttaggatataccggaagaggcctgatttccagtcgagcatttgccaaaaatcagcagcgtgatttgggattgtatgttccaggcctcaatgaggagtccaaacatggagccattcaagcagcagaaggtggaggacttttatgacatcggagaggagctggggagtggccagtttgccatcgtgaagaagtgccgggagaagagcacggggcttgagtatgcagccaagttcatcaagaagcggcagagccgggcgagccggcgcggtgtgagccgggaggagatcgagcgggaggtgagcatcctgcggcaggt

SEQ ID NO: 5308 - DNA, 2603 bp, Homo sapiens
  source 1..2603: mol_type = unassigned DNA; mol_type = unassigned DNA
gattgtatgttccaggcctcaatgaggagtccaaacatggagccattcaagcagcagaaggtggaggacttttatgacatcggagaggagctggggagtggccagtttgccatcgtgaagaagtgccgggagaagagcacggggcttgagtatgcagccaagttcatcaagaagcggcagagccgggcgagccggcgcggtgtgagccgggaggagatcgagcgggaggtgagcatcctgcggcaggtgctgcaccacaatgtcatcacgctgcacgacgtctatgagaaccgcaccgacgtggtgctcatccttgagctagtgtctggaggagagctcttcgatttcctggcccagaaggagtcactgagtgaggaggaggccaccagcttcattaagcagatcctggatggggtgaactaccttcacacaaagaaaattgctcactttgatctcaagccagaaaacattatgttgttagacaagaatattcccattccacacatcaagctgattgactttggtctggctcacgaaatagaagatggagttgaatttaagaatatttttgggacgccggaatttgttgctccagaaattgtgaactacgagcccctgggtctggaggctgacatgtggagcataggcgtcatcacctacatcctcttaagtggagcatcccctttcctgggagacacgaagcaggaaacactggcaaatatcacagcagtgagttacgactttgatgaggaattcttcagccagacgagcgagctggccaaggactttattcggaagcttctggttaaagagacccggaaacggctcacaatccaagaggctctcagacacccctggatcacgccggtggacaaccagcaagccatggtgcgcagggagtctgtggtcaatctggagaacttcaggaagcagtatgtccgcaggcggtggaagctttccttcagcatcgtgtccctgtgcaaccacctcacccgctcgctgatgaagaaggtgcacctgaggccggatgaggacctgaggaactgtgagagtgacactgaggaggacatcgccaggaggaaagccctccacccacggaggaggagcagcacctcctaactggcctgacctgcagtggccgccagggaggtctgggcccagcggggctcccttctgtgcagacttttggacccagctcagcaccagcacccgggcgtcctgagcactttgcaagagagatgggcccaaggaattcagaagagcttgcaggcaagccaggagaccctgggagctgtggctgtcttctgtggaggaggctccagcattcccaaagctcttaattctccataaaatgggctttcctctgtctgccatcctcagagtctggggtgggagtgtggacttaggaaaacaatataaaggacatcctcatcatcacggggtgaaggtcagactaaggcagccttcttcacaggctgagggggttcagaaccagcctggccaaaaattacaccagagagacagagtcctccccattgggaacagggtgattgaggaaagtgaaccttgggtgtgagggaccaatcctgtgacctcccagaaccatggaagccaggacgtcaggctgaccaacacctcagaccttctgaagcagcccattgctggcccgccatgttgtaattttgctcatttttattaaacttctggtttacctgatgcttggcttcttttagggctacccccatctcatttcctttagcccgtgtgcctgtaactctgagggggggcacccagtggggtgctgagtgggcagaatctcagaaggtcctcctgaaccgtccgcgcaggcctgcagtgggcctgcctcctccttgcttccctaacaggaaggtgtccagttcaagagaacccacccagagactgggagtggtggctcacgcctataatccctgcgctttggcagtccgaggcaggggaattgcttgaactcaggagttggagaccagcctgggcaacatggcaaaacgcagtctgtacaaaaaatacaaaaaattagccaggtgtaggggtaggcacctggcatcccagctactccaggggctgaggtgacagcattgcttaagcccagaaggtcgaggctgcagtgagctgagatcacgccactgcactccagtctgggtgacagagagagaccatatccaaaaaaaaaaaaagttgccagagacgagtatgcccatgctccctctacctcactgccaccactcctgctgttaggagctgagtgtgtctccctaaaatttctatgttgaagtcttaacccttggtaccacagaatatcactgtatttggagatggggtctttagaaaggcacttaaattaaaatgagctcactgatatgggccccgatgcaatataattggtgtccttataagaaggggaggttaggacacgcaggaaagaccacatgaaggcccaggagtgggagggggaatagccatcgacaaactaagggggcctcagaggaaaccaaccctgctgacacctcaatcttagactctggcctcaaaaattgtaagaaaataaacttctgtcttttaagcca

SEQ ID NO: 5309 - DNA, 1473 bp, Homo sapiens
  source 1..1473: mol_type = unassigned DNA; mol_type = unassigned DNA
gattgtatgttccaggcctcaatgaggagtccaaacatggagccattcaagcagcagaaggtggaggacttttatgacatcggagaggagctggggagtggccagtttgccatcgtgaagaagtgccgggagaagagcacggggcttgagtatgcagccaagttcatcaagaagcggcagagccgggcgagccggcgcggtgtgagccgggaggagatcgagcgggaggtgagcatcctgcggcaggtgctgcaccacaatgtcatcacgctgcacgacgtctatgagaaccgcaccgacgtggtgctcatccttgagctagtgtctggaggagagctcttcgatttcctggcccagaaggagtcactgagtgaggaggaggccaccagcttcattaagcagatcctggatggggtgaactaccttcacacaaagaaaattgctcactttgatctcaagccagaaaacattatgttgttagacaagaatattcccattccacacatcaagctgattgactttggtctggctcacgaaatagaagatggagttgaatttaagaatatttttgggacgccggaatttgttgctccagaaattgtgaactacgagcccctgggtctggaggctgacatgtggagcataggcgtcatcacctacatcctcttaagtggagcatcccctttcctgggagacacgaagcaggaaacactggcaaatatcacagcagtgagttacgactttgatgaggaattcttcagccagacgagcgagctggccaaggactttattcggaagcttctggttaaagagacccggaaacggctcacaatccaagaggctctcagacacccctggatcacgtcaaaaggagaaggcagagcccctgaacagcggaagacagagcccacccagctgaagaccaagcacctgagagagtacactctcaaatgccactcaagcatgcctcccaacaactcctatgtcaacttcgagcgttttgcctgtgtggtggaagacgtggctcgggtcgacctgggatgccgtgccctggtggaggcccacgataccatccaggacgatgtggaggccctggtctccatcttcaatgagaaggaagcttggtaccgagaggagaatgagagcgcccggcatgacctgtcccagctcaggtatgagttccgcaaggtggagtcattgaagaagctgctgcgagaagacatccaggccacgggatgtagcctcggaagcatggccaggaaactggaccatctgcaagcccagtttgagattctgaggcaggagctctccgcagacctgcagtggattcaggagctggtgggcagcttccagctggagagtgggagctctgagggcctgggctccacattctaccaggacaccagtgaatccctgtcagagctgctcagcagatcatgcactgaggaatttctggcaggctggaagctctaa

SEQ ID NO: 5310 - DNA, 3936 bp, Homo sapiens
  source 1..3936: mol_type = unassigned DNA; mol_type = unassigned DNA
agcgctgcggagcgggaggggaggcttcgcggaacgctctcggcgccaggactcgcgtgcaaagcccaggcccgggcggccagaccaagagggaagaagcacagaattcctcaactcccagtgtgcccatgagtaagagcaaatgctccgtgggactcatgtcttccgtggtggccccggctaaggagcccaatgccgtgggcccgaaggaggtggagctcatccttgtcaaggagcagaacggagtgcagctcaccagctccaccctcaccaacccgcggcagagccccgtggaggcccaggatcgggagacctggggcaagaagatcgactttctcctgtccgtcattggctttgctgtggacctggccaacgtctggcggttcccctacctgtgctacaaaaatggtggcggtgccttcctggtcccctacctgctcttcatggtcattgctgggatgccacttttctacatggagctggccctcggccagttcaacagggaaggggccgctggtgtctggaagatctgccccatactgaaaggtgtgggcttcacggtcatcctcatctcactgtatgtcggcttcttctacaacgtcatcatcgcctgggcgctgcactatctcttctcctccttcaccacggagctcccctggatccactgcaacaactcctggaacagccccaactgctcggatgcccatcctggtgactccagtggagacagctcgggcctcaacgacacttttgggaccacacctgctgccgagtactttgaacgtggcgtgctgcacctccaccagagccatggcatcgacgacctggggcctccgcggtggcagctcacagcctgcctggtgctggtcatcgtgctgctctacttcagcctctggaagggcgtgaagacctcagggaaggtggtatggatcacagccaccatgccatacgtggtcctcactgccctgctcctgcgtggggtcaccctccctggagccatagacggcatcagagcatacctgagcgttgacttctaccggctctgcgaggcgtctgtttggattgacgcggccacccaggtgtgcttctccctgggcgtggggttcggggtgctgatcgccttctccagctacaacaagttcaccaacaactgctacagggacgcgattgtcaccacctccatcaactccctgacgagcttctcctccggcttcgtcgtcttctccttcctggggtacatggcacagaagcacagtgtgcccatcggggacgtggccaaggacgggccagggctgatcttcatcatctacccggaagccatcgccacgctccctctgtcctcagcctgggccgtggtcttcttcatcatgctgctcaccctgggtatcgacagcgccatgggtggtatggagtcagtgatcaccgggctcatcgatgagttccagctgctgcacagacaccgtgagctcttcacgctcttcatcgtcctggcgaccttcctcctgtccctgttctgcgtcaccaacggtggcatctacgtcttcacgctcctggaccattttgcagccggcacgtccatcctctttggagtgctcatcgaagccatcggagtggcctggttctatggtgttgggcagttcagcgacgacatccagcagatgaccgggcagcggcccagcctgtactggcggctgtgctggaagctggtcagcccctgctttctcctgttcgtggtcgtggtcagcattgtgaccttcagacccccccactacggagcctacatcttccccgactgggccaacgcgctgggctgggtcatcgccacatcctccatggccatggtgcccatctatgcggcctacaagttctgcagcctgcctgggtcctttcgagagaaactggcctacgccattgcacccgagaaggaccgtgagctggtggacagaggggaggtgcgccagttcacgctccgccactggctcaaggtgtagagggagcagagacgaagaccccaggaagtcatcctgcaatgggagagacacgaacaaaccaaggaaatctaagtttcgagagaaaggagggcaacttctactcttcaacctctactgaaaacacaaacaacaaagcagaagactcctctcttctgactgtttacacctttccgtgccgggagcgcacctcgccgtgtcttgtgttgctgtaataacgacgtagatctgtgcagcgaggtccaccccgttgttgtccctgcagggcagaaaaacgtctaacttcatgctgtctgtgtgaggctccctccctccctgctccctgctcccggctctgaggctgccccaggggcactgtgttctcaggcggggatcacgatccttgtagacgcacctgctgagaatccccgtgctcacagtagcttcctagaccatttactttgcccatattaaaaagccaagtgtcctgcttggtttagctgtgcagaaggtgaaatggaggaaaccacaaattcatgcaaagtcctttcccgatgcgtggctcccagcagaggccgtaaattgagcgttcagttgacacattgcacacacagtctgttcagaggcattggaggatgggggtcctggtatgtctcaccaggaaattctgtttatgttcttgcagcagagagaaataaaactccttgaaaccagctcaggctactgccactcaggcagcctgtgggtccttgcggtgtagggaacggcctgagaggagcgtgtcctatccccggacgcatgcagggcccccacaggagcgtgtcctatccccggacgcatgcagggcccccacaggagcatgtcctatccctggacgcatgcagggcccccacaggagcgtgtactaccccagaacgcatgcagggcccccacaggagcgtgtactaccccaggacgcatgcagggcccccactggagcgtgtactaccccaggacgcatgcagggcccccacaggagcgtgtcctatccccggaccggacgcatgcagggcccccacaggagcgtgtactaccccaggacgcatgcagggcccccacaggagcgtgtactaccccaggatgcatgcagggcccccacaggagcgtgtactaccccaggacgcatgcagggcccccatgcaggcagcctgcagaccacactctgcctggccttgagccgtgacctccaggaagggaccccactggaattttatttctctcaggtgcgtgccacatcaataacaacagtttttatgtttgcgaatggctttttaaaatcatatttacctgtgaatcaaaacaaattcaagaatgcagtatccgcgagcctgcttgctgatattgcagtttttgtttacaagaataattagcaatactgagtgaaggatgttggccaaaagctgctttccatggcacactgccctctgccactgacaggaaagtggatgccatagtttgaattcatgcctcaagtcggtgggcctgcctacgtgctgcccgagggcaggggccgtgcagggccagtcatggctgtcccctgcaagtggacgtgggctccagggactggagtgtaatgctcggtgggagccgtcagcctgtgaactgccaggcagctgcagttagcacagaggatggcttccccattgccttctggggagggacacagaggacggcttccccatcgccttctggccgctgcagtcagcacagagagcggcttccccattgccttctggggagggacacagaggacagcttccccatcgccttctggctgctgcagtcagcacagagagcggcttccccatcgccttctggggaggggctccgtgtagcaacccaggtgttgtccgtgtctgttgaccaatctctattcagcatcgtgtgggtccctaagcacaataaaagacatccacaatggaaaaactgc

SEQ ID NO: 5311 - DNA, 950 bp, Homo sapiens
  source 1..950: mol_type = unassigned DNA; mol_type = unassigned DNA
agactcaagagccatctccaggaccacgttttattttcaagcgagtgctcaaatgctgatgttctgctctgcgctagactttaaggggaccgtcaggatgttggcttcgggcctgactggctgtctggtcggcatgggcactggcagtaaactggcctacgccattgcacccgagaaggaccgtgagctggtggacagaggggaggtgcgccagttcacgctccgccactggctcaaggtgtagagggagcagagacgaagaccccaggaagtcatcctgcaatgggagagacacgaacaaaccaaggaaatctaagtttcgagagaaaggagggcaacttctactcttcaacctctactgaaaacacaaacaacaaagcagaagactcctctcttctgactgtttacacctttccgtgccgggagcgcacctcgccgtgtcttgtgttgctgtaataacgacgtagatctgtgcagcgaggtccaccccgttgttgtccctgcagggcagaaaaacgtctaacttcatgctgtctgtgtgaggctccctccctccctgctccctgctcccggctctgaggctgccccaggggcactgtgttctcaggcggggatcacgatccttgtagacgcacctgctgagaatccccgtgctcacagtagcttcctagaccatttactttgcccatattaaaaagccaagtgtcctgcttggtttagctgtgcagaaggtgaaatggaggaaaccacaaattcatgcaaagtcctttcccgatgcgtggctcccagcagaggccgtaaattgagcgttcagttgacacattgcacacacagtctgttcagaggcattggaggatgggggtcctggtatgtctcaccaggaaattctgtttatgttcttgcagcagagagaaataaaactccttgaaaccagctcaggctactgccac

SEQ ID NO: 5312 - DNA, 556 bp, Homo sapiens
  source 1..556: mol_type = unassigned DNA; mol_type = unassigned DNA
agatgaggccgtgctgttccgagggttattaggatgctgtggtcatgccgtgtgtggatgagtccatgctgttctgagggctatggagcagggcacctctggttctgtggaatcgctgccttgatactccatggggaatcccagatcaatgaacacagacagccccctgcttctcaggctcttccaggccgctggcccgggagggttcacttcctgaggctgcatcttccaccagtcgtctgctgccatttacttcttgaggatggtgttgagtttagaggcctcagtgtggggctgggacaggaagggtgctcaggtcctttgcctgtggcctgcgttctcctgggacagcctctcaccgccctctggctctgcaggtttggattgacgcggccacccaggtgtgcttctccctgggcgtggggttcggggtgctgatcgccttctccagctacaacaagttcaccaacaactgctacagggacgcgattgtcaccacctccatcaactccctgacgagcttctcctccggcttcgtcgtcttctccttcctggg

SEQ ID NO: 5313 - DNA, 3936 bp, Homo sapiens; identical to SEQ ID NO: 5310
  source 1..3936: mol_type = unassigned DNA; mol_type = unassigned DNA

SEQ ID NO: 5314 - DNA, 556 bp, Homo sapiens; identical to SEQ ID NO: 5312
  source 1..556: mol_type = unassigned DNA; mol_type = unassigned DNA

SEQ ID NO: 5315 - DNA, 950 bp, Homo sapiens; identical to SEQ ID NO: 5311
  source 1..950: mol_type = unassigned DNA; mol_type = unassigned DNA

SEQ ID NO: 5316 - DNA, 2763 bp, Homo sapiens
  source 1..2763: mol_type = unassigned DNA; mol_type = unassigned DNA
ctcaccccagccatgcccgccctcagtcgctgggccagcctgcccggccccagcatgcgggaggcagccttcatgtacagcacagcagtggccatcttcctggtcatcctggtggccgcactgcagggctcggctccccgtgagagccccctcccctatcacatccccctggacccggaggggtccctggagctctcatggaatgtcagctacacccaggaggccatccatttccagctcctggtgcggaggctcaaggctggcgtcctgtttgggatgtccgaccgtggcgagcttgagaacgcagatctcgtggtgctctggaccgatggggacactgcctattttgcggacgcctggagtgaccagaaggggcagatccacctggatccccagcaggactaccagctgctgcaggtgcagaggaccccagaaggcctgaccctgcttttcaagaggccctttggcacctgcgaccccaaggattacctcattgaagacggcactgtccacttggtctacgggatcctggaggagccgttccggtcactggaggccatcaacggctcgggcctgcagatggggctgcagagggtgcagctcctgaagcccaatatccccgaaccggagttgccctcagacgcgtgcaccatggaggtccaagctcccaatatccagatccccagccaggagaccacgtactggtgctacattaaggagcttccaaagggcttctctcggcaccacattatcaagtacgagcccatcgtcaccaagggcaatgaggcccttgtccaccacatggaagtcttccagtgcgcccccgagatggacagcgtcccccacttcagcgggccctgcgactccaagatgaaacccgaccgcctcaactactgccgccacgtgctggccgcctgggccctgggtgccaaggcattttactacccagaggaagccggccttgccttcgggggtccagggtcctccagatatctccgcctggaagttcactaccacaacccactggtgatagaaggacgaaacgactcctcaggcatccgcttgtactacacagccaagctgcggcgcttcaacgcggggatcatggagctgggactggtgtacacgccagtgatggccattccaccacgggagaccgccttcatcctcactggctactgcacggacaagtgcacccagctggcactgcctccctccgggatccacatcttcgcctctcagctccacacacacctgactgggagaaaggtggtcacagtgctggtccgggacggccgggagtgggagatcgtgaaccaggacaatcactacagccctcacttccaggagatccgcatgttgaagaaggtcgtgtcggtccatccgggagatgtgctcatcacctcctgcacgtacaacacagaagaccgggagctggccacagtggggggcttcgggatcctggaggagatgtgtgtcaactacgtgcactactacccccagacgcagctggagctctgcaagagcgctgtggacgccggcttcctgcagaagtacttccacctcatcaacaggttcaacaacgaggatgtctgcacctgccctcaggcgtccgtgtctcagcagttcacctctgttccctggaactccttcaaccgcgacgtactgaaggccctgtacagcttcgcgcccatctccatgcactgcaacaagtcctcagccgtccgcttccagggtgaatggaacctgcagcccctgcccaaggtcatctccacactggaagagcccaccccacagtgccccaccagccagggccgaagccctgctggccccaccgttgtcagcattggtgggggcaaaggctgaggggggacctactcctccccctcctccatgctgtccctgtgggctcacaccggcactgtgcactctactctgcgacgatccccatggaacagccctgcacgcccaggatgaaggggccagaccacgcccctgcctgagaccacggtccaatccagccttcttcccccagggtcccctgcatggctgagagggtgtgggtgccctgttgacctaccctggaccgagtggaccacgacctcgtccatttaaacccggctgactcagtgcagggacagcctgcacagtggtccagggtccagccctccgccagccctgttccgcctcactgggtgtggcctggcttctgggacaggcaccatgctgggccggggtgtggaatcaccgggaacgcccccgcccccgccccgctgctcccggtgtgcagcgggtgcgggtgccgcttaaacatttccctgctgagtggctcgtgtttcacagtgggcggcttccctgcgacggaggcaggaccaggcatttagctagttagagactcgcctgggaaattgctccattcctgagtaaacagatattttcgcccacctaaagggaagccctgacaacaactatcaccaaaagacgaggcggcaaagatccagcggggcttctgggcgccggttccacgtggggtggaattattagcaccagcttgcttctctgccggtggggccagcgctgaacagaccggggtggagtcagggctgtgctttccgcgtggttctgccacttagggagtgtgccttgggcgggccatttcacattcctgaccctcacttttctcatctgtaaaaccaggctgatgccgtgcgggctaatgagccaataaagctcacacttgggctggcacccactggaggtggg

SEQ ID NO: 5317 - DNA, 769 bp, Homo sapiens
  source 1..769: mol_type = unassigned DNA; mol_type = unassigned DNA
gccctcagtcgctgggccagcctgcccggccccagcatgcgggaggcagccttcatgtacagcacagcagtggccatcttcctggtcatcctggtggccgcactgcagggctcggctccccgtgagagccccctcccctatcacatccccctggacccggaggggtccctggagctctcatggaatgtcagctacacccaggaggccatccatttccagctcctggtgcggaggctcaaggctggcgtcctgtttgggatgtccgaccgtggcgagcttgagaacgcagatctcgtggtgctctggaccgatggggacactgcctattttgcggacggcactgtccacttggtctacgggatcctggaggagccgttccggtcactggaggccatcaacggctcgggcctgcagatggggctgcagagggtgcagctcctgaagcccaatatccccgaaccggagttgccctcagacgcgtgcaccatggaggtccaagctcccaatatccagatccccagccaggagaccacgtactggtgctacattaaggagcttccaaagggcttctctcggcaccacattatcaagtacgagcccatcgtcaccaagggcaatgaggcccttgtccaccacatggaagtcttccagtgcgcccccgagatggacagcgtcccccacttcagcgggccctgcgactccaagatgaaacccgaccgcctcaactactgccgccacgtgctggccgcctgggccctgggtgccaagg

SEQ ID NO: 5318 - DNA, 565 bp, Homo sapiens
  source 1..565: mol_type = unassigned DNA; mol_type = unassigned DNA
gtactttcaaaatttccatgggtcctcaggttgattgagagaatcagccccagaatgatcgccagcataaaacaatctatgctggctttctctctgatgcatctccagcagaagagtgatgtacggcctcatggagctctcaggtggaggtagaagtccaggttccccacatggcctccttgacatttgagaaaaatatactgtagttccagctactcagaaggctgcggcaggaggactgagaccaggagctggaagctgtagtgcactgtgatcaggcctgtgaatagacactgcactccagctgggcaacatgctcacagtgtcaaacctgttggagcctggaagcagctgcccaaactcacttagaaagaatgaagagaaataagaaaaagcgaaaactgaagttaggaggagactcaacgtatcaaagtatcgttctgtgtttttgagtaactccagaggccaaagtccacttctccacgtaagatcttcaatcccagaagccctatcatgggatctctctgtgtgtcccacttgtgagagtctaacccaggagttcacc

SEQ ID NO: 5319 - DNA, 542 bp, Homo sapiens
  source 1..542: mol_type = unassigned DNA; mol_type = unassigned DNA
gtactttcaaaatttccatgggtcctcaggttgattgagagaatcagccccagaatgatcgccagcataaaacaatctatgaaaaatatactgtagttccagctactcagaaggctgcggcaggaggactgagaccaggagctggaagctgtagtgcactgtgatcaggcctgtgaatagacactgcactccagctgggcaacatgctcacagtgtcaaacctgttggagcctggaagcagctgcccaaactcacttagaaagaatgaagagaaataagaaaaagcgaaaactgaagttaggaggagactcaacgtatcaaagtatcgttctgtgtttttgagtgtgatggctgtggacacctagtgacttatcaggatagtggcacaatgacatctaagaattatcccgggacctaccccaatcacactgtttgcgaaaagacaattacagtaccaaaggggaaaagactgattctgaggttgggagatttggatatcgaatcccagacctgtgcttctgactatcttctcttcaccagct

SEQ ID NO: 5320 - DNA, 420 bp, Homo sapiens
  source 1..420: mol_type = unassigned DNA; mol_type = unassigned DNA
atgggtcctcaggttgattgagagaatcagccccagaatgatcgccagcataaaacaatctatgaaaaatatactgtagttccagctactcagaaggctgcggcaggaggactgagaccaggagctggaagctgtagtgcactgtgatcaggcctgtgaatagacactgcactccagctgggcaacatgctcacagtgtcaaacctgttggagcctggaagcagctgcccaaactcacttagaaagaatgaagagaaataagaaaaagcgaaaactgaagttaggaggagactcaacgtatcaaagtatcgttctgtgtttttgagtccagccaggtccaggcattggggtttagtggccagagctgggattatttcggctccttatgccctgttcttctggatccgtttaactaaaggt

SEQ ID NO: 5321 - DNA, 478 bp, Homo sapiens
  source 1..478: mol_type = unassigned DNA; mol_type = unassigned DNA
aatgggattcggtgcggggcagcgactgcgccccgtcccggcgccgcgctcgtccgcagaggaggcggcccggcccgggcagctgcggctcgggatccgtcgaggggaggccgagcttgccaagctggcgcccagcggggtcatggtgcccggcgcccgcggcggcggcgcactggcgcgggctgccgggcggggcctcctggctttgctgctcgcggtctccgccccgctccggctgcaggcggaggagctggccagccaggtccaggcattggggtttagtggccagagctgggattatttcggctccttatgccctgttcttctggatccgtttaactaaaggtgatggctgtggacacctagtgacttatcaggatagtggcacaatgacatctaagaattatcccgggacctaccccaatcacactgtttgcgaaaagacaattacagtaccaaaggggaaaagactgattct

SEQ ID NO: 5322 - DNA, 1979 bp, Homo sapiens
  source 1..1979: mol_type = unassigned DNA; mol_type = unassigned DNA
ggcagcgactgcgccccgtcccggcgccgcgctcgtccgcagaggaggcggcccggcccgggcagctgcggctcgggatccgtcgaggggaggccgagcttgccaagctggcgcccagcggggtcatggtgcccggcgcccgcggcggcggcgcactggcgcgggctgccgggcggggcctcctggctttgctgctcgcggtctccgccccgctccggctgcaggcggaggagctgggtgatggctgtggacacctagtgacttatcaggatagtggcacaatgacatctaagaattatcccgggacctaccccaatcacactgtttgcgaaaagacaattacagtaccaaaggggaaaagactgattctgaggttgggagatttggatatcgaatcccagacctgtgcttctgactatcttctcttcaccagctcttcagatcaatatggtccatactgtggaagtatgactgttcccaaagaactcttgttgaacacaagtgaagtaaccgtccgctttgagagtggatcccacatttctggccggggttttttgctgacctatgcgagcagcgaccatccagatttaataacatgtttggaacgagctagccattatttgaagacagaatacagcaaattctgcccagctggttgtagagacgtagcaggagacatttctgggaatatggtagatggatatagagatacctctttattgtgcaaagctgccatccatgcaggaataattgctgatgaactaggtggccagatcagtgtgcttcagcgcaaagggatcagtcgatatgaagggattctggccaatggtgttctttcgagggatggttccctgtcagacaagcgatttctgtttacctccaatggttgcagcagatccttgagttttgaacctgacgggcaaatcagagcttcttcctcatggcagtcggtcaatgagagtggagaccaagttcactggtctcctggccaagcccgacttcaggaccaaggcccatcatgggcttcgggcgacagtagcaacaaccacaaaccacgagagtggctggagatcgatttgggggagaaaaagaaaataacaggaattaggaccacaggatctacacagtcgaacttcaacttttatgttaagagttttgtgatgaacttcaaaaacaataattctaagtggaagacctataaaggaattgtgaataatgaagaaaaggtgtttcagggtaactctaactttcgggacccagtgcaaaacaatttcatccctcccatcgtggccagatatgtgcgggttgtcccccagacatggcaccagaggatagccttgaaggtggagctcattggttgccagattacacaaggtaatgattcattggtgtggcgcaagacaagtcaaagcaccagtgtttcaactaagaaagaagatgagacaatcacaaggcccatcccctcggaagaaacatccacaggaataaacattacaacggtggctattccattggtgctccttgttgtcctggtgtttgctggaatggggatctttgcagcctttagaaagaagaagaagaaaggaagtccgtatggatcagcagaggctcagaaaacagactgttggaagcagattaaatatccctttgccagacatcagtcagctgagtttaccatcagctatgataatgagaaggagatgacacaaaagttagatctcatcacaagtgatatggcaggttaactccgttgactgccaaaatagcatccccaacgtgcagccctccgcatctatcagcaggttgccccggatggatctcagagatgaggattggaacaccatgttctttcccaccctaacaacaacaaagggcagtaaattaaagtactctttgtaaggtacagttaccgattaatctagagataaaatattttcttaaaaatatatttcattaaacacctatgctgtctctataaa

SEQ ID NO: 5323 - DNA, 3626 bp, Homo sapiens
  source 1..3626: mol_type = unassigned DNA; mol_type = unassigned DNA
cgactgcgccccgtcccggcgccgcgctcgtccgcagaggaggcggcccggcccgggcagctgcggctcgggatccgtcgaggggaggccgagcttgccaagctggcgcccagcggggtcatggtgcccggcgcccgcggcggcggcgcactggcgcgggctgccgggcggggcctcctggctttgctgctcgcggtctccgccccgctccggctgcaggcggaggagctgggtgatggctgtggacacctagtgacttatcaggatagtggcacaatgacatctaagaattatcccgggacctaccccaatcacactgtttgcgaaaagacaattacagtaccaaaggggaaaagactgattctgaggttgggagatttggatatcgaatcccagacctgtgcttctgactatcttctcttcaccagctcttcagatcaatatggtccatactgtggaagtatgactgttcccaaagaactcttgttgaacacaagtgaagtaaccgtccgctttgagagtggatcccacatttctggccggggttttttgctgacctatgcgagcagcgaccatccagatttaataacatgtttggaacgagctagccattatttgaagacagaatacagcaaattctgcccagctggttgtagagacgtagcaggagacatttctgggaatatggtagatggatatagagatacctctttattgtgcaaagctgccatccatgcaggaataattgctgatgaactaggtggccagatcagtgtgcttcagcgcaaagggatcagtcgatatgaagggattctggccaatggtgttctttcgagggatggttccctgtcagacaagcgatttctgtttacctccaatggttgcagcagatccttgagttttgaacctgacgggcaaatcagagcttcttcctcatggcagtcggtcaatgagagtggagaccaagttcactggtctcctggccaagcccgacttcaggaccaaggcccatcatgggcttcgggcgacagtagcaacaaccacaaaccacgagagtggctggagatcgatttgggggagaaaaagaaaataacaggaattaggaccacaggatctacacagtcgaacttcaacttttatgttaagagttttgtgatgaacttcaaaaacaataattctaagtggaagacctataaaggaattgtgaataatgaagaaaaggtgtttcagggtaactctaactttcgggacccagtgcaaaacaatttcatccctcccatcgtggccagatatgtgcgggttgtcccccagacatggcaccagaggatagccttgaaggtggagctcattggttgccagattacacaaggtaatgattcattggtgtggcgcaagacaagtcaaagcaccagtgtttcaactaagaaagaagatgagacaatcacaaggcccatcccctcggaagaaacatccacaggaataaacattacaacggtggctattccattggtgctccttgttgtcctggtgtttgctggaatggggatctttgcagcctttagaaagaagaagaagaaaggaagtccgtatggatcagcagaggctcagaaaacagactgttggaagcagattaaatatccctttgccagacatcagtcagctgagtttaccatcagctatgataatgagaaggagatgacacaaaagttagatctcatcacaagtgatatggcagattaccagcagcccctcatgattggcaccgggacagtcacgaggaagggctccaccttccggcccatggacacggatgccgaggaggcaggggtgagcaccgatgccggcggccactatgactgcccgcagcgggccggccgccacgagtacgcgctgcccctggcgcccccggagcccgagtacgccacgcccatcgtggagcggcacgtgctgcgcgcccacacgttctctgcgcagagcggctaccgcgtcccagggccccagcccggccacaaacactccctctcctcgggcggcttctcccccgtagcgggtgtgggcgcccaggacggagactatcaaaggccacacagcgcacagcctgcggacaggggctacgaccggcccaaagctgtcagcgccctcgccaccgaaagcgggcaccctgactctcagaagcccccaacgcatcccgggacgagtgacagctattctgcccccagagactgcctcacacccctcaaccagacggccatgactgcccttttgtgaacacaatgtgaaagaagcctgctgtggtactgagcgtcgggctgtcacaaggcactggaagaagggagcctgctggtccagagtgtgcgtgtgtatcggtgtgtgtgtacacttgcatgtgtgtgtgtgatccagtaggatcctagagacaacctgtcatactgtttacaaaattgtgcagctggtttcgtgctgacccttagggtgcgtctgttgggttttgttgggctagaaaaatgaaaattttcagatggcgttttcattcctctgactgatattgagctgctttggtgttaaaggtgtaatgtgtacagagttgtatttaacaataataaaagtaacttaagtttgctctatcagattttagttctgcacagaggttaagtgggaaaatgcagctgttgcaaaatgtatataaatagtatgttcatttttttcagtatattatctgatactgtgttagcagcaggtctgcttaaacctagtcttgttgttattgagtcatttcctctcctttgataactagaactgaaagcatttttaacattcttctcctggaagaaatgaattacttgaagcatgaaaagcacaccagggtggttgtttatttagcaattatgactgtagatttaaaaacaagcaaagaaacaacacctcagcagctgcccgtttccttagtctccacttcagagggggatgcgaagaggtcggcccagctccggtgaccatgaaggtggcacaggaattacagtgtgaatggctgtgtcagatgttttcgtacctcagattaaaaatattgctgaggtcagacgccacaattttcatgactttcttcagaagtagcacattttcgtgacttccgctgtcctctgaaaaacaaagttatttggaacatgttcatgcaaaagtgattctgaccaagtctaaatcgagcttttctactgacatgaaactgttggaaactgatctcattttataagaaatgattttcccctcaaggaggcgtctgtaattccagaacagtccagacatcagctgtacctcatgctcagtagtttttatttgagtttcttttgtgagttaactatgggagatttaacctcttttgccaaagagggaagtgtgtgtgtttttttaatagaaaatatggaccaaaaatttttttccctgaagaatgtattataaccctatttgtgtggttattacatcctgtgaaatgtatatatgttaaaataatgggggtgctggaaggtcatggcagactagctgctggttagtgtggaggggaaatggtttactttgtagagtttacatggttttatgcgcacactaattgtaataaactatgccaaaccaaa

SEQ ID NO: 5324 - DNA, 3584 bp, Homo sapiens
  source 1..3584: mol_type = unassigned DNA
caagaagataaaactggaaaacaagagatgaaataacctgaaacaatagatattgtttaataattcagtcttctttttttgttttttggttttccttctgcccaaaaacaataaaatacataacttggagattgtattggactctcaatcctcagtaagaattaatgaccccttcttcttttattccccccttctttttctttaccaggtgatggctgtggacacctagtgacttatcaggatagtggcacaatgacatctaagaattatcccgggacctaccccaatcacactgtttgcgaaaagacaattacagtaccaaaggggaaaagactgattctgaggttgggagatttggatatcgaatcccagacctgtgcttctgactatcttctcttcaccagctcttcagatcaatatggtccatactgtggaagtatgactgttcccaaagaactcttgttgaacacaagtgaagtaaccgtccgctttgagagtggatcccacatttctggccggggttttttgctgacctatgcgagcagcgaccatccagatttaataacatgtttggaacgagctagccattatttgaagacagaatacagacctctttattgtgcaaagctgccatccatgcaggaataattgctgatgaactaggtggccagatcagtgtgcttcagcgcaaagggatcagtcgatatgaagggattctggccaatggtgttctttcgagggatggttccctgtcagacaagcgatttctgtttacctccaatggttgcagcagatccttgagttttgaacctgacgggcaaatcagagcttcttcctcatggcagtcggtcaatgagagtggagaccaagttcactggtctcctggccaagcccgacttcaggaccaaggcccatcatgggcttcgggcgacagtagcaacaaccacaaaccacgagagtggctggagatcgatttgggggagaaaaagaaaataacaggtgcagaaaataacacaagtgccaagtgcaggagtagtttcatgactgtaaatgactcgtagttgaaaatacgcttattgtttacataggtgcttctctacctacctccaagttcttgaaatatttgaaaatgtaacaaatctttacattctttctgtgaaaagaatctgtatgcaagttgtaaatatggatatatggattagagagataattcttcaatggtgaaatctttatatggtgtattgtcagtgtgaaaacattaatctgtgaagagatttttaaatgcaactaatataagttggcctgtgagatgatctgaggtttcaaatgagggagaaaaaaatgaaacttgaaattataatagatgttatatttaacaaacttttaaaaatagcctgtaaatattattttcttacaaggaattaggaccacaggatctacacagtcgaacttcaacttttatgttaagagttttgtgatgaacttcaaaaacaataattctaagtggaagacctataaaggaattgtgaataatgaagaaaaggtaagaggtaaccctagaggcaagagaactgagtaggagaacaggcctctatatattttcatcaatgtgtttacattaaatatctcattaataaaagacagtgaggccaagcatggtggttcatgcctgtaatccccaagctttgggaagccaaggcaggaggatcatttgagaccatcctgggcaacatagcaagaccccaccactacaaaaaaaaatttttaattacccaaatgtggtggtgcacacttgtagtcctagatacttggaaggctgaggcaggaagatcacttgagcccaggagttcaaggttacagtgaattatggttgtgctattgtactacagcctgggcaacagagtaaaatcctgtctctaaaataaaataaaacttttaaaaagatgatgatgggctggtcgcgctggctcacgcatataatctcagcactttgggaggctaaggcaggcggatcacccgaggtcaggagttcaagaccagcctggccaacatagtgaaaccccatctctactaaaaatacaaaaattagccaggcgtggtggctggtgcctataatcccagctacttgggaggctgaggcaggagaatcatttgaacctgggaggcggaggttgtagtgagccgagattgcaccattgcactccagcctgggcgacaagagcgagattccatctcaaaaaaaagaaaaagaaaaaaagaaagatggggctttcttggcatccaaatccaagaataagaaatgtgtcaataaaaaccttgagagatctttgtgatttaattcttttctacttcaggaatgaaatacttgtgattttcttgggaagtgaaaattggccatttaaaatggctgcttcagtataagtatggtagatgtttgagttggacatttgtcttgggatcctgttagtgacaatgagaattcggaaggaaatggcaaaagtgagagagctgaagccttgtgctcttgaggttgcttgtctatagcaccagttgaatgtaggaatattaaggtcaaataatacaacaaggcaattttagcttctttatccaaaatgaaatttaaatcagtaaacagttgagcagcaccaccttagttagataaattggcccttgtttgcaaagcctcgtatcttcaatatcaagagtgtctagaaaaatgcaaccgacatagaatccttgccttggtttcatataaccaggtataagtgggatgataaacacctaaaaactcactaatagaatcttaaggtaaacataatttccttctataggtgtttcagggtaactctaactttcgggacccagtgcaaaacaatttcatccctcccatcgtggccagatatgtgcgggttgtcccccagacatggcaccagaggatagccttgaaggtggagctcattggttgccagattacacaaggtaatgattcattggtgtggcgcaagacaagtcaaagcaccagtgtttcaactaagaaagaagatgagacaatcacaaggcccatcccctcggaagaaacatccacaggaataaacattacaacggtggctattccattggtgctccttgttgtcctggtgtttgctggaatggggatctttgcagcctttagaaagaagaagaagaaaggaagtccgtatggatcagcagaggctcagaaaacagactgttggaagcagattaaatatccctttgccagacatcagtcagctgagtttaccatcagctatgataatgagaaggagatgacacaaaagttagatctcatcacaagtgatatggcaggttaactccgttgactgccaaaatagcatccccaacgtgcagccctccgcatctatcagcaggttgccccggatggatctcagagatgaggattggaacaccatgttctttcccaccctaacaacaacaaagggcagtaaattaaagtactctttgtaaggtacagttaccgattaatctagagataaaatattttcttaaaaatatatttcattaaacacctatgctgtctctataaa

SEQ ID NO: 5325 - DNA, 297 bp, Homo sapiens
  source 1..297: mol_type = unassigned DNA
ctagtgacttatcaggatagtggcacaatgacatctaagaattatcccgggacctaccccaatcacactgtttgcgaaaagacaattacagtaccaaaggggaaaagactgattctgaggttgggagatttggatatcgaatcccagacctgtgcttctgactatcttctcttcaccagctcttcagatcaatatggttatttcaagctgaagtgtcttcctggagcagttctttgttcttcaaagaggcccatgtaatatgaaactttgaaaggactcaaatataaggtgttgcct

SEQ ID NO: 5326 - DNA, 574 bp, Homo sapiens
  source 1..574: mol_type = unassigned DNA
aacaaccacaaaccacgagagtggctggagatcgatttgggggagaaaaagaaaataacaggaattaggaccacaggatctacacagtcgaacttcaacttttatgttaagagttttgtgatgaacttcaaaaacaataattctaagtggaagacctataaaggaattgtgaataatgaagaaaaggtaatgattcattggtgtggcgcaagacaagtcaaagcaccagtgtttcaactaagaaagaagatgagacaatcacaaggcccatcccctcggaagaaacatccacaggaataaacattacaacggtggctattccattggtgctccttgttgtcctggtgtttgctggaatggggatctttgcagcctttagaaagaagaagaagaaaggaagtccgtatggatcagcagaggctcagaaaacagactgttggaagcagattaaatatccctttgccagacatcagtcagctgagtttaccatcagctatgataatgagaaggagatgacacaaaagttagatctcatcacaagtgatatggcagattaccagcagcccctcatgat

SEQ ID NO: 5327 - DNA, 570 bp, Homo sapiens
  source 1..570: mol_type = unassigned DNA
ttgtgatgaacttcaaaaacaataattctaagtggaagacctataaaggaattgtgaataatgaagaaaaggtgtttcagggtaactctaactttcgggacccagtgcaaaacaatttcatccctcccatcgtggccagatatgtgcgggttgtcccccagacatggcaccagaggatagccttgaaggtggagctcattggttgccagattacacaaggtaatgattcattggtgtggcgcaagacaagtcaaagcaccagtgtttcaactaagaaagaagatgagacaatcacaaggcccatcccctcggaagaaacatccacaggaagaagaagaaaggaagtccgtatggatcagcagaggctcagaaaacagactgttggaagcagattaaatatccctttgccagacatcagtcagctgagtttaccatcagctatgataatgagaaggagatgacacaaaagttagatctcatcacaagtgatatggcagattaccagcagcccctcatgattggcaccgggacagtcacgaggaagggctccaccttccggcccatggacac

SEQ ID NO: 5328 - DNA, 387 bp, Homo sapiens
  source 1..387: mol_type = unassigned DNA
gtaatgattcattggtgtggcgcaagacaagtcaaagcaccagtgtttcaactaagaaagaagatgagacaatcacaaggcccatcccctcggaagaaacatccacaggaataaacattacaacggtggctattccattggtgctccttgttgtcctggtgtttgctggaatggggatctttgcagcctttagaaaaagaagaaaggaagtccgtatggatcagcagaggctcagaaaacagactgttggaagcagattaaatatccctttgccagacatcagtcagctgagtttaccatcagctatgataatgagaaggagatgacacaaaagttagatctcatcacaagtgatatggcagattaccagcagcccctcatgattgg

SEQ ID NO: 5329 - DNA, 387 bp, Homo sapiens
  source 1..387: mol_type = unassigned DNA
cactgatttctaatatgcaaaataagattagtatatattcttctagtgaaatcttgtgacctttcttataaatgagataaatttatagataattctacatatttgtatgattttctaaagcacatggcagctgccatctcatttaattctcacatcaaccctatgaggtaagtactattatgatccttatgttatatagggagagagaggcagatacattggcttataaatattcagtaggactttttgtcttgataggaagaagaagaaaggaagtccgtatggatcagcagaggctcagaaaacagactgttggaagcagattaaatatccctttgccagacatcagtcagctgagtttaccatcagctatgataatgagaagga

SEQ ID NO: 5330 - DNA, 10206 bp, Homo sapiens
  source 1..10206: mol_type = unassigned DNA
gtagtacggttccaactcccagctcgcacaccgctggcggacaccccagtaacaagtgagagcgctccaccccgcagtcccccccgcctctcctccctgggtcccctcggctctcggaagaaaaaccaacagcatctccagctctcgcgcggaattgtctcttcaactttacccaaccgacgacaaggaaccagcctcaaccttttaatgcacagcccggccacaggattgccttccatctcctcttggtccctcctggatgtggtttattgatgacttgcgagcccctcagagagctgtcttccctcctctggctccctccgtttccttgagttagttttctaaggttttaccggggctcgggatctcttggaccgaatggaactttttgctgcctgcttttgctgctgattctgtcagtggacaaggaaaaaggcttcgaaggcagcagaggcgcaggggaggtggagaaagaggtggaggaagaggacgaggaggaggaggaagccgaaggggctcggcgcgtgtgtgtgcatgtgtgcatgcgtgtgtgagtgcatgtgtgtgagtgctgccgctgcccgcgacccctggccccgaaggtgttggctgaaatatggagaatagtcttagatgtgtttgggtacccaagctggcttttgtactcttcggagcttccttgttcagcgcgcatcttcaagtaaccggttttcaaattaaagctttcacagcactgcgcttcctctcagaaccttctgatgccgtcacaatgcggggaggaaatgtcctcctcgactgctccgcggagtccgaccgaggagttccagtgatcaagtggaagaaagatggcattcatctggccttgggaatggatgaaaggaagcagcaactttcaaatgggtctctgctgatacaaaacatacttcattccagacaccacaagccagatgagggactttaccaatgtgaggcatctttaggagattctggctcaattattagtcggacagcaaaagttgcagtagcaggaccactgaggttcctttcacagacagaatctgtcacagccttcatgggagacacagtgctactcaagtgtgaagtcattggggagcccatgccaacaatccactggcagaagaaccaacaagacctgactccaatcccaggtgactcccgagtggtggtcttgccctctggagcattgcagatcagccgactccaaccgggggacattggaatttaccgatgctcagctcgaaatccagccagctcaagaacaggaaatgaagcagaagtcagaattttatcagatccaggactgcatagacagctgtattttctgcaaagaccatccaatgtagtagccattgaaggaaaagatgctgtcctggaatgttgtgtttctggctatcctccaccaagttttacctggttacgaggcgaggaagtcatccaactcaggtctaaaaagtattctttattgggtggaagcaacttgcttatctccaatgtgacagatgatgacagtggaatgtatacctgtgttgtcacatataaaaatgagaatattagtgcctctgcagagctcacagtcttggttccgccatggtttttaaatcatccttccaacctgtatgcctatgaaagcatggatattgagtttgaatgtacagtctctggaaagcctgtgcccactgtgaattggatgaagaatggagatgtggtcattcctagtgattattttcagatagtgggaggaagcaacttacggatacttggggtggtgaagtcagatgaaggcttttatcaatgtgtggctgaaaatgaggctggaaatgcccagaccagtgcacagctcattgtccctaagcctgctatcccaagctccagtgtcctcccttcggctcccagagatgtggtccctgtcttggtttccagccgatttgtccgtctcagctggcgcccacctgcagaagcgaaagggaacattcaaactttcacggtctttttctccagagaaggtgacaacagggaacgagcattgaatacaacacagcctgggtcccttcagctcactgtgggaaacctgaagccagaagccatgtacacctttcgagttgtggcttacaatgaatggggaccgggagagagttctcaacccatcaaggtggccacacagcctgagttgcaagttccagggccagtagaaaacctgcaagctgtatctacctcacctacctcaattcttattacctgggaaccccctgcctatgcaaacggtccagtccaaggttacagattgttctgcactgaggtgtccacaggaaaagaacagaatatagaggttgatggactatcttataaactggaaggcctgaaaaaattcaccgaatatagtcttcgattcttagcttataatcgctatggtccgggcgtctctactgatgatataacagtggttacactttctgacgtgccaagtgccccgcctcagaacgtctccctggaagtggtcaattcaagaagtatcaaagttagctggctgcctcctccatcaggaacacaaaatggatttattaccggctataaaattcgacacagaaagacgacccgcaggggtgagatggaaacactggagccaaacaacctctggtacctattcacaggactggagaaaggaagtcagtacagtttccaggtgtcagccatgacagtcaatggtactggaccaccttccaactggtatactgcagagactccagagaatgatctagatgaatctcaagttcctgatcaaccaagctctcttcatgtgaggccccagactaactgcatcatcatgagttggactcctcccttgaacccaaacatcgtggtgcgaggttatattatcggttatggcgttgggagcccttacgctgagacagtgcgtgtggacagcaagcagcgatattattccattgagaggttagagtcaagttcccattatgtaatctccctaaaagcttttaacaatgccggagaaggagttcctctttatgaaagtgccaccaccaggtctataaccgatcccactgacccagttgattattatcctttgcttgatgatttccccacctcggtcccagatctctccacccccatgctcccaccagtaggtgtacaggctgtggctcttacccatgatgctgtgagggtcagctgggcagacaactctgtccctaagaaccaaaagacgtctgaggtgcgactttacaccgtccggtggagaaccagcttttctgcaagtgcaaaatacaagtcagaagacacaacatctctaagttacacagcaacaggcctcaaaccaaacacaatgtatgaattctcggtcatggtaacaaaaaacagaaggtccagtacttggagcatgactgcacatgccaccacgtatgaagcagcccccacctctgctcccaaggacttgacagtcattactagggaagggaagcctcgtgccgtcattgtgagttggcagcctcccttggaagccaatgggaaaattactgcttacatcttattttataccttggacaagaacatcccaattgatgactggattatggaaacaatcagtggtgataggcttactcatcaaatcatggatctcaaccttgatactatgtattactttcgaattcaagcacgaaattcaaaaggagtggggccactctctgatcctatcctcttcaggactctgaaagtggaacaccctgacaaaatggctaatgaccaaggtcgtcatggagatggaggttattggccagttgatactaatttgattgatagaagcaccctaaatgagccgccaattggacaaatgcaccccccgcatggcagtgtcactcctcagaagaacagcaacctgcttgtgatcattgtggtcaccgttggtgtcatcacagtgctggtagtggtcatcgtggctgtgatttgcacccgacgctcttcagcccagcagagaaagaaacgggccacccacagtgctggcaaaaggaagggcagccagaaggacctccgaccccctgatctttggatccatcatgaagaaatggagatgaaaaatattgaaaagccatctggcactgaccctgcaggaagggactctcccatccaaagttgccaagacctcacaccagtcagccacagccagtcagaaacccaactgggaagcaaaagcacctctcattcaggtcaagacactgaggaagcagggagctctatgtccactctggagaggtcgctggctgcacgccgagccccccgggccaagctcatgattcccatggatgcccagtccaacaatcctgctgtcgtgagcgccatcccggtgccaacgctagaaagtgcccagtacccaggaatcctcccgtctcccacctgtggatatccccacccgcagttcactctccggcctgtgccattcccaacactctcagtggaccgaggtttcggagcaggaagaagtcagtcagtgagtgaaggaccaactacccaacaaccacctatgctgcccccatctcagcctgagcattctagcagcgaggaggcaccaagcagaaccatccccacagcttgtgttcgaccaactcacccactccgcagctttgctaatcctttgctacctccaccaatgagtgcaatagaaccgaaagtcccttacacaccacttttgtctcagccagggcccactcttcctaagacccatgtgaaaacagcctcccttgggttggctggaaaagcaagatcccctttgcttcctgtgtctgtgccaacagcccctgaagtgtctgaggagagccacaaaccaacagaggattcagccaatgtgtatgaacaggatgatctgagtgaacaaatggcaagtttggaaggactcatgaagcagcttaatgccatcacaggctcagccttttaacatgtatttctgaatggatgaggtgaattttccgggaactttgcagcataccaattacccataaacagcacacctgtgtccaagaactctaaccagtgtacaggtcacccatcaggaccactcagttaaggaagatcctgaagcagttcagaaggaataagcattccttctttcacaggcatcaggaattgtcaaatgatgattatgagttccctaaacaaaagcaaagatgcattttcactgcaatgtcaaagtttaagctgctagaatagtcatgggcctttgtcactgcagtgaccacactgtcataactaatacctatgttttcctttgtcaaggcctgttgtttaatgtgtaggtctagtcttacaaaatgcaagtgcattatttaagcctgtaccatgccatggcaaaccagtgcaagctcactattttgttttcaacttaaacatacaaagcacccatgggaatctctcatgccatagcaccaaaggattggatgttttccttacagcacaaaaagtaaatagtaaacaaacaaaaggcagagaatgcttatgtttgtaactcagtcattcatcttgcacaagtggtggatattagtgagtggctaaaaattcacctattttggcaagtatttgtaaatccacccttggttaatatgtatgtctggagtccaggaatataaaaatctgcaactagtggcattctgccagcagcagtacatttctggaaagaggatataatatgcaatcttctcagacacatggtaattatatgcttaagcttgtaataggacagttttcaatttgggtggcttttgtgccataccacactgtgatacaatttcaaagcttcactaaggccatcttccttaggagtttggccagaagaatgcccccaccccttcaccccatccctccctgagttctccttggcaactagcgttgggtgaaatggccagctccacatgtcatatggtgcactggccaatgtcgcctgtcttctaatcccgtagaaatggcagactccctgagagcaggaagagaaggaaaataaaaggtagcttctaacagtaccttctcttaaagaatgccaactctgcctacagggtcagtgttggcaagcattggccaccagacccttttgttaagggaaacttttacactacacctgtgtcagagtcagggggaagcagaggggcaggtgccacctgacacttccgacatgtaaatccagcagatacttttcaaagcagcatcttaaactgtggactacagttttaaacttctattgccatgtttatctacagcttggaactagctaaaattaagaacattttgtatgcagcattttagtttctgaattttcagctgcatttggagttaatccctgtttatgcagctgaatcgccaaaagggagctagtttgcatatttatcagttaggtgacttgaaaacccaatgagagagtttcagctgaattattcctttcagctctgcctttgatttcaagcttgagtaggtcataattttaaaagagcatggaagggataggatctttacaacctaatagctccttttattaggtgggtaattatatatgaatccctgaataaaatattttgagcaaaatggcactgtaacagaagtaataattcagtttatttttttacagttttatgtcgggaaggaaatctgatgtcaaagagagggctgttcaaatggttcattagaaagtccggtccatttgcgaatttgttccttcaacaagagtgctcattcaagttactcagattttctggaagtcttttctgaagagctatgtgatgttgttctatgggacagactactcttatttaacatctgggcacttaggtagacaaccttctactgacctggaataaagtgtttcctaacataatattgaattattcagaaataatccattacttcaaaaaagaaaatattcattgggctagcccaaccttctctaggccctaagaattattacctcccctttctaattctagcaaacatggaacattctccttaggcacttgacacccacgagggtaatcctgagtgctcagtttggaataggttgcaaatctcagattttagggattgagtcacaccttcaatctatagaatgaagttgaccaattaaaaaaaaaaaaaaaacctatcattttcacaaatttctagatccttctagtcaaaaataattatttaggaaataaaatttttaaaaatccatttaaatacatgttatttgtcttcagtggaagttatatttctgctgcatgcttttgaaactttcttcattaaatagaatggtttgtcttagtaactggcaatgccagtattagcaccatgcatttaatctataatacaatcaatttaaacatcctcaaaaaactctagtatcatttacctggtagtattaatatacaatgatgtcaccacaacttttgtataactctgttccctttaccctcaaatgattcatatatgtatataattgcctgcccaagttttcaggtaacttattaatttcccagtctcctgatctcttgacaagaagaaacctgtgaatactgcaaactagcctctgacttcctcctactgagtctagttcatggtatccaggactctttatgctcataactctctctgattcccattgggtgatacctgacagccaaccagccgctctgccaccagaactcatttctccctgaaaaagaagaaaatcatatttggcagagcattctctggtctgccctgtaatgtgcttaaatgtcaggcaacatcctcttttttttaaaaaaaatggtatttttctttaaatttcaccctaataagaaagctattttctctcctctgcagaaatttctgcatttgtgaaacttataaaaatttagatagttcaaatgtataaagaatatttggatgatgctctagccaaaagttaaatatttcgtagtgaatcatagccaataagaaaccagtcatacttgcctctttgaataacagagatataagcttctagaatatttaaataatgaagttttacatttgggtattataaaatgcatactcaattgaatgagctgaaaaaaataccaagccagtgatataagtggagatttattaaggattcctgttgagtatattcttagtttcctcaaaatagggattattcaaaattaggtgtatgttcaatctcctgctttggttccagctacacaaggagagccatcctgtgctagtgtgatgtttcagacaacattctgaaactaaaatgtttggcacttattggcttttccaataaagaatctcttaagtacaggtatttctggaagctgttggtgtctgtgcttgaagatgattgctgatacttatccaccctttgggtacttctgttgactttgtttaaataatcatcttatggttgtccccaaatgtaatatggtatctcagatatagcagctggactgtaattacaacaaaaggttacctctaaagataacatcttaccattttagataaaattgtgtcccagaattcttatggtttcggaatgtacatttctagtcaatgaaagaaagaaaaatggaaaaattgtctagtttcaggcatgtttaaagaaaacaaagtcatctgaactttaaaatagatgcagagcagggttactttccctttcactcagttcccttcatgcaaccacaggcagtcctgcaggccagaggttactatcctaacctgctcataaccatatactatacagagcccacaactttctggagatgcagaagcagccatacactcaagtctctgtttttgtaaatcacattcaaagcaacattttactcataatttgcatttctctggtgactttcagaaatcactttagtattgtacagaaaagctttttatttgagtctagtgtttaaaattaaattggatacttgggaaaatcatagataggtgttttgtatgatattccattccaatgcaaaatatatgtacccatgcctcaatgtatcttgctatctaaatacctgttgccaaaaagtattgatttgggaaaaaaaatgccaatttcctggtcagtgaggttatgtaaaagacaaaataccacacccatatcagcaaatgaatattactactcatctggactcttcgttgccactattgcataacgttcacgtggcagacttccagttgcactctctgaaggacttttttctcttactctcaatagagagcctttgtacattgtcatcctatgattgttgttggtagaagagcaagagcaaaactctgcaagatttaataaacacaggggcatgggccaagggatctcactgtgtgctgaacatgtattttcagatgcaagaaaggaatgatggagaggaggagaaatgctgttttttattattgtagggtaaatctgacaattctgaactttgtgaattgtcagcttgtttgggggaagggtgggcgggtatggggtgtactttttataagtaatatttaatttattatttagagtggcttctttttggataatttatgataaaaagggagatctggttgggatctagatacggctgttaaagctgcagtgttccatacctcagagggaccactttggaaatgaattgtccattgctgagtatgaagagatgtccagtccaggcaaagccttcactgaagttccatcatcgccacttctccctttttagggtcattcaaagaagataacaccaaacctaaataattctgaaagcattttgcagatcagtgctactcattcaaagggctttgcaactcaaacagattgttagtgtgctagtgataagtttatttggtagaaatgggtatactacagctttaactagccttagtgagaaaagaaattttttgttgttacaaaacaccttttttaacaaaaaggtattttgagcctacaaaaagtttctttaaactgtcagattctagcattgttaaccaaattagactagtgattgcaatatttaagtgtaaatcttgttctacaagaaaggaaacttgcttacagtttaaaacaatgactgtttctacacatgatcttgtatactactacacaaggaaaagggggttttgtaaacactgtagaacagtctcatattcatttttttatagaaatgttattccaatggtgcattttttgtttaataaataaagttttgatacaaa

SEQ ID NO: 5331 - DNA, 621 bp, Homo sapiens
  source 1..621: mol_type = unassigned DNA
aaattaaagctttcacagcactgcgcttcctctcagaaccttctgatgccgtcacaatgcggggaggaaatgtcctcctcgactgctccgcggagtccgaccgaggagttccagtgatcaagtggaagaaagatggcattcatctggccttgggaatggatgaaaggaagcagcaactttcaaatgggtctctgctgatacaaaacatacttcattccagacaccacaagccagatgagggactttaccaatgtgaggcatctttaggagattctggctcaattattagtcggacagcaaaagttgcagtagcaggagcaaatataagaattttgcctagaaggtcaacttcatcctgtgcagcagtctggaaaatgtatcccagggcccttgaatacgctcagaattctatttgggaaggtttggttacagtgcagagctttccattttacatttatagagatattgtttattttcaaatgataagcagaaaattaaattgctctgactctgtaattcttaatgacttaatgatcttcatttagctaaatgttcccattgttttgtagttaaagcatgagagaaagaaaaaataagaaataaatgtggtcttataagtaa

SEQ ID NO: 5332 - DNA, 549 bp, Homo sapiens
  source 1..549: mol_type = unassigned DNA
accgaggagttccagtgatcaagtggaagaaagatggcattcatctggccttgggaatggatgaaaggaagcagcaactttcaaatgggtctctgctgatacaaaacatacttcattccagacaccacaagccagatgagggactttaccaatgtgaggcatctttaggagattctggctcaattattagtcggacagcaaaagttgcagtagcagaaaagaagctgggcacaggggctcatgcctgtaatcccagcactttgggaagccaaggcaggaggattacttgaacccaggagttggagactcacctgggcaacatatagaccactgaggttcctttcacagacagaatctgtcacagccttcatgggagacacagtgctactcaagtgtgaagtcattggggagcccatgccaacaatccactggcagaagaaccaacaagacctgactccaatcccaggtgactcccgagtggtggtcttgccctctggagcattgcagatcagccgactccaaccgggggacattggaatttaccgatgc

SEQ ID NO: 5333 - DNA, 470 bp, Homo sapiens
  source 1..470: mol_type = unassigned DNA
cgaggagttccagtgatcaagtggaagaaagatggcattcatctggccttgggaatggatgaaaggaagcagcaactttcaaatgggtctctgctgatacaaaacatacttcattccagacaccacaagccagatgagggactttaccaatgtgaggcatctttaggagattctggctcaattattagtcggacagcaaaagttgcagtagcagagggaaatgtgaggctgagaaagtttggacaacatagccatggcagtttataactcaaagtatatggatggatgacactcgctagagagttgcaacagccgatgcagctgtccccaggccccaaactcacttatatttcctgaaacaccaggaaaagcatcttttatttttatatgagagccctaagagattattttcatcttattcaaaaatgaaaagattttatttaattaaaaaatctatttctattatctta

SEQ ID NO: 5334 - DNA, 3132 bp, Homo sapiens
  source 1..3132: mol_type = unassigned DNA
gaggagttccagtgatcaagtggaagaaagatggcattcatctggccttgggaatggatgaaaggaagcagcaactttcaaatgggtctctgctgatacaaaacatacttcattccagacaccacaagccagatgagggactttaccaatgtgaggcatctttaggagattctggctcaattattagtcggacagcaaaagttgcagtagcaggaccactgaggttcctttcacagacagaatctgtcacagccttcatgggagacacagtgctactcaagtgtgaagtcattggggagcccatgccaacaatccactggcagaagaaccaacaagacctgactccaatcccaggtgactcccgagtggtggtcttgccctctggagcattgcagatcagccgactccaaccgggggacattggaatttaccgatgctcagctcgaaatccagccagctcaagaacaggaaatgaagcagaagtcagaattttatcagatccaggactgcatagacagctgtattttctgcaaagaccatccaatgtagtagccattgaaggaaaagatgctgtcctggaatgttgtgtttctggctatcctccaccaagttttacctggttacgaggcgaggaagtcatccaactcaggtctaaaaagtattctttattgggtggaagcaacttgcttatctccaatgtgacagatgatgacagtggaatgtatacctgtgttgtcacatataaaaatgagaatattagtgcctctgcagagctcacagtcttggttccgccatggtttttaaatcatccttccaacctgtatgcctatgaaagcatggatattgagtttgaatgtacagtctctggaaagcctgtgcccactgtgaattggatgaagaatggagatgtggtcattcctagtgattattttcagatagtgggaggaagcaacttacggatacttggggtggtgaagtcagatgaaggcttttatcaatgtgtggctgaaaatgaggctggaaatgcccagaccagtgcacagctcattgtccctaagcctgctatcccaagctccagtgtcctcccttcggctcccagagatgtggtccctgtcttggtttccagccgatttgtccgtctcagctggcgcccacctgcagaagcgaaagggaacattcaaactttcacggtctttttctccagagaaggtgacaacagggaacgagcattgaatacaacacagcctgggtcccttcagctcactgtgggaaacctgaagccagaagccatgtacacctttcgagttgtggcttacaatgaatggggaccgggagagagttctcaacccatcaaggtggccacacagcctgagttgcaagttccagggccagtagaaaacctgcaagctgtatctacctcacctacctcaattcttattacctgggaaccccctgcctatgcaaacggtccagtccaaggttacagattgttctgcactgaggtgtccacaggaaaagaacagaatatagaggttgatggactatcttataaactggaaggcctgaaaaaattcaccgaatatagtcttcgattcttagcttataatcgctatggtccgggcgtctctactgatgatataacagtggttacactttctgacgtgccaagtgccccgcctcagaacgtctccctggaagtggtcaattcaagaagtatcaaagttagctggctgcctcctccatcaggaacacaaaatggatttattaccggctataaaattcgacacagaaagacgacccgcaggggtgagatggaaacactggagccaaacaacctctggtacctattcacaggactggagaaaggaagtcagtacagtttccaggtgtcagccatgacagtcaatggtactggaccaccttccaactggtatactgcagagactccagagaatgatctagatgaatctcaagttcctgatcaaccaagctctcttcatgtgaggccccagactaactgcatcatcatgagttggactcctcccttgaacccaaacatcgtggtgcgaggttatattatcggttatggcgttgggagcccttacgctgagacagtgcgtgtggacagcaagcagcgatattattccattgagaggttagagtcaagttcccattatgtaatctccctaaaagcttttaacaatgccggagaaggagttcctctttatgaaagtgccaccaccaggtctataaccgtcagaagacacaacatctctaagttacacagcaacaggcctcaaaccaaacacaatgtatgaattctcggtcatggtaacaaaaaacagaaggtccagtacttggagcatgactgcacatgccaccacgtatgaagcagcccccacctctgctcccaaggacttgacagtcattactagggaagggaagcctcgtgccgtcattgtgagttggcagcctcccttggaagccaatgggaaaattactgcttacatcttattttataccttggacaagaacatcccaattgatgactggattatggaaacaatcagtggtgataggcttactcatcaaatcatggatctcaaccttgatactatgtattactttcgaattcaagcacgaaattcaaaaggagtggggccactctctgatcctatcctcttcaggactctgaaagtggaacaccctgacaaaatggctaatgaccaaggtatggtggctcaatctgtcattttgtgttccttgaatcaatcctgtctgttagacatgtcagtcattactttatattcctcttttcacctggaccatacacctgatgaagcagacactggcgtgacgattaatcttgttaatgaagttctgcttggctgaggctgcggctctgataaggaagatgtaaattttcttgagaggaaattgttttgtctccattctgaaggaccaattaaaatgtcaagcttctttgtatgaaataaatttttagtctctgtctgcacttctgaataattcacattaagtataattaagctcagcataattttcaagctgctcttgcaccctttcctgagctatggattaaagttctgtagctctacagagaaaacccgtaaa

SEQ ID NO: 5335 - DNA, 576 bp, Homo sapiens
  source 1..576: mol_type = unassigned DNA
agttccagtgatcaagtggaagaaagatggcattcatctggccttgggaatggatgaaaggaagcagcaactttcaaatgggtctctgctgatacaaaacatacttcattccagacaccacaagccagatgagggactttaccaatgtgaggcatctttaggagattctggctcaattattagtcggacagcaaaagttgcagtagcaggtctttgttcttagagctcccaagatggcggcaggccactcccaagatggcagcaagccttttattctctgacctggggttcttggcctcatggattccaaggaatggaaacttgggccatgtggaccactgaggttcctttcacagacagaatctgtcacagccttcatgggagacacagtgctactcaagtgtgaagtcattggggagcccatgccaacaatccactggcagaagaaccaacaagacctgactccaatcccaggtgactcccgagtggtggtcttgccctctggagcattgcagatcagccgactccaaccgggggacattggaatttaccgatgctcagctcgaaatccagcca

SEQ ID NO: 5336 - DNA, 546 bp, Homo sapiens
  source 1..546: mol_type = unassigned DNA
gttccagtgatcaagtggaagaaagatggcattcatctggccttgggaatggatgaaaggaagcagcaactttcaaatgggtctctgctgatacaaaacatacttcattccagacaccacaagccagatgagggactttaccaatgtgaggcatctttaggagattctggctcaattattagtcggacagcaaaagttgcagtagcagactaggtgtcatgtgatataactggacccaggagaatgaccccacaactgaaagatttttatgaaggatgatttactattctccaacgtactgacatttttctacagcccaatcattgctggggagaccactgaggttcctttcacagacagaatctgtcacagccttcatgggagacacagtgctactcaagtgtgaagtcattggggagcccatgccaacaatccactggcagaagaaccaacaagacctgactccaatcccaggtgactcccgagtggtggtcttgccctctggagcattgcagatcagccgactccaaccgggggacattggaa

SEQ ID NO: 5337 - DNA, 518 bp, Homo sapiens
  source 1..518: mol_type = unassigned DNA
tgatcaagtggaagaaagatggcattcatctggccttgggaatggatgaaaggaagcagcaactttcaaatgggtctctgctgatacaaaacatacttcattccagacaccacaagccagatgagggactttaccaatgtgaggcatctttaggagattctggctcaattattagtcggacagcaaaagttgcagtagcagggcaatgaaaaataggcaacaaatcctgagacatacatattgtaatcttggatcagatatctgcctttgcaatctgtgaacacaaactggcaagcctgaattaagttttcaaaaagttaaatctatgggagattttttggcaagcagtgcccaaatcccttggaataaaagattcatttttgaccactggatctactattatgttaatgcaatcaatacagtttgtactgaccagagcaggcgtttgagattgagtgaccttgcaatcatttccaaaacatgtacagggcactcctctcagccttcttaatggcttt

SEQ ID NO: 5338 - DNA, 322 bp, Homo sapiens
  source 1..322: mol_type = unassigned DNA
cagcaactttcaaatgggtctctgctgatacaaaacatacttcattccagacaccacaagccagatgagggactttaccaatgtgaggcatctttaggagattctggctcaattattagtcggacagcaaaagttgcagtagcaggtcctacttagtctagtctcatcttggaagactgatcagaataactcattttcatcaataacaggacaattgggcagaatcaccactccttcatgcactctcctagtgagggtctgagaaagttgaaatctgaaagatgtgattttgtcaggtggtgctataaagaattacatctca

SEQ ID NO: 5339 - DNA, 374 bp, Homo sapiens
  source 1..374: mol_type = unassigned DNA
ctggaatgttgtgtttctggctatcctccaccaagttttacctggttacgaggcgaggaagtcatccaactcaggtctaaaaagtattctttattgggtggaagcaacttgcttatctccaatgtgacagatgatgacagtggaatgtatacctgtgttgtcacatataaaaatgagaatattagtgcctctgcagagctcacagtcttggtaatcatcgataaagtattggtggacaccttttgggtacaaggattgcactaggttctgggaagactacagaaacatctgaaacctggcttcagtgggcttcgtataattacaattcgtaaaatcagttggcctaatactgtctgaataaacttttatttaaa

SEQ ID NO: 5340 - DNA, 505 bp, Homo sapiens
  source 1..505: mol_type = unassigned DNA
tctggctatcctccaccaagttttacctggttacgaggcgaggaagtcatccaactcaggtctaaaaagtattctttattgggtggaagcaacttgcttatctccaatgtgacagatgatgacagtggaatgtatacctgtgttgtcacatataaaaatgagaatattagtgcctctgcagagctcacagtcttggttccgccatggtttttaaatcatccttccaacctgtatgcctatgaaagcatggatattgagtttgaatgtacagtctctggaaagcctgtgcccactgtgaattggatgaagaatggagatgtggtcattcctagtgattattttcagatagtggtaattattttgtttcatatttgttttataatcccattcattgttttctatttttttcacttgtttttatttcttgaaaaaaaaaaaggttcctgttggagattttttgtgatgtgttaaaaaagttattcaaataaagcaaatgattttctag

SEQ ID NO: 5341 - DNA, 3517 bp, Homo sapiens
  source 1..3517: mol_type = unassigned DNA
aagaagagttactggagcactctctccacccttgcacagagagaaaaggccatgtgagaacagagaaggtgttgtctggaagccagggagaggacccttactagaagccaactttgctggatccttgtgtttacattgaggccacccagataatccaggatattctactcatctcaagatccttaacttcacagctacaaagttcctttcaccagttccgccatggtttttaaatcatccttccaacctgtatgcctatgaaagcatggatattgagtttgaatgtacagtctctggaaagcctgtgcccactgtgaattggatgaagaatggagatgtggtcattcctagtgattattttcagatagtgggaggaagcaacttacggatacttggggtggtgaagtcagatgaaggcttttatcaatgtgtggctgaaaatgaggctggaaatgcccagaccagtgcacagctcattgtccctaagcctgctatcccaagctccagtgtcctcccttcggctcccagagatgtggtccctgtcttggtttccagccgatttgtccgtctcagctggcgcccacctgcagaagcgaaagggaacattcaaactttcacggtctttttctccagagaaggtgacaacagggaacgagcattgaatacaacacagcctgggtcccttcagctcactgtgggaaacctgaagccagaagccatgtacacctttcgagttgtggcttacaatgaatggggaccgggagagagttctcaacccatcaaggtggccacacagcctgagttgcaagttccagggccagtagaaaacctgcaagctgtatctacctcacctacctcaattcttattacctgggaaccccctgcctatgcaaacggtccagtccaaggttacagattgttctgcactgaggtgtccacaggaaaagaacagaatatagaggttgatggactatcttataaactggaaggcctgaaaaaattcaccgaatatagtcttcgattcttagcttataatcgctatggtccgggcgtctctactgatgatataacagtggttacactttctgacgtgccaagtgccccgcctcagaacgtctccctggaagtggtcaattcaagaagtatcaaagttagctggctgcctcctccatcaggaacacaaaatggatttattaccggctataaaattcgacacagaaagacgacccgcaggggtgagatggaaacactggagccaaacaacctctggtacctattcacaggactggagaaaggaagtcagtacagtttccaggtgtcagccatgacagtcaatggtactggaccaccttccaactggtatactgcagagactccagagaatgatctagatgaatctcaagttcctgatcaaccaagctctcttcatgtgaggccccagactaactgcatcatcatgagttggactcctcccttgaacccaaacatcgtggtgcgaggttatattatcggttatggcgttgggagcccttacgctgagacagtgcgtgtggacagcaagcagcgatattattccattgagaggttagagtcaagttcccattatgtaatctccctaaaagcttttaacaatgccggagaaggagttcctctttatgaaagtgccaccaccaggtctataaccgatctctccacccccatgctcccaccagtaggtgtacaggctgtggctcttacccatgatgctgtgagggtcagctgggcagacaactctgtccctaagaaccaaaagacgtctgaggtgcgactttacaccgtccggtggagaaccagcttttctgcaagtgcaaaatacaagtcagaagacacaacatctctaagttacacagcaacaggcctcaaaccaaacacaatgtatgaattctcggtcatggtaacaaaaaacagaaggtccagtacttggagcatgactgcacatgccaccacgtatgaagcagcccccacctctgctcccaaggacttgacagtcattactagggaagggaagcctcgtgccgtcattgtgagttggcagcctcccttggaagccaatgggaaaattactgcttacatcttattttataccttggacaagaacatcccaattgatgactggattatggaaacaatcagtggtgataggcttactcatcaaatcatggatctcaaccttgatactatgtattactttcgaattcaagcacgaaattcaaaaggagtggggccactctctgatcctatcctcttcaggactctgaaagtggaacaccctgacaaaatggctaatgaccaaggtcgtcatggagatggaggttattggccagttgatactaatttgattgatagaagcaccctaaatgagccgccaattggacaaatgcaccccccgcatggcagtgtcactcctcagaagaacagcaacctgcttgtgatcattgtggtcaccgttggtgtcatcacagtgctggtagtggtcatcgtggctgtgatttgcacccgacgctcttcagcccagcagagaaagaaacgggccacccacagtgctggcaaaaggaagggcagccagaaggacctccgaccccctgatctttggatccatcatgaagaaatggagatgaaaaatattgaaaagccatctggcactgaccctgcaggaagggactctcccatccaaagttgccaagacctcacaccagtcagccacagccagtcagaaacccaactgggaagcaaaagcacctctcattcaggtcaagacactgaggaagcagggagctctatgtccactctggagaggtcgctggctgcacgccgagccccccgggccaagctcatgattcccatggatgcccagtccaacaatcctgctgtcgtgagcgccatcccggtgccaacgctagaaagtgcccagtacccaggaatcctcccgtctcccacctgtggatatccccacccgcagttcactctccggcctgtgccattcccaacactctcagtggaccgaggtttcggagcaggaagaacagtgagtgaaggaccaactacccaacaaccacctatgctgcccccatctcagcctgagcattctagcagcgaggaggcaccaagcagaaccatccccacagcttgtgttcgaccaactcacccactccgcagctttgctaatcctttgctacctccaccaatgagtgcaatagaaccgaaagtcccttacacaccacttttgtctcagccagggcccactcttcctaagacccatgtgaaaacagcctcccttgggttggctggaaaagcaagatcccctttgcttcctgtgtctgtgccaacagcccctgaagtgtctgaggagagccacaaaccaacagaggattcagccaatgtggagatggagtgggtgaaacaatatgcaatctcttattatccccttttattaccagcatcttcattcagtgtatgaacaggatgatctgagtgaaca

SEQ ID NO: 5342 - DNA, 444 bp, Homo sapiens
  source 1..444: mol_type = unassigned DNA
ttgcacagagagaaaaggccatgtgagaacagagaaggtgttgtctggaagccagggagaggacccttactagaagccaactttgctgttccgccatggtttttaaatcatccttccaacctgtatgcctatgaaagcatggatattgagtttgaatgtacagtctctggaaagcctgtgcccactgtgaattggatgaagaatggagatgtggtcattcctagtgattattttcagatagtgggaggaagcaacttacggatacttggggtggtgaagtcagatgaaggcttttatcaatgtgtggctgaaaatgaggctggaaatgcccagaccagtgcacagctcattgtccctaagcctgctatcccaagctccagtgtcctcccttcggctcccagagatgtggtccctgtcttggtttccagccgatttgtccgtctc

SEQ ID NO: 5343 - DNA, 564 bp, Homo sapiens
  source 1..564: mol_type = unassigned DNA
tactgagtacattctggtaaggtcataaggcagttggaaaggcctcaaaggttaactgaaatgatcaaaggaatgaaatattatagtaagaccagatgagaaattttcagcacagaaaaatgatgggtgaaaagggacacaatcaaattcctgaccatgaaggatattagtaactgaaacatggacttgttcaacaaattcaagaatactgtaggagaactctcctgaagcttgaagttccgccatggtttttaaatcatccttccaacctgtatgcctatgaaagcatggatattgagtttgaatgtacagtctctggaaagcctgtgcccactgtgaattggatgaagaatggagatgtggtcattcctagtgattattttcagatagtgggaggaagcaacttacggatacttggggtggtgaagtcagatgaaggcttttatcaatgtgtggctgaaaatgaggctggaaatgcccagaccagtgcacagctcattgtccctaagcctgctatcccaagctccagtgtcctcccttcggctcccagagatgtggtccctg

SEQ ID NO: 5344 - DNA, 750 bp, Homo sapiens
  source 1..750: mol_type = unassigned DNA
tcagctgggcagacaactctgtccctaagaaccaaaagacgtctgaggtgcgactttacaccgtccggtggagaaccagcttttctgcaagtgcaaaatacaagtcagaagacacaacatctctaagttacacagcaacaggcctcaaaccaaacacaatgtatgaattctcggtcatggtaacaaaaaacagaaggtccagtacttggagcatgactgcacatgccaccacgtatgaagcagcccccacctctgctcccaaggacttgacagtcattactagggaagggaagcctcgtgccgtcattgtgagttggcagcctcccttggaagccaatgggaaaattactgcttacatcttattttataccttggacaagaacatcccaattgatgactggattatggaaacaatcagtggtgataggcttactcatcaaatcatggatctcaaccttgatactatgtattactttcgaattcaagcacgaaattcaaaaggagtggggccactctctgatcctatcctcttcaggactctgaaagtggaacaccctgacaaaatggctaatgaccaagacactggcgtgacgattaatcttgttaatgaagttctgcttggctgaggctgcggctctgataaggaagatgtaaattttcttgagaggaaattgttttgtctccattctgaaggaccaattaaaatgtcaagcttctttgtatgaaataaatttttagtctctgtctgca

SEQ ID NO: 5345 - DNA, 528 bp, Homo sapiens
  source 1..528: mol_type = unassigned DNA
actacccaacaaccacctatgctgcccccatctcagcctgagcattctagcagcgaggaggcaccaagcagaaccatccccacagcttgtgttcgaccaactcacccactccgcagctttgctaatcctttgctacctccaccaatgagtgcaatagaaccgaaagtcccttacacaccacttttgtctcagccagggcccactcttcctaagacccatgtgaaaacagcctcccttgggttggctggaaaagcaagatcccctttgcttcctgtgtctgtgccaacagcccctgaagtgtctgaggagagccacaaaccaacagaggattcagccaatgtaagggcatctttaaaattcatgcttcatcaagggacagattgactggcgctgtgtaatagcatctaaaccaatgagtactgtccattcaccccaggccaccccaggccattgttgttcttattgttgtttgttcctttgttttcctgcacttaaatatgaagaggaaataaaagctatgaaaaaaaa

SEQ ID NO: 5346 - DNA, 155 bp, Homo sapiens
  source 1..155: mol_type = unassigned DNA
ttgatttgaaacccaatctttttgactctgaaacatcttccttgtcacaggtggagatggagtgggtgaaacaatatgcaatctcttattatccccttttattaccagcatcttcattcagtgagtatattccaaggacagccctggctgtggtc

SEQ ID NO: 5347 - DNA, 9525 bp, Homo sapiens
  source 1..9525: mol_type = unassigned DNA
tccctgtgctctcttgttccaggttttcaaattaaagctttcacagcactgcgcttcctctcagaaccttctgatgccgtcacaatgcggggaggaaatgtcctcctcgactgctccgcggagtccgaccgaggagttccagtgatcaagtggaagaaagatggcattcatctggccttgggaatggatgaaaggaagcagcaactttcaaatgggtctctgctgatacaaaacatacttcattccagacaccacaagccagatgagggactttaccaatgtgaggcatctttaggagattctggctcaattattagtcggacagcaaaagttgcagtagcaggaccactgaggttcctttcacagacagaatctgtcacagccttcatgggagacacagtgctactcaagtgtgaagtcattggggagcccatgccaacaatccactggcagaagaaccaacaagacctgactccaatcccaggtgactcccgagtggtggtcttgccctctggagcattgcagatcagccgactccaaccgggggacattggaatttaccgatgctcagctcgaaatccagccagctcaagaacaggaaatgaagcagaagtcagaattttatcagatccaggactgcatagacagctgtattttctgcaaagaccatccaatgtagtagccattgaaggaaaagatgctgtcctggaatgttgtgtttctggctatcctccaccaagttttacctggttacgaggcgaggaagtcatccaactcaggtctaaaaagtattctttattgggtggaagcaacttgcttatctccaatgtgacagatgatgacagtggaatgtatacctgtgttgtcacatataaaaatgagaatattagtgcctctgcagagctcacagtcttggttccgccatggtttttaaatcatccttccaacctgtatgcctatgaaagcatggatattgagtttgaatgtacagtctctggaaagcctgtgcccactgtgaattggatgaagaatggagatgtggtcattcctagtgattattttcagatagtgggaggaagcaacttacggatacttggggtggtgaagtcagatgaaggcttttatcaatgtgtggctgaaaatgaggctggaaatgcccagaccagtgcacagctcattgtccctaagcctgctatcccaagctccagtgtcctcccttcggctcccagagatgtggtccctgtcttggtttccagccgatttgtccgtctcagctggcgcccacctgcagaagcgaaagggaacattcaaactttcacggtctttttctccagagaaggtgacaacagggaacgagcattgaatacaacacagcctgggtcccttcagctcactgtgggaaacctgaagccagaagccatgtacacctttcgagttgtggcttacaatgaatggggaccgggagagagttctcaacccatcaaggtggccacacagcctgagttgcaagttccagggccagtagaaaacctgcaagctgtatctacctcacctacctcaattcttattacctgggaaccccctgcctatgcaaacggtccagtccaaggttacagattgttctgcactgaggtgtccacaggaaaagaacagaatatagaggttgatggactatcttataaactggaaggcctgaaaaaattcaccgaatatagtcttcgattcttagcttataatcgctatggtccgggcgtctctactgatgatataacagtggttacactttctgacgtgccaagtgccccgcctcagaacgtctccctggaagtggtcaattcaagaagtatcaaagttagctggctgcctcctccatcaggaacacaaaatggatttattaccggctataaaattcgacacagaaagacgacccgcaggggtgagatggaaacactggagccaaacaacctctggtacctattcacaggactggagaaaggaagtcagtacagtttccaggtgtcagccatgacagtcaatggtactggaccaccttccaactggtatactgcagagactccagagaatgatctagatgaatctcaagttcctgatcaaccaagctctcttcatgtgaggccccagactaactgcatcatcatgagttggactcctcccttgaacccaaacatcgtggtgcgaggttatattatcggttatggcgttgggagcccttacgctgagacagtgcgtgtggacagcaagcagcgatattattccattgagaggttagagtcaagttcccattatgtaatctccctaaaagcttttaacaatgccggagaaggagttcctctttatgaaagtgccaccaccaggtctataaccgatcccactgacccagttgattattatcctttgcttgatgatttccccacctcggtcccagatctctccacccccatgctcccaccagtaggtgtacaggctgtggctcttacccatgatgctgtgagggtcagctgggcagacaactctgtccctaagaaccaaaagacgtctgaggtgcgactttacaccgtccggtggagaaccagcttttctgcaagtgcaaaatacaagtcagaagacacaacatctctaagttacacagcaacaggcctcaaaccaaacacaatgtatgaattctcggtcatggtaacaaaaaacagaaggtccagtacttggagcatgactgcacatgccaccacgtatgaagcagcccccacctctgctcccaaggacttgacagtcattactagggaagggaagcctcgtgccgtcattgtgagttggcagcctcccttggaagccaatgggaaaattactgcttacatcttattttataccttggacaagaacatcccaattgatgactggattatggaaacaatcagtggtgataggcttactcatcaaatcatggatctcaaccttgatactatgtattactttcgaattcaagcacgaaattcaaaaggagtggggccactctctgatcctatcctcttcaggactctgaaagtggaacaccctgacaaaatggctaatgaccaaggtcgtcatggagatggaggttattggccagttgatactaatttgattgatagaagcaccctaaatgagccgccaattggacaaatgcaccccccgcatggcagtgtcactcctcagaagaacagcaacctgcttgtgatcattgtggtcaccgttggtgtcatcacagtgctggtagtggtcatcgtggctgtgatttgcacccgacgctcttcagcccagcagagaaagaaacgggccacccacagtgctggcaaaaggaagggcagccagaaggacctccgaccccctgatctttggatccatcatgaagaaatggagatgaaaaatattgaaaagccatctggcactgaccctgcaggaagggactctcccatccaaagttgccaagacctcacaccagtcagccacagccagtcagaaacccaactgggaagcaaaagcacctctcattcaggtcaagacactgaggaagcagggagctctatgtccactctggagaggtcgctggctgcacgccgagccccccgggccaagctcatgattcccatggatgcccagtccaacaatcctgctgtcgtgagcgccatcccggtgccaacgctagaaagtgcccagtacccaggaatcctcccgtctcccacctgtggatatccccacccgcagttcactctccggcctgtgccattcccaacactctcagtggaccgaggtttcggagcaggaagaagtcagtcagtgagtgaaggaccaactacccaacaaccacctatgctgcccccatctcagcctgagcattctagcagcgaggaggcaccaagcagaaccatccccacagcttgtgttcgaccaactcacccactccgcagctttgctaatcctttgctacctccaccaatgagtgcaatagaaccgaaagtcccttacacaccacttttgtctcagccagggcccactcttcctaagacccatgtgaaaacagcctcccttgggttggctggaaaagcaagatcccctttgcttcctgtgtctgtgccaacagcccctgaagtgtctgaggagagccacaaaccaacagaggattcagccaatgtgtatgaacaggatgatctgagtgaacaaatggcaagtttggaaggactcatgaagcagcttaatgccatcacaggctcagccttttaacatgtatttctgaatggatgaggtgaattttccgggaactttgcagcataccaattacccataaacagcacacctgtgtccaagaactctaaccagtgtacaggtcacccatcaggaccactcagttaaggaagatcctgaagcagttcagaaggaataagcattccttctttcacaggcatcaggaattgtcaaatgatgattatgagttccctaaacaaaagcaaagatgcattttcactgcaatgtcaaagtttaagctgctagaatagtcatgggcctttgtcactgcagtgaccacactgtcataactaatacctatgttttcctttgtcaaggcctgttgtttaatgtgtaggtctagtcttacaaaatgcaagtgcattatttaagcctgtaccatgccatggcaaaccagtgcaagctcactattttgttttcaacttaaacatacaaagcacccatgggaatctctcatgccatagcaccaaaggattggatgttttccttacagcacaaaaagtaaatagtaaacaaacaaaaggcagagaatgcttatgtttgtaactcagtcattcatcttgcacaagtggtggatattagtgagtggctaaaaattcacctattttggcaagtatttgtaaatccacccttggttaatatgtatgtctggagtccaggaatataaaaatctgcaactagtggcattctgccagcagcagtacatttctggaaagaggatataatatgcaatcttctcagacacatggtaattatatgcttaagcttgtaataggacagttttcaatttgggtggcttttgtgccataccacactgtgatacaatttcaaagcttcactaaggccatcttccttaggagtttggccagaagaatgcccccaccccttcaccccatccctccctgagttctccttggcaactagcgttgggtgaaatggccagctccacatgtcatatggtgcactggccaatgtcgcctgtcttctaatcccgtagaaatggcagactccctgagagcaggaagagaaggaaaataaaaggtagcttctaacagtaccttctcttaaagaatgccaactctgcctacagggtcagtgttggcaagcattggccaccagacccttttgttaagggaaacttttacactacacctgtgtcagagtcagggggaagcagaggggcaggtgccacctgacacttccgacatgtaaatccagcagatacttttcaaagcagcatcttaaactgtggactacagttttaaacttctattgccatgtttatctacagcttggaactagctaaaattaagaacattttgtatgcagcattttagtttctgaattttcagctgcatttggagttaatccctgtttatgcagctgaatcgccaaaagggagctagtttgcatatttatcagttaggtgacttgaaaacccaatgagagagtttcagctgaattattcctttcagctctgcctttgatttcaagcttgagtaggtcataattttaaaagagcatggaagggataggatctttacaacctaatagctccttttattaggtgggtaattatatatgaatccctgaataaaatattttgagcaaaatggcactgtaacagaagtaataattcagtttatttttttacagttttatgtcgggaaggaaatctgatgtcaaagagagggctgttcaaatggttcattagaaagtccggtccatttgcgaatttgttccttcaacaagagtgctcattcaagttactcagattttctggaagtcttttctgaagagctatgtgatgttgttctatgggacagactactcttatttaacatctgggcacttaggtagacaaccttctactgacctggaataaagtgtttcctaacataatattgaattattcagaaataatccattacttcaaaaaagaaaatattcattgggctagcccaaccttctctaggccctaagaattattacctcccctttctaattctagcaaacatggaacattctccttaggcacttgacacccacgagggtaatcctgagtgctcagtttggaataggttgcaaatctcagattttagggattgagtcacaccttcaatctatagaatgaagttgaccaattaaaaaaaaaaaaaaaacctatcattttcacaaatttctagatccttctagtcaaaaataattatttaggaaataaaatttttaaaaatccatttaaatacatgttatttgtcttcagtggaagttatatttctgctgcatgcttttgaaactttcttcattaaatagaatggtttgtcttagtaactggcaatgccagtattagcaccatgcatttaatctataatacaatcaatttaaacatcctcaaaaaactctagtatcatttacctggtagtattaatatacaatgatgtcaccacaacttttgtataactctgttccctttaccctcaaatgattcatatatgtatataattgcctgcccaagttttcaggtaacttattaatttcccagtctcctgatctcttgacaagaagaaacctgtgaatactgcaaactagcctctgacttcctcctactgagtctagttcatggtatccaggactctttatgctcataactctctctgattcccattgggtgatacctgacagccaaccagccgctctgccaccagaactcatttctccctgaaaaagaagaaaatcatatttggcagagcattctctggtctgccctgtaatgtgcttaaatgtcaggcaacatcctcttttttttaaaaaaaatggtatttttctttaaatttcaccctaataagaaagctattttctctcctctgcagaaatttctgcatttgtgaaacttataaaaatttagatagttcaaatgtataaagaatatttggatgatgctctagccaaaagttaaatatttcgtagtgaatcatagccaataagaaaccagtcatacttgcctctttgaataacagagatataagcttctagaatatttaaataatgaagttttacatttgggtattataaaatgcatactcaattgaatgagctgaaaaaaataccaagccagtgatataagtggagatttattaaggattcctgttgagtatattcttagtttcctcaaaatagggattattcaaaattaggtgtatgttcaatctcctgctttggttccagctacacaaggagagccatcctgtgctagtgtgatgtttcagacaacattctgaaactaaaatgtttggcacttattggcttttccaataaagaatctcttaagtacaggtatttctggaagctgttggtgtctgtgcttgaagatgattgctgatacttatccaccctttgggtacttctgttgactttgtttaaataatcatcttatggttgtccccaaatgtaatatggtatctcagatatagcagctggactgtaattacaacaaaaggttacctctaaagataacatcttaccattttagataaaattgtgtcccagaattcttatggtttcggaatgtacatttctagtcaatgaaagaaagaaaaatggaaaaattgtctagtttcaggcatgtttaaagaaaacaaagtcatctgaactttaaaatagatgcagagcagggttactttccctttcactcagttcccttcatgcaaccacaggcagtcctgcaggccagaggttactatcctaacctgctcataaccatatactatacagagcccacaactttctggagatgcagaagcagccatacactcaagtctctgtttttgtaaatcacattcaaagcaacattttactcataatttgcatttctctggtgactttcagaaatcactttagtattgtacagaaaagctttttatttgagtctagtgtttaaaattaaattggatacttgggaaaatcatagataggtgttttgtatgatattccattccaatgcaaaatatatgtacccatgcctcaatgtatcttgctatctaaatacctgttgccaaaaagtattgatttgggaaaaaaaatgccaatttcctggtcagtgaggttatgtaaaagacaaaataccacacccatatcagcaaatgaatattactactcatctggactcttcgttgccactattgcataacgttcacgtggcagacttccagttgcactctctgaaggacttttttctcttactctcaatagagagcctttgtacattgtcatcctatgattgttgttggtagaagagcaagagcaaaactctgcaagatttaataaacacaggggcatgggccaagggatctcactgtgtgctgaacatgtattttcagatgcaagaaaggaatgatggagaggaggagaaatgctgttttttattattgtagggtaaatctgacaattctgaactttgtgaattgtcagcttgtttgggggaagggtgggcgggtatggggtgtactttttataagtaatatttaatttattatttagagtggcttctttttggataatttatgataaaaagggagatctggttgggatctagatacggctgttaaagctgcagtgttccatacctcagagggaccactttggaaatgaattgtccattgctgagtatgaagagatgtccagtccaggcaaagccttcactgaagttccatcatcgccacttctccctttttagggtcattcaaagaagataacaccaaacctaaataattctgaaagcattttgcagatcagtgctactcattcaaagggctttgcaactcaaacagattgttagtgtgctagtgataagtttatttggtagaaatgggtatactacagctttaactagccttagtgagaaaagaaattttttgttgttacaaaacaccttttttaacaaaaaggtattttgagcctacaaaaagtttctttaaactgtcagattctagcattgttaaccaaattagactagtgattgcaatatttaagtgtaaatcttgttctacaagaaaggaaacttgcttacagtttaaaacaatgactgtttctacacatgatcttgtatactactacacaaggaaaagggggttttgtaaacactgtagaacagtctcatattcatttttttatagaaatgttattccaatggtgcattttttgtttaataaataaagttttgatacaaagttc

SEQ ID NO: 5348 - DNA, 8007 bp, Homo sapiens
  source 1..8007: mol_type = unassigned DNA
gcacatccctgcactagtggccgcaaccgaggcgccgcgctccagcagctgctgccgcccagcccggccccgccgccgccccccagccctgcagccccgcagccccggccgcgcccagcccggcgaggacagcaccaggaggcggcccccagcgcggccacaaagacccccggcggcgtctctccgcggaccggtcctacttgaagtccatcatgtccttcggcagagacatggagctggagcacttcgacgagcgggataaggcgcagagatacagccgagggtcgcgggtgaacggcctgccgagcccgacgcacagcgcccactgcagcttctaccgcacccgcacgctgcagacgctcagctccgagaagaaggccaagaaagttcgtttctatcgaaacggagatcgatacttcaaagggattgtgtatgccatctccccagaccggttccgatcttttgaggccctgctggctgatttgacccgaactctgtcggataacgtgaatttgccccagggagtgagaacaatctacaccattgatgggctcaagaagatttccagcctggaccaactggtggaaggagagagttatgtatgtggctccatagagcccttcaagaaactggagtacaccaagaatgtgaaccccaactggtcggtgaacgtcaagaccacctcggcttctcgggcagtgtcttcactggccactgccaaaggaagcccttcagaggtgcgagagaataaggatttcattcggcccaagctggtcaccatcatcagaagtggcgtgaagccacggaaagctgtcaggattctgctgaacaagaaaacggctcattcctttgagcaggtcctcaccgatatcaccgatgccatcaagctggactcgggagtggtgaaacgcctgtacacgttggatgggaaacaggtgatgtgccttcaggacttttttggtgatgatgacatttttattgcatgtggaccggagaagttccgttaccaggatgatttcttgctagatgaaagtgaatgtcgagtggtaaagtccacttcttacaccaaaatagcttcatcatcccgcaggagcaccaccaagagcccaggaccgtccaggcgtagcaagtcccctgcctccaccagctcagttaatggaacccctggtagtcagctctctactccgcgctcaggcaagtcgccaagcccatcacccaccagcccaggaagcctgcggaagcagaggagctctcagcatggcggctcctctacgtcacttgcgtccaccaaagtctgcagctcgatggatgagaacgatggccctggagaagaagtgtcggaggaaggcttccagattccagctacaataacagaacgatataaagtcggaagaacaataggagatggaaattttgctgttgtcaaggaatgtgtagaaagatcgactgctagagagtatgctctgaaaattatcaagaaaagcaaatgtcgaggcaaagagcacatgatccagaatgaagtgtctattttaagaagagtgaagcatcccaatatcgttcttctgattgaggagatggatgtgccaactgaactgtatcttgtcatggaattagtaaaggggggagacctttttgatgccattacttccactaacaaatacaccgagagagacgccagtgggatgctgtacaacctagccagcgccatcaaatacctgcatagcctgaacatcgtccaccgtgatatcaagccagagaacctgctggtgtatgagcaccaagatggcagcaaatcactgaagctgggtgactttggactggccaccattgtagacggccccctgtacacagtctgtggcaccccaacatacgtggctccagaaatcattgcagagactggatacggcctcaaggtggacatctgggcagcaggtgtaatcacttatatcctgctgtgtggtttccctccattccgtggaagtggtgatgaccaggaggtgctttttgatcagattttgatggggcaggtggactttccttctccatactgggataatgtttccgattctgcaaaggagctcattaccatgatgctgttggtcgatgtagatcagcgattttctgctgttcaagtacttgagcatccctgggttaatgatgatggcctcccagaaaatgaacatcagctgtcagtagctggaaagataaagaagcatttcaacacaggccccaagccgaatagcacagcagctggagtttctgtcatagcaaccaccgctcttgataaggagaggcaggttttccgacgaagacgcaaccaggatgtgaggagccggtacaaggcgcagccagctcctcccgaactcaactcggaatcggaagactactccccaagctcctccgagactgttcgctcccctaactcgcccttttaataagacccttttactcaaagtcctagcttaaccctttgagactctgagatttttttcccccaaatttgtgtaaaacagtttcatctgatctatctagcgctcaatgcttgaatggcagaactgaaagtgttttcaggtatctttgtagcggtttccctttactgaataagatgacacgtggtgattgtgaagatggtaatttgctgctaatagagtcctcaaagggttaaggccaatttgcaatttttttttaaacttagaagcaatgaatgttttcatcagtcaagctaggatctgcagtatgtaatatagcacttgttaaccctctgagtgcatagaattttattgagaattcttgtttgggaatttttcaggcctttggatgtatacacacatgtttcttgattttactgcagatcaaggggtgttgttagatgctgaaatgtccagaaaagaaggacatttagaatgatatcttgtttgtccttttctgtgggtttagaacgtggcaggtttataacttcgacacacgcacggttctttcttcttcacaatcctattcagaaacagattttttttttcattagagatatgactgtcagttgcagtgagttctgcatcccaagtggagggaattgggtttgtggcaaagagcttgacccaggaaatagatggtgccccccaaattgtctccacatgaagatgtactgatgacgccccagaaatgctgcttccatatcagctgctgctagcgccagcgcagactctcagggagtcaccacagcttgtcttgtgcttggtgagtgagggtctctctactcagtgtcagacatctacaggaaagaaacaactggtggaaaagagcaataaattgcccggtgctctgcagggctggaatttcaaacagaaagagggaataagatcctgtgatttttctcacctgcttttccacgcactgtggtcatcactgtgcaatctacatctagtatgaaatccacacataggagagctggggcacaaggggactggaggcagttgctttgcaagatggctgaggagaaagcacactgggaacacaatccagaatgttctaacaataagttttcagtgaataaaccactggcaagacaattccatgtgcacctttaggttacctatatagtctcctaggaagatcaggatgaaagacctagatgatacccctgaggataaaacctccatcccctaaaatgattttttttaaataccactgtctttagctgtccaggaggtcagagtgttttttctgtctttgggccaagtcctgtctgagacctgtattttcactcttgttaccaaatctatctccctagtgcagtgtctccaggcctgagtttcttctggaacagattccattttagaatggggattcacaggttctgtgcatcaccacagtgctcagagaggattctcctggggtgtcttagaggcaggtgcccaactcaaatgtattcccaaggtttgctgggctctgggatccacgagacaaccagagagggatatctcatgaaatttgcatctggtggctgaacagtacctatgttctctgttttgaatatactttaatacctgagagtcttaaaatttgtgaacaacgtttctatagtcctttattttcaaatgcacattgatcttcacttgctgcatttttactcttcaaccctgaaactatggtctacattaatatggatttttaaatcacatgtcattacttttgcaacaccatcaccaaaattttttgctcttttacatttaggttcatctctgtggtctgtgttgtcctgacatgtaaaaagcatatcgtttattgaggtttttttcccccccttttagagcatccggaagtgataacacgcaaaatcacaaagtagcataaatcagtaaattagttgagttgtttttgggggggaggtgggggtagggggcacagaacaccagaaagagtgttggtgtgtaggtagattccatattaatgaggaacactgaactagttggaaattactgctttctctagaaatataaagcaaagcactattccaaggctatggagtagctctacagcctggcctcaactctaaaagtgtgaagaatgcaatgggcagagacctacctgcagtggactgtcattttcctttctttctctgaattactgctttttctgtgggcattaactatattgctacagcatctagtgtactgagcctgcggtgcatggctcaggccttttcccatcgacgtctagggggactctggaccgtgtgaagctagggggtgtttctcagcacactgcagaagggcagctcagaagaatgcagggcccattcagcatggggatcccagcacatcactgtagaatttgagtgatctatgctgaataaacagtggaatgtgaccagtcaagtagaaatcttgagtaatcagatggaatgcaatctttctaacattaagctaccaagatcctgaatgtcagagatgtactcagagggttaacagacaagcacaaggcatgctgactacattggtgtatccagattgctttgcttttagccagtgctttctaatttttttctcgacattcttgggatagttcaagtttgaaataattaagtggtggtgttctttaaggaatttctataaccaaattgatcttatttttgatttcacttatcatagaacaaatatgtatcattatggcagtgtatctatgtaattatcaatttaatcatcaccaccggtgtttccatattttttcccaagtatttaatatagctctcttatggtggtggcctggtgatggggaccgtctttcttttactgacacatgaccaatcatatggtattttcaagggaattttaagattcatcttttcagtttgatagtagactagttaaggaagaactctttcattacttgcatcgtgtaaatcatctctgtagacatgtgttcatattaatgaacacattttttctcaacattgtagcagaaatcattttattcgtcatgatcaatgaatatgtgatttgctccagatcgttagaaggaaaagtaagatttcagtcatcaaaaatgtttttaccgtagccctcatctaacttacacgtggtgcatattaaaataagcagagaaaaaaaaatgtgaataaactactgaaaacacttggtgttttgtgttcaatgagaccttcctgcaacctgctccccatgggtggcagttaacaggcccatcagatattgttgaaagaaagcaatatatccatgaatgaaggctaaaattgcaatcctttaccctttgaggcatatttcagttgaaaacaaaaagaaaagaaaatttggcttagagggtcacagagctcccatatgaccaagtctcaagcacattaaatcatggttgtttactggccaagggcgtccactagacaactctatcccttgcgctgaagctcaatcgtgctgagggagagctttcttaatattactgtgttgctcttagcccttctctgggttaggatctgtcagcatttctatgataaactcctattctcaaaggtttttaatttgaccataaaaatgtgccccaggctgaagtttgctatacagggctgtaccaaagagtgaaggtttacttccttctctttccaacttcttccccattctccaaggaaaagaacaacaaaaaaatctggtatggtccctccttaatagtgatttcagaattttggaaagcaccaagatccaagatggtagttttaatgtagttactcattcgcacacattttttaaatttaatgggtcacctggcatatattgtagataacatatcttttctataatttgtaagtcaataatttttttaactgctacatgatatttttttttgcccaaagattttaaaagacttgaagttggtcagttcaaaactcagatttttctacacattgtctgccatgtccattaggagtttggggaaaatactctcacacagacccttactttgcatgcagtttagagggtaagatacgtgcttcttttggggataaagatttccttacttaattgtcaaatttcatggagccattctagtctgttggggaaaatagtgattaaaagcacttccaaaattaacattttttgacaattcagatatgaaaagaagcaggggaaaataatacactttactcttttcttgcttaaaggcaaacaaatcaatgaaacttgaggacacactaaacatttgataactgcaaatgtgctttaaaaattggttcaatggtgcttacacatgaaacggtaacaaatggggttcctaggacgtcagaaggaatctttagtttgtatgtaattacacactagaggaggaggtgcttttaagccagtcttttatttttaatcatctcaaatatgcaaccatacatgcagtaacattaagggtcgtaaactggtgggaaacaggaacttcagtggagaggcttaaatgcctctggttagagtgggggtttttgtttgtttgtttattgttgggtttcaacactgagcatcatttctgtgatcaagtttctaactggcatgtgttttgatcatgaggtttaccatatcttgcccatacagacaaatgagagatctagtttcattttgttccctaaagaaagaacactctctaaaattaaatcatacctgtaaatttcttcagcatttgtttctgttcaatgaaattgagacccttaatgttgctttaatgtaaaattgaatattttgtctgtgatatactttaataatttaaagtaagtaatagttctaaagtcttcactgttgctactaagagaaaatagaattttaaaggtgatgataaagatgctataatgtcagttcactccagtccaatcaaatgtagtaagaaaaagtccttgaatagttctctagggacaatttctcacttgccattgacattaatctttggtgtattctcagaaaaaataaaaagaaattgaaactggtccaaggttatagtcatatcctcgataacttttgaaaaaaaattttattaggaaattaatactagcctttttcattctggctgaaagaaaattattaaaggattagttgagtgtgaaattcaacagtattttgctcatacatactaaaaaggtgcgtagggacttggcgcatttaaacaagtttctgaaaggtttcaatttgactcaagaaaaaaattcaatatttcttttgaaaatactgaatttatcacttgctgcatggatcagatggcataggttaatctttgattttcagaatcctaatgaaataactttcaaacaatttgtgtccttaattaaaggtggaatgagatccaatttttccccctaatccttcagtttaagctgatacatgtaggttaatgtggaatgaaatcatctgtgatatattatgttcatttatcaactgagcttttttgatgttgcctgtttttatgtaaaacatgttcttaaagttaataaaataatagtacttggtgtatgaactactacataatacctta

SEQ ID NO: 5349 - DNA, 4612 bp, Homo sapiens
  source 1..4612: mol_type = unassigned DNA
agccttagccatccttaaactcatccaaccgattcccatttccgcgggtgcttggcttagtgctgagacgggattccgccgttggtattcaggtccaacactaagactgtgtccatgttagaactcatagaagttaatggaacccctggtagtcagctctctactccgcgctcaggcaagtcgccaagcccatcacccaccagcccaggaagcctgcggaagcagaggagctctcagcatggcggctcctctacgtcacttgcgtccaccaaagtctgcagctcgatggatgagaacgatggccctggagaagaagtgtcggaggaaggcttccagattccagctacaataacagaacgatataaagtcggaagaacaataggagatggaaattttgctgttgtcaaggaatgtgtagaaagatcgactgctagagagtatgctctgaaaattatcaagaaaagcaaatgtcgaggcaaagagcacatgatccagaatgaagtgtctattttaagaagagtgaagcatcccaatatcgttcttctgattgaggagatggatgtgccaactgaactgtatcttgtcatggaattagtaaaggggggagacctttttgatgccattacttccactaacaaatacaccgagagagacgccagtgggatgctgtacaacctagccagcgccatcaaatacctgcatagcctgaacatcgtccaccgtgatatcaagccagagaacctgctggtgtatgagcaccaagatggcagcaaatcactgaagctgggtgactttggactggccaccattgtagacggccccctgtacacagtctgtggcaccccaacatacgtggctccagaaatcattgcagagactggatacggcctcaaggtggacatctgggcagcaggtgtaatcacttatatcctgctgtgtggtttccctccattccgtggaagtggtgatgaccaggaggtgctttttgatcagattttgatggggcaggtggactttccttctccatactgggataatgtttccgattctgcaaaggagctcattaccatgatgctgttggtcgatgtagatcagcgattttctgctgttcaagtacttgagcatccctgggttaatgatgatggcctcccagaaaatgaacatcagctgtcagtagctggaaagataaagaagcatttcaacacaggccccaagccgaatagcacagcagctggagtttctgtcatagcaaccaccgctcttgataaggagaggcaggttttccgacgaagacgcaaccaggatgtgaggagccggtacaaggcgcagccagctcctcccgaactcaactcggaatcggaagactactccccaagctcctccgagactgttcgctcccctaactcgcccttttaataagacccttttactcaaagtcctagcttaaccctttgagactctgagatttttttcccccaaatttgtgtaaaacagtttcatctgatctatctagcgctcaatgcttgaatggcagaactgaaagtgttttcaggtatctttgtagcggtttccctttactgaataagatgacacgtggtgattgtgaagatggtaatttgctgctaatagagtcctcaaagggttaaggccaatttgcaatttttttttaaacttagaagcaatgaatgttttcatcagtcaagctaggatctgcagtatgtaatatagcacttgttaaccctctgagtgcatagaattttattgagaattcttgtttgggaatttttcaggcctttggatgtatacacacatgtttcttgattttactgcagatcaaggggtgttgttagatgctgaaatgtccagaaaagaaggacatttagaatgatatcttgtttgtccttttctgtgggtttagaacgtggcaggtttataacttcgacacacgcacggttctttcttcttcacaatcctattcagaaacagattttttttttcattagagatatgactgtcagttgcagtgagttctgcatcccaagtggagggaattgggtttgtggcaaagagcttgacccaggaaatagatggtgccccccaaattgtctccacatgaagatgtactgatgacgccccagaaatgctgcttccatatcagctgctgctagcgccagcgcagactctcagggagtcaccacagcttgtcttgtgcttggtgagtgagggtctctctactcagtgtcagacatctacaggaaagaaacaactggtggaaaagagcaataaattgcccggtgctctgcagggctggaatttcaaacagaaagagggaataagatcctgtgatttttctcacctgcttttccacgcactgtggtcatcactgtgcaatctacatctagtatgaaatccacacataggagagctggggcacaaggggactggaggcagttgctttgcaagatggctgaggagaaagcacactgggaacacaatccagaatgttctaacaataagttttcagtgaataaaccactggcaagacaattccatgtgcacctttaggttacctatatagtctcctaggaagatcaggatgaaagacctagatgatacccctgaggataaaacctccatcccctaaaatgattttttttaaataccactgtctttagctgtccaggaggtcagagtgttttttctgtctttgggccaagtcctgtctgagacctgtattttcactcttgttaccaaatctatctccctagtgcagtgtctccaggcctgagtttcttctggaacagattccattttagaatggggattcacaggttctgtgcatcaccacagtgctcagagaggattctcctggggtgtcttagaggcaggtgcccaactcaaatgtattcccaaggtttgctgggctctgggatccacgagacaaccagagagggatatctcatgaaatttgcatctggtggctgaacagtacctatgttctctgttttgaatatactttaatacctgagagtcttaaaatttgtgaacaacgtttctatagtcctttattttcaaatgcacattgatcttcacttgctgcatttttactcttcaaccctgaaactatggtctacattaatatggatttttaaatcacatgtcattacttttgcaacaccatcaccaaaattttttgctcttttacatttaggttcatctctgtggtctgtgttgtcctgacatgtaaaaagcatatcgtttattgaggtttttttcccccccttttagagcatccggaagtgataacacgcaaaatcacaaagtagcataaatcagtaaattagttgagttgtttttgggggggaggtgggggtagggggcacagaacaccagaaagagtgttggtgtgtaggtagattccatattaatgaggaacactgaactagttggaaattactgctttctctagaaatataaagcaaagcactattccaaggctatggagtagctctacagcctggcctcaactctaaaagtgtgaagaatgcaatgggcagagacctacctgcagtggactgtcattttcctttctttctctgaattactgctttttctgtgggcattaactatattgctacagcatctagtgtactgagcctgcggtgcatggctcaggccttttcccatcgacgtctagggggactctggaccgtgtgaagctagggggtgtttctcagcacactgcagaagggcagctcagaagaatgcagggcccattcagcatggggatcccagcacatcactgtagaatttgagtgatctatgctgaataaacagtggaatgtgaccagtcaagtagaaatcttgagtaatcagatggaatgcaatctttctaacattaagctaccaagatcctgaatgtcagagatgtactcagagggttaacagacaagcacaaggcatgctgactacattggtgtatccagattgctttgcttttagccagtgctttctaatttttttctcgacattcttgggatagttcaagtttgaaataattaagtggtggtgttctttaaggaatttctataaccaaattgatcttatttttgatttcacttatcatagaacaaatatgtatcattatggcagtgtatctatgtaattatcaatttaatcatcaccaccggtgtttccatattttttcccaagtatttaatatagctctcttatggtggtggcctggtgatggggaccgtctttcttttactgacacatgaccaatcatatggtattttcaagggaattttaagattcatcttttcagtttgatagtagactagttaaggaagaactctttcattacttgcatcgtgtaaatcatctctgtagacatgtgttcatattaatgaacacattttttctcaacattgtagcagaaatcattttattcgtcatgatcaatgaatatgtgatttgctccagatcgttagaaggaaaagtaagatttcagtcatcaaaaatgtttttaccgtagccctcatctaacttacacgtggtgcatattaaaataagcagagaaaaaaaaatgtgaataaactactgaaaacac

SEQ ID NO: 5350 - DNA, 5703 bp, Homo sapiens
  source 1..5703: mol_type = unassigned DNA
gcacatccctgcactagtggccgcaaccgaggcgccgcgctccagcagctgctgccgcccagcccggccccgccgccgccccccagccctgcagccccgcagccccggccgcgcccagcccggcgaggacagcaccaggaggcggcccccagcgcggccacaaagacccccggcggcgtctctccgcggaccggtcctacttgaagtccatcatgtccttcggcagagacatggagctggagcacttcgacgagcgggataaggcgcagagatacagccgagggtcgcgggtgaacggcctgccgagcccgacgcacagcgcccactgcagcttctaccgcacccgcacgctgcagacgctcagctccgagaagaaggccaagaaagttcgtttctatcgaaacggagatcgatacttcaaagggattgtgtatgccatctccccagaccggttccgatcttttgaggccctgctggctgatttgacccgaactctgtcggataacgtgaatttgccccagggagtgagaacaatctacaccattgatgggctcaagaagatttccagcctggaccaactggtggaaggagagagttatgtatgtggctccatagagcccttcaagaaactggagtacaccaagaatgtgaaccccaactggtcggtgaacgtcaagaccacctcggcttctcgggcagtgtcttcactggccactgccaaaggaagcccttcagaggtgcgagagaataaggatttcattcggcccaagctggtcaccatcatcagaagtggcgtgaagccacggaaagctgtcaggattctgctgaacaagaaaacggctcattcctttgagcaggtcctcaccgatatcaccgatgccatcaagctggactcgggagtggtgaaacgcctgtacacgttggatgggaaacaggtgatgtgccttcaggacttttttggtgatgatgacatttttattgcatgtggaccggagaagttccgttaccaggatgatttcttgctagatgaaagtgaatgtcgagtggtaaagtccacttcttacaccaaaatagcttcatcatcccgcaggagcaccaccaagagcccaggaccgtccaggcgtagcaagtcccctgcctccaccagctcagttaatggaacccctggtagtcagctctctactccgcgctcaggcaagtcgccaagcccatcacccaccagcccaggaagcctgcggaagcagaggagctctcagcatggcggctcctctacgtcacttgcgtccaccaaagtctgcagctcgatggatgagaacgatggccctggagaagaagtgtcggaggaaggcttccagattccagctacaataacagaacgatataaagtcggaagaacaataggagatggaaattttgctgttgtcaaggaatgtgtagaaagatcgactgctagagagtatgctctgaaaattatcaagaaaagcaaatgtcgaggcaaagagcacatgatccagaatgaagtgtctattttaagaagagtgaagcatcccaatatcgttcttctgattgaggagatggatgtgccaactgaactgtatcttgtcatggaattagtaaaggggggagacctttttgatgccattacttccactaacaaatacaccgagagagacgccagtgggatgctgtacaacctagccagcgccatcaaatacctgcatagcctgaacatcgtccaccgtgatatcaagccagagaacctgctggtgtatgagcaccaagatggcagcaaatcactgaagctgggtgactttggactggccaccattgtagacggccccctgtacacagtctgtggcaccccaacatacgtggctccagaaatcattgcagagactggatacggcctcaaggtggacatctgggcagcaggtgtaatcacttatatcctgctgtgtggtttccctccattccgtggaagtggtgatgaccaggaggtgctttttgatcagattttgatggggcaggtggactttccttctccatactgggataatgtttccgattctgcaaaggagctcattaccatgatgctgttggtcgatgtagatcagcgattttctgctgttcaagtacttgagcatccctgggttaatgatgatggcctcccagaaaatgaacatcagctgtcagtagctggaaagataaagaagcatttcaacacaggccccaagccgaatagcacagcagctggagtttctgtcatagcactggaccacgggtttaccatcaagagatcagggtctttggactactaccagcaaccaggaatgtattggataagaccaccgctcttgataaggagaggcaggttttccgacgaagacgcaaccaggatgtgaggagccggtacaaggcgcagccagctcctcccgaactcaactcggaatcggaagactactccccaagctcctccgagactgttcgctcccctaactcgcccttttaataagacccttttactcaaagtcctagcttaaccctttgagactctgagatttttttcccccaaatttgtgtaaaacagtttcatctgatctatctagcgctcaatgcttgaatggcagaactgaaagtgttttcaggtatctttgtagcggtttccctttactgaataagatgacacgtggtgattgtgaagatggtaatttgctgctaatagagtcctcaaagggttaaggccaatttgcaatttttttttaaacttagaagcaatgaatgttttcatcagtcaagctaggatctgcagtatgtaatatagcacttgttaaccctctgagtgcatagaattttattgagaattcttgtttgggaatttttcaggcctttggatgtatacacacatgtttcttgattttactgcagatcaaggggtgttgttagatgctgaaatgtccagaaaagaaggacatttagaatgatatcttgtttgtccttttctgtgggtttagaacgtggcaggtttataacttcgacacacgcacggttctttcttcttcacaatcctattcagaaacagattttttttttcattagagatatgactgtcagttgcagtgagttctgcatcccaagtggagggaattgggtttgtggcaaagagcttgacccaggaaatagatggtgccccccaaattgtctccacatgaagatgtactgatgacgccccagaaatgctgcttccatatcagctgctgctagcgccagcgcagactctcagggagtcaccacagcttgtcttgtgcttggtgagtgagggtctctctactcagtgtcagacatctacaggaaagaaacaactggtggaaaagagcaataaattgcccggtgctctgcagggctggaatttcaaacagaaagagggaataagatcctgtgatttttctcacctgcttttccacgcactgtggtcatcactgtgcaatctacatctagtatgaaatccacacataggagagctggggcacaaggggactggaggcagttgctttgcaagatggctgaggagaaagcacactgggaacacaatccagaatgttctaacaataagttttcagtgaataaaccactggcaagacaattccatgtgcacctttaggttacctatatagtctcctaggaagatcaggatgaaagacctagatgatacccctgaggataaaacctccatcccctaaaatgattttttttaaataccactgtctttagctgtccaggaggtcagagtgttttttctgtctttgggccaagtcctgtctgagacctgtattttcactcttgttaccaaatctatctccctagtgcagtgtctccaggcctgagtttcttctggaacagattccattttagaatggggattcacaggttctgtgcatcaccacagtgctcagagaggattctcctggggtgtcttagaggcaggtgcccaactcaaatgtattcccaaggtttgctgggctctgggatccacgagacaaccagagagggatatctcatgaaatttgcatctggtggctgaacagtacctatgttctctgttttgaatatactttaatacctgagagtcttaaaatttgtgaacaacgtttctatagtcctttattttcaaatgcacattgatcttcacttgctgcatttttactcttcaaccctgaaactatggtctacattaatatggatttttaaatcacatgtcattacttttgcaacaccatcaccaaaattttttgctcttttacatttaggttcatctctgtggtctgtgttgtcctgacatgtaaaaagcatatcgtttattgaggtttttttcccccccttttagagcatccggaagtgataacacgcaaaatcacaaagtagcataaatcagtaaattagttgagttgtttttgggggggaggtgggggtagggggcacagaacaccagaaagagtgttggtgtgtaggtagattccatattaatgaggaacactgaactagttggaaattactgctttctctagaaatataaagcaaagcactattccaaggctatggagtagctctacagcctggcctcaactctaaaagtgtgaagaatgcaatgggcagagacctacctgcagtggactgtcattttcctttctttctctgaattactgctttttctgtgggcattaactatattgctacagcatctagtgtactgagcctgcggtgcatggctcaggccttttcccatcgacgtctagggggactctggaccgtgtgaagctagggggtgtttctcagcacactgcagaagggcagctcagaagaatgcagggcccattcagcatggggatcccagcacatcactgtagaatttgagtgatctatgctgaataaacagtggaatgtgaccagtcaagtagaaatcttgagtaatcagatggaatgcaatctttctaacattaagctaccaagatcctgaatgtcagagatgtactcagagggttaacagacaagcacaaggcatgctgactacattggtgtatccagattgctttgcttttagccagtgctttctaatttttttctcgacattcttgggatagttcaagtttgaaataattaagtggtggtgttctttaaggaatttctataaccaaattgatcttatttttgatttcacttatcatagaacaaatatgtatcattatggcagtgtatctatgtaattatcaatttaatcatcaccaccggtgtttccatattttttcccaagtatttaatatagctctcttatggtggtggcctggtgatggggaccgtctttcttttactgacacatgaccaatcatatggtattttcaagggaattttaagattcatcttttcagtttgatagtagactagttaaggaagaactctttcattacttgcatcgtgtaaatcatctctgtagacatgtgttcatattaatgaacacattttttctcaacattgtagcagaaatcattttattcgtcatgatcaatgaatatgtgatttgctccagatcgttagaaggaaaagtaagatttcagtcatcaaaaatgtttttaccgtagccctcatctaacttacacgtggtgcatattaaaataagcagagaaaaaaaaatgtgaataaactactgaaaac

SEQ ID NO: 5351 - DNA, 542 bp, Homo sapiens
  source 1..542: mol_type = unassigned DNA
gatgatggcctcccagaaaatgaacatcagctgtcagtagctggaaagataaagaagcatttcaacacaggccccaagccgaatagcacagcagctggagtttctgtcatagcactggaccacgggtttaccatcaagagatcagggtctttggactactaccagcaaccaggaatgtattggataaggtatgagatggtgcagctcaacagtcagtgtttccatggcaacgtgctggcagtctccattaaccagttccttcggtggataaacatgcttttgatttgttatccagtccatatgctgctttatcagtttcattttaatcttgattgagatgccacaccccctcattcctttttttcacccattattcacactgacatttgccagctttctttccattgcacatgctcagtatcaattttccttatggttaaaaggacagtatatttagtgctaatgccaaagcattttcctgacgttgctaattaaaacaatgatttccagtgctcttctgtcccttaacaaatggaagaaca

SEQ ID NO: 5352 - DNA, 578 bp, Homo sapiens
  source 1..578: mol_type = unassigned DNA
gtcgttcacctaaacagaagtggtgatgaccaggaggtgctttttgatcagattttgatggggcaggtggactttccttctccatactgggataatgtttccgattctgcaaaggagctcattaccatgatgctgttggtcgatgtagatcagcgattttctgctgttcaagtacttgagcatccctgggttaatgtaagtgactcgcaccatttcctttgttctctcctaacattccttttaaaaatcagttgcagattttctaatgttattgcctccttttgaaagtgttgtgggccaggcgcagtgtctcacgcctgtaatctcagccctttgggaggccgaggtgggtggattgcctgagctcaggagttcgaggacagcttgggcaacatggcaaaaccccatctctaccaaaaaatacaaaaaattagctgggcatagtggcacaagcctgtggtcccagctactcaggaggctgaggtggtaggattgcttgaccctggaaaccagaggtggtagtaagccaagatcgtgccactgcactccaacctgaatgacagagtgagacatcatct

SEQ ID NO: 5353 - DNA, 5247 bp, Homo sapiens
  source 1..5247: mol_type = unassigned DNA
gttggcaagaggcttaattgacacctttgatgtagcctaagacagaacctgcacctcccactgctgcttgggagacgtcagctttacgcagaaaaggcatctgctgatgaatcctgcatctcattcagcctgctctgggagcagccttagccatccttaaactcatccaaccgattcccatttccgcgggtgcttggcttagtgctgagacgggattccgccgttggtattcaggtccaacactaagactgtgtccatgttagaactcatagaagttaatggaacccctggtagtcagctctctactccgcgctcaggcaagtcgccaagcccatcacccaccagcccaggaagcctgcggaagcagagggacctgtaccgccccctctcttcggatgacttggattcagtaggagactcagtgtaaaagaaacaatggagcaatgtatatggtttgtgattgggtgaaggtttcacatttctgaagcaaaagtcttacagcaaaatacacaaaagagttttgcataccttgaaatgataaaagaccaaatcatccaaaagtaaatatgtatgcattttgttttcgtgatgttcaaccttgaaattgagagatttttaaaaatatctcccacatggatttgattggggagagtttgaacacaaaatgctgagatttttgtacagggcctggctctagatgaatttcatacacggacccaatattgagtacaagaacacactaaccatgtggcaatatagagccagaatttctgcagatggagttttcttcttaattataagtagacatagagatataatttttctgtactttctgtaaagcatattaaaacggcactagcaggcatattttttctaaaggttatattgtttttaaaatttgaattgcttggtttttagaggtacttttattacaaaataataaaaatacttgggtagattttttttctccctagacagtagaaaaagctacttactgttttgtgggttagtacatccgagagaaaaagaaaaattatgacaacgacacatctcataaagactctgaagttaggctttaggaacttgccttgtttttgttgtcaagtaaattttattttttaaagttattttattagaaacagtataaatttagcttaagctatatgccaatatgaagaacttggccaatggcattgctatagattgtataattttttcttacaatcatatacataattttttaaatgtgtaaaaactaaagctgggaattttttttttttccatacagacctaaaaaaaattgtgtctggactttttccaagaaatccatttgaaaagcaaaattcacttaaatggtgctgtataaatcaggcccagagtatccaaatctccactctgaaaaattctcaatcttgctggtgttttggaaattttcatatgcaaaactccttttgtgttaaaccaattaagtctatgattataacccattgttaaacattaacctactaattctgctcttctagtcctctattttaaaaattatagtcgtctttgcttaaacataaaataatgattttaaagtctgaatgttaaaaattaatttaatgtgtatggtctattgtatttaagccatatcctagtggtcatttacttttactagttcaaacactaacagtttaagacttgtgaagcatggttttgatattctccaggcttgacatatctcagtaggtgataaattaaaaatgtttgatgccatttggaggcttttacatgattttttttttcaaattttacttgaaaacaatttttaaatgttttattcaagatggagagaaattcagttgtcacacgctgttttaaatgttattgatttatctccctgataaattgttcaactagcaaattttaccatctggtttatagttacgtatgttaccatctcactttacaagtgaataaaatattccaaccaaaagaagaggaagaagaaaaaacgtccaggcaatctaacagcatttgaaaacttagccctataataattagtgcctcattatgctgtctgttggagagaaagacacttctctggcaggttattcaagagctgcaaactgaaacattccatcttgaaagaacagttcataataatacctgttccagacttcaggttttaaaactgtttccaatagaaatgaccagagactcctgctgagatcaaaaggctgctttattttagctgaaacagtaaacatctgtgaggttgcctatgctggtgtctgttttagttatgtctttgtaaaatgcattacttaatacagttgggtccataaaagattagtatgtatttgactaaactgccaaaaatacaaagaaagcagtggaacagttactttaaaactggtggggtcagatggtccagaacaaaaataaattccaataattttaacttccctgcactgtcaatcttatggacaactactgctagaaaggtccaataaatgctatttgttctaagtggtagatattgccaattgatatagagcccatggctttgtttagacagggcaaaaagaaactggacttgtactaattgccgatagatatcatggccaactttccattcaagcagttccaagggaagtgctttccacagcatttaatctcttgaacatatgacttctattaaaggactgttcaggggctatatatatcatttactttttgaaagtaaagtccctcagagattgaaacagcacaccatttatagtctttgagatctctttttatgcaaaacataattctattaaactaaagcagaaataaaaatttcttagcaacaaacacagaagttttcagttcattggtggaacagaattggtgatttataggcacttatgattgagttacttatagaattctttataaaaaaaattcggcaatgaatttttaaattgttctactgagcggggaatgcttcagcaaaagccacgcagttttgtcctaatgataatccttaaatgcgctctgaagacatcgtgctgtagttcaaagttcgatactttttcacttgcactcacttttttcttagatgtagacattgtagaaaaagatattaggaatatttccctgctttcagcattttagaagtgcaaaagttaaaaatatataaagtatgaagttcagtgtgaactcaaaagactatagtgctgaaagccacatggtgtgtttttgtcttgtttaatcaactaggcagggggaaaaatctagacagtttctgtactgccatagaattttaagaagtgtcaggttctctcatctgtatacatccctgtgcgcatatattggctcatctaaatattaagaacccaaaaaacattttctaaaaccatttgaaccagcgctgatgtactatatatatatataccctacataaccagccggggaatttccaacacatgccctgaagatctatacatgattgggctctttttctttctttctttctttctttctttctttcttttttttgcttaaaaacaatgaagtgtgcaagtcagatttcttaatgaaagtgaatgaatatatagaataatattcctgaaaattccacatattttaattcttggactgctaaatttttcatatgtggccatatatctatacaggtgtttgggtgtttatgtaaatttgccaggcttggtgtgtatgtgggtatgcttctgtaagtatctgtgtatgtgtataaaccatcaacagtaaagtatagtatttgtgatacagccttataagttactggctcttgtggaattatacataaaatcttcatgtaataaagtgttactctgtgacatattagttggggcatgtttaaattaaaaagcagtttgctcaactggtatggcaaatggttcaaaatattcagatatactgatttataaaaaaattgaaattcagctaaatccaatattgtgttaactattaaatataagtaacattaatgtttatattgatatatctttgttttcaattattaacaagatcgaatactatgatttttttctattgtgtgtgtatggatggcttgtagtggttgccaatcactatactctaaaaaaatgaaacattgatacagttgcagattgtcaagtataatgttggaacataaatagaagaaaatccagagtatatttgatatgaagtaagtttaataacaaagccagataacctgtaaggcgattctgtatgttctttcaaaactctaaactgttgacaaattttgaatatacttgctgtatgtgtgtatatatctacataaatatatacacacttgaaaatgttaatcgaatgaatttactatatatgcatacatttgctcatttatgcatatttgcattaaccttgctagcatctctatttgtgcatgttagtgacaactgtctttgattgaaatattgcacagaggcatagtgtgaaaaatagagatacactgaattcaatataccaattgcctgatatagcgtgttgtactgtcagttgaaaaatatttgtaattttgtgcctgttatgcatgtggaaaaaagaggaaatcagaggccctcactataatttttaagggtgcatgacatatgatgtctttaaaatgtggttcattttagtagattatggataaattccaagatagtataaatgatgcatgtaatacctgagtgtttgtattatatatggccacaaaatgtttttgaagccagggtagtagatatctaaaagttataggcaaagaagtatgaaagttaactttctgtgatgtgtttttgaggagttgatactcatcagtaagcaaggaattgagtttattttttctaagaactctttactttgaaatatattatgaatgttgtaaatttggataacgtttttataaagaggttacatactttctgctcacagtttcagttgattggatgtgtattctctttaaaaaaaaacattttgtgttaaaacatttgacacagcaatatattttttaaatccatcaactaagtccatcagcagagctttatagagctaagggttgacaaaatgtttcattgaactacccaattttgaaagttcagttactttgtgctgtggtttcattgtaaaatgttgtaccttgtgtttcacactggaccatgttattcctcttgaagttaactttgtgacacttaccaccttagaataactatataataaacaggaaaaactgcc

SEQ ID NO: 5354 - DNA, 2101 bp, Homo sapiens
  source 1..2101: mol_type = unassigned DNA
gcacatccctgcactagtggccgcaaccgaggcgccgcgctccagcagctgctgccgcccagcccggccccgccgccgccccccagccctgcagccccgcagccccggccgcgcccagcccggcgaggacagcaccaggaggcggcccccagcgcggccacaaagacccccggcggcgtctctccgcggaccggtcctacttgaagtccatcatgtccttcggcagagacatggagctggagcacttcgacgagcgggataaggcgcagagatacagccgagggtcgcgggtgaacggcctgccgagcccgacgcacagcgcccactgcagcttctaccgcacccgcacgctgcagacgctcagctccgagaagaaggccaagaaagttcgtttctatcgaaacggagatcgatacttcaaagggattgtgtatgccatctccccagaccggttccgatcttttgaggccctgctggctgatttgacccgaactctgtcggataacgtgaatttgccccagggagtgagaacaatctacaccattgatgggctcaagaagatttccagcctggaccaactggtggaaggagagagttatgtatgtggctccatagagcccttcaagaaactggagtacaccaagaatgtgaaccccaactggtcggtgaacgtcaagaccacctcggcttctcgggcagtgtcttcactggccactgccaaaggaagcccttcagaggtgcgagagaataaggatttcattcggcccaagctggtcaccatcatcagaagtggcgtgaagccacggaaagctgtcaggattctgctgaacaagaaaacggctcattcctttgagcaggtcctcaccgatatcaccgatgccatcaagctggactcgggagtggtgaaacgcctgtacacgttggatgggaaacaggtgatgtgccttcaggacttttttggtgatgatgacatttttattgcatgtggaccggagaagttccgttaccaggatgatttcttgctagatgaaagtgaatgtcgagtggtaaagtccacttcttacaccaaaatagcttcatcatcccgcaggagcaccaccaagagcccaggaccgtccaggcgtagcaagtcccctgcctccaccagctcagttaatggaacccctggtagtcagctctctactccgcgctcaggcaagtcgccaagcccatcacccaccagcccaggaagcctgcggaagcagagggacctgtaccgccccctctcttcggatgacttggattcagtaggagactcagtgtaaaagaaacaatggagcaatgtatatggtttgtgattgggtgaaggtttcacatttctgaagcaaaagtcttacagcaaaatacacaaaagagttttgcataccttgaaatgataaaagaccaaatcatccaaaagtaaatatgtatgcattttgttttcgtgatgttcaaccttgaaattgagagatttttaaaaatatctcccacatggatttgattggggagagtttgaacacaaaatgctgagatttttgtacagggcctggctctagatgaatttcatacacggacccaatattgagtacaagaacacactaaccatgtggcaatatagagccagaatttctgcagatggagttttcttcttaattataagtagacatagagatataatttttctgtactttctgtaaagcatattaaaacggcactagcaggcatattttttctaaaggttatattgtttttaaaatttgaattgcttggtttttagaggtacttttattacaaaataataaaaatacttgggtagattttttttctccctagacagtagaaaaagctacttactgttttgtgggttagtacatccgagagaaaaagaaaaattatgacaacgacacatctcataaagactctgaagttaggctttaggaacttgccttgtttttgttgtcaagtaaattttattttttaaagttattttattagaaacagtataaatttagcttaagctatatgccaatatgaagaacttggccaatggcattgctatagattgtataattttttcttacaa

SEQ ID NO: 5355 - DNA, 7592 bp, Homo sapiens
  source 1..7592: mol_type = unassigned DNA
acttcattatgattcagtgcaaagtactgacagcactggggcttccggaagggagtggtgtcgggatgggggttgctgttggcaagaggcttaattgacacctttgatgtagcctaagacagaacctgcacctcccactgctgcttgggagacgtcagctttacgcagaaaaggcatctgctgatgaatcctgcatctcattcagcctgctctgggagcagccttagccatccttaaactcatccaaccgattcccatttccgcgggtgcttggcttagtgctgagacgggattccgccgttggtattcaggtccaacactaagactgtgtccatgttagaactcatagaagttaatggaacccctggtagtcagctctctactccgcgctcaggcaagtcgccaagcccatcacccaccagcccaggaagcctgcggaagcagaggagctctcagcatggcggctcctctacgtcacttgcgtccaccaaagtctgcagctcgatggatgagaacgatggccctggagaagaagtgtcggaggaaggcttccagattccagctacaataacagaacgatataaagtcggaagaacaataggagatggaaattttgctgttgtcaaggaatgtgtagaaagatcgactgctagagagtatgctctgaaaattatcaagaaaagcaaatgtcgaggcaaagagcacatgatccagaatgaagtgtctattttaagaagagtgaagcatcccaatatcgttcttctgattgaggagatggatgtgccaactgaactgtatcttgtcatggaattagtaaaggggggagacctttttgatgccattacttccactaacaaatacaccgagagagacgccagtgggatgctgtacaacctagccagcgccatcaaatacctgcatagcctgaacatcgtccaccgtgatatcaagccagagaacctgctggtgtatgagcaccaagatggcagcaaatcactgaagctgggtgactttggactggccaccattgtagacggccccctgtacacagtctgtggcaccccaacatacgtggctccagaaatcattgcagagactggatacggcctcaaggtggacatctgggcagcaggtgtaatcacttatatcctgctgtgtggtttccctccattccgtggaagtggtgatgaccaggaggtgctttttgatcagattttgatggggcaggtggactttccttctccatactgggataatgtttccgattctgcaaaggagctcattaccatgatgctgttggtcgatgtagatcagcgattttctgctgttcaagtacttgagcatccctgggttaatgatgatggcctcccagaaaatgaacatcagctgtcagtagctggaaagataaagaagcatttcaacacaggccccaagccgaatagcacagcagctggagtttctgtcatagcactggaccacgggtttaccatcaagagatcagggtctttggactactaccagcaaccaggaatgtattggataagaccaccgctcttgataaggagaggcaggttttccgacgaagacgcaaccaggatgtgaggagccggtacaaggcgcagccagctcctcccgaactcaactcggaatcggaagactactccccaagctcctccgagactgttcgctcccctaactcgcccttttaataagacccttttactcaaagtcctagcttaaccctttgagactctgagatttttttcccccaaatttgtgtaaaacagtttcatctgatctatctagcgctcaatgcttgaatggcagaactgaaagtgttttcaggtatctttgtagcggtttccctttactgaataagatgacacgtggtgattgtgaagatggtaatttgctgctaatagagtcctcaaagggttaaggccaatttgcaatttttttttaaacttagaagcaatgaatgttttcatcagtcaagctaggatctgcagtatgtaatatagcacttgttaaccctctgagtgcatagaattttattgagaattcttgtttgggaatttttcaggcctttggatgtatacacacatgtttcttgattttactgcagatcaaggggtgttgttagatgctgaaatgtccagaaaagaaggacatttagaatgatatcttgtttgtccttttctgtgggtttagaacgtggcaggtttataacttcgacacacgcacggttctttcttcttcacaatcctattcagaaacagattttttttttcattagagatatgactgtcagttgcagtgagttctgcatcccaagtggagggaattgggtttgtggcaaagagcttgacccaggaaatagatggtgccccccaaattgtctccacatgaagatgtactgatgacgccccagaaatgctgcttccatatcagctgctgctagcgccagcgcagactctcagggagtcaccacagcttgtcttgtgcttggtgagtgagggtctctctactcagtgtcagacatctacaggaaagaaacaactggtggaaaagagcaataaattgcccggtgctctgcagggctggaatttcaaacagaaagagggaataagatcctgtgatttttctcacctgcttttccacgcactgtggtcatcactgtgcaatctacatctagtatgaaatccacacataggagagctggggcacaaggggactggaggcagttgctttgcaagatggctgaggagaaagcacactgggaacacaatccagaatgttctaacaataagttttcagtgaataaaccactggcaagacaattccatgtgcacctttaggttacctatatagtctcctaggaagatcaggatgaaagacctagatgatacccctgaggataaaacctccatcccctaaaatgattttttttaaataccactgtctttagctgtccaggaggtcagagtgttttttctgtctttgggccaagtcctgtctgagacctgtattttcactcttgttaccaaatctatctccctagtgcagtgtctccaggcctgagtttcttctggaacagattccattttagaatggggattcacaggttctgtgcatcaccacagtgctcagagaggattctcctggggtgtcttagaggcaggtgcccaactcaaatgtattcccaaggtttgctgggctctgggatccacgagacaaccagagagggatatctcatgaaatttgcatctggtggctgaacagtacctatgttctctgttttgaatatactttaatacctgagagtcttaaaatttgtgaacaacgtttctatagtcctttattttcaaatgcacattgatcttcacttgctgcatttttactcttcaaccctgaaactatggtctacattaatatggatttttaaatcacatgtcattacttttgcaacaccatcaccaaaattttttgctcttttacatttaggttcatctctgtggtctgtgttgtcctgacatgtaaaaagcatatcgtttattgaggtttttttcccccccttttagagcatccggaagtgataacacgcaaaatcacaaagtagcataaatcagtaaattagttgagttgtttttgggggggaggtgggggtagggggcacagaacaccagaaagagtgttggtgtgtaggtagattccatattaatgaggaacactgaactagttggaaattactgctttctctagaaatataaagcaaagcactattccaaggctatggagtagctctacagcctggcctcaactctaaaagtgtgaagaatgcaatgggcagagacctacctgcagtggactgtcattttcctttctttctctgaattactgctttttctgtgggcattaactatattgctacagcatctagtgtactgagcctgcggtgcatggctcaggccttttcccatcgacgtctagggggactctggaccgtgtgaagctagggggtgtttctcagcacactgcagaagggcagctcagaagaatgcagggcccattcagcatggggatcccagcacatcactgtagaatttgagtgatctatgctgaataaacagtggaatgtgaccagtcaagtagaaatcttgagtaatcagatggaatgcaatctttctaacattaagctaccaagatcctgaatgtcagagatgtactcagagggttaacagacaagcacaaggcatgctgactacattggtgtatccagattgctttgcttttagccagtgctttctaatttttttctcgacattcttgggatagttcaagtttgaaataattaagtggtggtgttctttaaggaatttctataaccaaattgatcttatttttgatttcacttatcatagaacaaatatgtatcattatggcagtgtatctatgtaattatcaatttaatcatcaccaccggtgtttccatattttttcccaagtatttaatatagctctcttatggtggtggcctggtgatggggaccgtctttcttttactgacacatgaccaatcatatggtattttcaagggaattttaagattcatcttttcagtttgatagtagactagttaaggaagaactctttcattacttgcatcgtgtaaatcatctctgtagacatgtgttcatattaatgaacacattttttctcaacattgtagcagaaatcattttattcgtcatgatcaatgaatatgtgatttgctccagatcgttagaaggaaaagtaagatttcagtcatcaaaaatgtttttaccgtagccctcatctaacttacacgtggtgcatattaaaataagcagagaaaaaaaaatgtgaataaactactgaaaacacttggtgttttgtgttcaatgagaccttcctgcaacctgctccccatgggtggcagttaacaggcccatcagatattgttgaaagaaagcaatatatccatgaatgaaggctaaaattgcaatcctttaccctttgaggcatatttcagttgaaaacaaaaagaaaagaaaatttggcttagagggtcacagagctcccatatgaccaagtctcaagcacattaaatcatggttgtttactggccaagggcgtccactagacaactctatcccttgcgctgaagctcaatcgtgctgagggagagctttcttaatattactgtgttgctcttagcccttctctgggttaggatctgtcagcatttctatgataaactcctattctcaaaggtttttaatttgaccataaaaatgtgccccaggctgaagtttgctatacagggctgtaccaaagagtgaaggtttacttccttctctttccaacttcttccccattctccaaggaaaagaacaacaaaaaaatctggtatggtccctccttaatagtgatttcagaattttggaaagcaccaagatccaagatggtagttttaatgtagttactcattcgcacacattttttaaatttaatgggtcacctggcatatattgtagataacatatcttttctataatttgtaagtcaataatttttttaactgctacatgatatttttttttgcccaaagattttaaaagacttgaagttggtcagttcaaaactcagatttttctacacattgtctgccatgtccattaggagtttggggaaaatactctcacacagacccttactttgcatgcagtttagagggtaagatacgtgcttcttttggggataaagatttccttacttaattgtcaaatttcatggagccattctagtctgttggggaaaatagtgattaaaagcacttccaaaattaacattttttgacaattcagatatgaaaagaagcaggggaaaataatacactttactcttttcttgcttaaaggcaaacaaatcaatgaaacttgaggacacactaaacatttgataactgcaaatgtgctttaaaaattggttcaatggtgcttacacatgaaacggtaacaaatggggttcctaggacgtcagaaggaatctttagtttgtatgtaattacacactagaggaggaggtgcttttaagccagtcttttatttttaatcatctcaaatatgcaaccatacatgcagtaacattaagggtcgtaaactggtgggaaacaggaacttcagtggagaggcttaaatgcctctggttagagtgggggtttttgtttgtttgtttattgttgggtttcaacactgagcatcatttctgtgatcaagtttctaactggcatgtgttttgatcatgaggtttaccatatcttgcccatacagacaaatgagagatctagtttcattttgttccctaaagaaagaacactctctaaaattaaatcatacctgtaaatttcttcagcatttgtttctgttcaatgaaattgagacccttaatgttgctttaatgtaaaattgaatattttgtctgtgatatactttaataatttaaagtaagtaatagttctaaagtcttcactgttgctactaagagaaaatagaattttaaaggtgatgataaagatgctataatgtcagttcactccagtccaatcaaatgtagtaagaaaaagtccttgaatagttctctagggacaatttctcacttgccattgacattaatctttggtgtattctcagaaaaaataaaaagaaattgaaactggtccaaggttatagtcatatcctcgataacttttgaaaaaaaattttattaggaaattaatactagcctttttcattctggctgaaagaaaattattaaaggattagttgagtgtgaaattcaacagtattttgctcatacatactaaaaaggtgcgtagggacttggcgcatttaaacaagtttctgaaaggtttcaatttgactcaagaaaaaaattcaatatttcttttgaaaatactgaatttatcacttgctgcatggatcagatggcataggttaatctttgattttcagaatcctaatgaaataactttcaaacaatttgtgtccttaattaaaggtggaatgagatccaatttttccccctaatccttcagtttaagctgatacatgtaggttaatgtggaatgaaatcatctgtgatatattatgttcatttatcaactgagcttttttgatgttgcctgtttttatgtaaaacatgttcttaaagttaataaaataatagtacttggtgtatgaactactacataataccttagctgaagggtacgctcctcagttcatttgccatattggagtaaaatttcaccttagttcaattcacaattgacacattcagttcacgaaggaatagcccagctgtgttcttagggggaattctctctatgcaaggctttaaaaattagtcatgcggtcagagtgtagctttcccacatgtcctccatagcacagtgtgtatttcatgagcataattcaaaaacagctatttcaaaaatgtcccttgtcatatattacgttcctgcctgggccactgacttggataaatacaaataaaccaaataccattca

SEQ ID NO: 5356 - DNA, 6162 bp, Homo sapiens
  source 1..6162: mol_type = unassigned DNA
cggggcggccgccgccggtgggccgcagatgaagaggaggcggtggcagtggtggaagaagaggcggcggcggcgggggtagggagcctggaaacgcgagcggggatggtaggtggtttggacccgccgggccgccgtcgtttccagaaagggtttgactggaggaacctctggagcagctgttggctggctcctctggctgatggcatgttgaggtacatgggccagcggcagcgagggcatccaatccagaggggtccactctagaggccaggccaccagcaccatgggccagtgtgtcaccaagtgtaagaatccctcatcgaccctgggcagcaaaaatggagaccgtgagcccagcaacaagtcacatagcaggaggggtgcaggccaccgtgaggagcaggtaccaccctgtggcaagccaggtggagatatcctcgtcaacgggaccaagaaggccgaggctgccactgaggcctgccagctgccaacgtcctcgggagatgctgggagggagtccaagtccaatgccgaggagtcttccttgcaaagattggaagaactgttcaggcgctacaaggatgagcgggaagatgcaattttggaggaaggcatggagcgcttttgcaatgacctgtgtgttgaccccacagaatttcgagtgctgctcttggcttggaagttccaggctgcaaccatgtgcaaattcaccaggaaggagttttttgatggctgcaaagcaataagtgcagacagcattgacggaatctgtgcacggttccctagcctcttaacagaagccaaacaagaggataaattcaaggatctctaccggtttacatttcagtttggcctggactctgaagaagggcagcggtcactgcatcgggaaatagccattgccctgtggaaactagtctttacccagaacaatcctccggtattggaccaatggctaaacttcctaacagagaacccctcggggatcaagggcatctcccgggacacttggaacatgttccttaacttcactcaggtgattggccctgacctcagcaactacagtgaagatgaggcctggccaagtctctttgacacctttgtggagtgggaaatggagcgaaggaaaagagaaggggaagggagaggtgcactcagctcagggcctgagggcttgtgtcccgaggagcagacttagtggctctgtcccaggagcagcagcaaggatctgccagctgccctgcagccaactgaggaattggaccattttggaaattactgaagatccggatattttctactttacacctttctctgccttgtatctgaaagggctctaaaatgctgtatcatgttttaggcactttcttcatttttttggttattttggttatttcctttttggggggatctcccagaatatttgaacctggttacatgttgtgtatctttttttgaagccttcagatagaataagcctgccatttcttgcacaaatttaggttttttttttgtttttttttgtttttttttttttttttttggtaggggagggcatagagcagggcggggggatgggactgttaggttgaattaacattacaaaatgatacagtgccagatctcagtttcgcatattgtttttcagggcaggtctgtactgtgtgtagtgctgtttacatagatgaatttaggttgtaataattatttttaaagatttacacagatttgaatagcagtgttaactgttaaccacattgcattaattcccaggcgatttagagctcttggagagccaaggccagccaagagcatttgtagtctggtgacaacccccttttaagctaatttatccagaaccctgatttccctcacttcttgctcattccttctttgacctattgcatttcatgttgagtttttccatcaacatgctgcacctgtcagtcaagtgagcattttttaagaacacattgtactgagaaccacttaagcattgaatgcggagaaagcagtgctacctcagttttgctggaagtagacttctttgatagttttctttctttgatgaagtttctgtattttcatgttgtaagtggaaatacttttttttgtttgtttgtttcatttgccttggagccaaagtttctgttcctggtggtcgggaaactgcctgccggccaactgacttgaaggaaaactgtggtatggagctctgcttgaatttttttttttttaatatttttatttttttctttgaatatcatcagcttacttgtctggcaagggcagaagcctggggttggcctgaactctgccaaacaaatatcaaagtgtatttaatagttaaatttgtgccctttcccttcttgctgcacccatgttgtcacttaacccccaggagttatttattatctttttgttaaagtcaggctcatttggggtaatgtgatgactgtttaggtttacatgaccctcctctcctttccctacccccaaatatgtatatatacatatataaaatatgtatatattttacctatataaaatatatatatatacacatatatgtatctatattcctttgtttctttgcctgcttatactggccataaaagagggagctgccttcaatgtataaagtataagaagagtgccagggaatgccataatggaggcttttggatctgaatttggaccatttcactaaagagaacatgagtttgctcagccctttcctcacaagagggagggccccggttccccagacttctccacgcgctggctccataaaggccagctttggccaggctgccacaggggcctgaggagctcactctgggcctacctggtttcagttagagggtcctcctgttatttttccatttaaaaagtatgtcctcagaaaactgtactggaaggatgggtggcaggaacttgtatagttcagcttccaacactttggaacagattaaaaagggaatcttttaaataaaaacgtataaaaatatttatactcttgaggtaatgagactttgtctgttaaacatttggaggtttctcccttaacctaataccccgctgcgtcccaggtatgtttctcagcctgggcaggaattgcatgttttgagttccattgtgagcagccttacagctctgggctcccatcttaaggattattaaagagttttggcagttggtatttttctaaaactgatattgaccatagggaacatacttggaatttgtttttttttttaaatcctaaacctgacagttcctccttcagaggggcaaatgggaaactttaagatcacccacggtatagtactgctagaaagctgaagggggtcttgggccagatgcctggcttctgttctagctaaataagactcttgaataagtctccaggggtcccagcaggttctgtgggatcagttgtagctgggtacccagactgaggttttaaaaagactgctttttcattaagccagtttgcaactcattttccccggttctggattgggtagtggttgactgagggaaaagccaggctgctcttggccagataaggccctttccatcccagatcagagtgtatcagagaaagctgcacaaaagaggcaggcagcccaggaccctgagtactctggagaaactaggttccttccccaccctttaagaagacattccgtgcattagatgtactagagtggatgtattttgttgttttttaaattaactatttagcctcctcatcccccaccaaaaaagccatttagttattttttggttatattgatccatttgcaaatgagaagccagaaaagggagcagtcagggagggacttacaagttcctttcaagtttgagtacttgatgctcagcaaagatttcaagcttctgcagtagctctgggccaatgcttgactctttcatgaccacaagaaatgcagtttttctgcaaagggatccaaggtgaggtgtgtgtagggtttgaagttatacttctgggaagtgaaaagtcttgttcctttcaacctagaaataggtttgccacttaatgagtgagcagtaagtctgtgtaagaggctgaatgcatgcccctcagataagccagtacactccttgcttagcaacagaacatcagggtgatgtggagaggggcaggatgtggacgccactttggaaatcggcaacatctgagggcaacaacaaacaagtgtgttgggaaataagaaataactcagttttgacaactggctttgtcagcttttgtgatgtttctttagcagtttattggaaagatggtatgagatgacgtgctgcttcattgaattgctctttcccccatctttgccaaatctcaatgtatcgttcttaaccccacctcctgtaaggggctttgctatgcttcagctggttgtctcagcagctgaagtgctgcccacctgtgtgagttgggtccaggaaaccatgtctgcccttctgataagggaagatgaatctagagctgggtgaagatctaaattttaaccaaacccctgggcccaggaaaataacaattgaaaatgtacaaggcagtgttttcaatattaaacttccccaaggaaagcacaaactagtctttttggaaagggagaaaggattaagccacacagtattagtctttgaagcagtactggtctctaggggctggtgccaaaatggagtcccatagtagttacactcgatggcctcatgtactatatactgtgccaaattgtattaaacagtggtggggagttactgggataagaacttgtctaaaagtttacaaaccaaaacagatctgttaggttggtgcaaaagtaagtttttgccatacttaatgtattgccattaagtatggcaaaaaccacaattacttttacaccaacctatgtatttaagaatgtttggtttgccagattccaaatgaggtcttcagtgcagcaaagcccaaaaggtgtagactcagttatgcaattataaggttaaggcgtagaagaaagctgctgctaggtttttgttgcattttacttgactgctctgctgtttttcttgtctctcatgtttggttagctatgacttgagcatcttggtaactgacaaaggtcttccttgggggacttgaacatcttggtaaatgacaggtcttcttggaggactccagcagtatcttgtttaaacgactgaaaggactattaaggttgttgaattgtgttaattgggactcattgaggaaatgcgacattgatcctcctcttattccacagtgtgttttctgatcatataaagaaggttccgaaccatccatccccctcagagtttattcccctggtaagctgtaattgcatatccagtttaaactggactgggactgcatgttggtgaggatcggcaggggttttcccccttttcgaaagatgaaatagattcttgagcactggttgcagaagccaaaatagttcaaatagctttgcataaccattgggttctgcttctgattcaggtgctgggcatcatgtcctccctattcttctcttcttggaaacccagcctatctcataaatacctacttccgccacccatccaacctccctgctcctttcaacacaaatcttggatattgccaaaggaagccattcagcagctgctggggtttttcatccccctgacatgcatacatttgctctgggagaagtgtcttccctctgaccctggtccccagctccgtctgtgcttaattgctcttacctgttgcactaatgaatatgactaggttttaaagggggaatgtgaagcaataggcacatggggcttggatgaattggtcccacagatataccctgccttaagccgctgaggtgatgagtccactgctcatgtgaccctccacctttgtggatccctcttggtttgtgaccagtgtgtctgtttgttgaggttgtacaaacttgacaaaagttaatacttttgtttgtattttctgcactgttgcactctccaaatggccccttgagtatttttattgacttgttacacacatttttgtctttgatgtctacattttttcctttaatgttttttatttggaaggttacctgctgttggatttaataaatttgtttacttgaa

SEQ ID NO: 5357 - DNA, 1996 bp, Homo sapiens
  source 1..1996: mol_type = unassigned DNA
agctgggctgagactgagggagagaagctggaggctgatcttggtccagcagaagctgagcagagctgctgtctttggtctttcaggttggctggctcctctggctgatggcatgttgaggtacatgggccagcggcagcgagggcatccaatccagaggggtccactctagaggccaggccaccagcaccatgggccagtgtgtcaccaagtgtaagaatccctcatcgaccctgggcagcaaaaatggagaccgtgagcccagcaacaagtcacatagcaggaggggtgcaggccaccgtgaggagcaggtaccaccctgtggcaagccaggtggagatatcctcgtcaacgggaccaagaaggccgaggctgccactgaggcctgccagctgccaacgtcctcgggagatgctgggagggagtccaagtccaatgccgaggagtcttccttgcaaagattggaagaactgttcaggcgctacaaggatgagcgggaagatgcaattttggaggaaggcatggagcgcttttgcaatgacctgtgtgttgaccccacagaatttcgagtgctgctcttggcttggaagttccaggctgcaaccatgtgcaaattcaccaggaaggagttttttgatggctgcaaagcaataagtgcagacagcattgacggaatctgtgcacggttccctagcctcttaacagaagccaaacaagaggataaattcaaggatctctaccggtttacatttcagtttggcctggactctgaagaagggcagcggtcactgcatcgggaaatagccattgccctgtggaaactagtctttacccagaacaatcctccggtattggaccaatggctaaacttcctaacagagaacccctcggggatcaagggcatctcccgggacacttggaacatgttccttaacttcactcaggtgattggccctgacctcagcaactacagtgaagatgaggcctggccaagtctctttgacacctttgtggagtgggaaatggagcgaaggaaaagagaaggggaagggagaggtgcactcagctcagggcctgagggcttgtgtcccgaggagcagacttagtggctctgtcccaggagcagcagcaaggatctgccagctgccctgcagccaactgaggaattggaccattttggaaattactgaagatccggatattttctactttacacctttctctgccttgtatctgaaagggctctaaaatgctgtatcatgttttaggcactttcttcatttttttggttattttggttatttcctttttggggggatctcccagaatatttgaacctggttacatgttgtgtatctttttttgaagccttcagatagaataagcctgccatttcttgcacaaatttaggttttttttttgtttttttttgtttttttttttttttttttggtaggggagggcatagagcagggcggggggatgggactgttaggttgaattaacattacaaaatgatacagtgccagatctcagtttcgcatattgtttttcagggcaggtctgtactgtgtgtagtgctgtttacatagatgaatttaggttgtaataattatttttaaagatttacacagatttgaatagcagtgttaactgttaaccacattgcattaattcccaggcgatttagagctcttggagagccaaggccagccaagagcatttgtagtctggtgacaacccccttttaagctaatttatccagaaccctgatttccctcacttcttgctcattccttctttgacctattgcatttcatgttgagtttttccatcaacatgctgcacctgtcagtcaagtgagcattttttaagaacacattgtactgagaaccacttaagcattgaatgcggagaaagcagtgctacctcagttttgctggaagtagacttctttgatagttttctttctttgatgaagtttctgtattttcat

SEQ ID NO: 5358 - DNA, 9163 bp, Homo sapiens
  source 1..9163: mol_type = unassigned DNA
gctggacaaggcactaggacctagaaggcatctatccaccctggcaggaatttcttgcttggagctcagacaacaaaggcatagagagattggttttctttctctcagcatctccacccaaccagcagaaaaccggtctctgaggttccaccaaaatatggaacttgattttggacactttgacgaaagagataagacatccaggaacatgcgaggctcccggatgaatgggttgcctagccccactcacagcgcccactgtagcttctaccgaaccagaaccttgcaggcactgagtaatgagaagaaagccaagaaggtacgtttctaccgcaatggggaccgctacttcaaggggattgtgtacgctgtgtcctctgaccgttttcgcagctttgacgccttgctggctgacctgacgcgatctctgtctgacaacatcaacctgcctcagggagtgcgttacatttacaccattgatggatccaggaagatcggaagcatggatgaactggaggaaggggaaagctatgtctgttcctcagacaacttctttaaaaaggtggagtacaccaagaatgtcaatcccaactggtctgtcaacgtaaaaacatctgccaatatgaaagccccccagtccttggctagcagcaacagtgcacaggccagggagaacaaggactttgtgcgccccaagctggttaccatcatccgcagtggggtgaagcctcggaaggctgtgcgtgtgcttctgaacaagaagacagcccactcttttgagcaagtcctcactgatatcacagaagccatcaaactggagaccggggttgtcaaaaaactctacactctggatggaaaacaggtaacttgtctccatgatttctttggtgatgatgatgtgtttattgcctgtggtcctgaaaaatttcgctatgctcaggatgatttttctctggatgaaaatgaatgccgagtcatgaagggaaacccatcagccacagctggcccaaaggcatccccaacacctcagaagacttcagccaagagccctggtcctatgcgccgaagcaagtctccagctgactcaggtaacgaccaagacgcaaacggaacctccagcagccagctctctacccccaagtctaagcagtctcccatctctacgcccaccagtcctggcagcctccggaagcacaaggacctgtacctgcctctgtccttggatgactcggactcgcttggtgattccatgtaaaggaggggagagtgctcagagtccagagtacaaatccaagcctatcattgtagtagggtacttctgctcaagtgtccaacagggctattggtgctttcaagtttttattttgttgttgttgttattttgaaaaacacattgtaatatgttgggtttattttcctgtgatttctcctctgggccactgatccacagttaccaattatgagagatagattgataaccatcctttggggcagcattccagggatgcaaaatgtgctagtccatgacctttcaatggaaagcttaggtgcctgcgttatatttgccctgtctaattttgcccatacagtcttccttctgtagagggctgtttacatatacagcacttaaaatgtttgtgtgggaaaaaaaaaactcattggcagatccaagaatgacaaacacaagtgccccttttctctggatctcaagaatggtggaggaccctggaaggacagcaaggcagctccccagcctcactcttcactcctgattgaggcccgggtttgttgtccagcaccaattctggctgtcaatggggagaaataaaccaacaacttataattgtgacaccagatgcttaggatcctggtgctgggttagctaagagaatagacagaattggaaaatactgcagacatttccgaagagtttataaagcacagtgaattcctggtcaatctctccactgaggcaatttggaatcaataagcaattgataatagtttggagtaagggacttcatatacctgattcctctagaaggctgtctaacataccacatgattacatgaactgtatggtatccatctatctctgttctattgaatgccttgttaacagccaacactgaaaacactgtgagaatttgttttcaggtctgacacctttcagtctctttttatagcaagaaatcaatatcctttttataaaaattcatgtctgtatttcaggagcaaactcttcaggctccttttttataaactggtgatttttcttttgtctaaaaaacacatgaagaaaatttaccaaaaaaaaaaaaaaaagcagaagaataatgtagtttagaaattatgctgtcactgccaaacagtaacctccaggagaaaacaagatgaatagcagaggccaattcaatagaatcagttttttgatagctttttaacagttatgcttgcattaataatttcaatgtggaccagacattctaattatattttaaatgaaatgttacagcatattttaagcaactctttttatctataatcctaatatttcatactgaagacacagaaatctttcacttgtctttaacattagaaaggatttctctttactaaggactgatcatttgaaatagttttcagtcttttgagatacaggtttataacactgcttttttttttctgtaatcatagcccataatggcaaagacaactaaatttaagtgaaggtcatgcatgccaattctgtgtttgcttttagcagatatgaagatttccttatttctttgtaattgtgcagatattttgaaaggcacagcattcgaagccaagctgctgtttggctactgaatggcttgcagttgttcctccactctaaatggaatgagcttgctgtgtgtgtgtgtggtggtggtgggagggggtggtgcatgtgtgtgtgtgtgtgtgcatctgcagctgcttcaaaattaggaaatactacaggacacccctgtaatggattggtggcaactgggtggcactgctgatgtgcactgtgtaggggggaacccagtggtggtggggtagctcagatgcccctagacaagcttcagatgtctgtagctaccagaaacattttcggttcaggaaaagtgagatgatggtagtactggtttctggtgaaattgaagaaccccaaatgatgaggatctctttttgccccctctcctttttttgtagacccattcaaaaccattaataagcccattttactaagcccctatttctttctagaagctcagggttttcttagtgcctcccagaacattttgtagttaattgggaaaaagtgatacttggattagggggtgtgggcataaagaatggtgggaggcctgattttaaacttcaggccagaacccccaatgactccacccatagtctcactttaggtctcatttagtccatcacctttattttaagttgaggaagtggaggctggtaaagagcaggaccagaggaagaatccagatttccttatgcttgggcctcacactagctctctgagtatttccttgattgcggtatatgtactactagaaaataccaaatggatatattttctttaggataacctttgaaccaacaatcttcaataacaatagtacatcttccatcttacttttaatcgagtataaggaaatgtttctttatggccattttggagggagcaggggatgaggcttggcatagtccaaaatttaagtctccaataattaattgcattttaaattggcccactttcaaggcaattttttttgtgtgtctgtaactgagctcctccacccctgtcattcacttccaattttacccaatccaattttagcactcaagttccattgtgttaatttctgcacggtcaacaaacatcaagtcagcaagcatttgccaccactccctatacttctccctccttcttacacacacacacacacacacacacacaatccatctcttgcttgttcctacctcctgatttttcttccctacagaaatagaaatagggacaaagaaggggaaaatgtatatattggggctgggctgaacaactaacttcataagtagtattaactaggggtaaattgagagaaaagctccttttctcttcactgttttggaaaggatagccattagcatgactgctttgtgtccttatggactttagtattagcctagattgaattatagcgttttctagctggaaggaaccttaagatcacatcatctactcctctactccaaatttctcattcttcaggccaggaaaccgagacacagaggtaaagtaatttccccaaggtcacacagctggctggggcaggattgggtttacaacccacatctcctggctcttattccagggccttttcccactaagtagtattgccttccattaggctcctgagagttatttctcagggtcatgttgcatcttggagccacatgctgctgccctgatctcagtgggaaatccacccagcaacctaatacagccccttttccctgcattcacctggttcccatccacatgggttgcagatgtccttgaagagagtgaggcattgagggccaataggagcaatggggtccctggccttgtccatctgattcaggagatcactgctccatcgtgaggagccctctgaatagccccccactgaatgcttgccttgcccaaatggaatggaggaagattgattttctccatcagttcaccttgtgtcatctcataatggttggtctttccaggctgagggaaatgtttcttgtttccagagtagaaaaagaaagagtggaacaatagctttgttcatcctaactttctgagatggcttttcaacattttaaaaaaactagtgtggctaccattcactggcaatgatttcttttagaatatgggagtaagatgagctagagaaaataacctggtctcactgtggttgccctcatccacaatgtccccaaagccatcctgctctgatgaggacaatttccaggtataagcaaggggctttgtgacaaaaatgtaccctggctgatgttaaacattggctcctgtgtttgcaccaaaatagcaagctgtgtgctctatacactcttcccatcgtcttgtgtacactgctcctgtggccttccacagcagaaaccagggcaaaagggtccaaacacatggttttccttgctgcaaggctcttcctgggaactaagggggtatttattagttcagttctaagagacctccttctgggcttaccccactcctcaggtacttctctctccttcctccttctcctccacagtcacaagtaaccaaggaacctgaaagtggatgtgtagctatttgaagaaggcaaggaaccctgagattcttctttgaatcctctagtccaagtcttagaccagtgattggtgcttaccttgaacaaaattttgtctgtgttcctaatcccttcaatactctgggtacaatgctcccaatcaccctgcacatttgattctaaatggcttttattttttaaaaatccatatccctaggacaagagaacaggatgcctatatccccaaaatgagctccaggacactgatgggaatgatcccaaagatcaccccacctcagaaacgtctgtgccaagagacttccccagatagaaacactgggacagtggtttgaacgacttcttttatggttgtccagtttgctatggaaataaaaggcattgattttttaaaaagatgattggaacctgtctttggccacatagggccacttggatccatttccaggccttactcatatattgccttcactgaagggctttggctttaagtcccagactggtctcccaagtgaaccataagtgttttggagctcatctggggtgaggcatgagaatgttgccccatctatcccttcaggaaaaggtgccttccctccctttctcctaaagcctggtccccagaaattgtttttgtctccaaaagtctagtatggtctttatacacccagactcttagtgttgcgtcctgccttgtttccttgttaaggatctatgcagacctcccgctttggcttagctagcgtgacattggctatcatttgacaagactaacttttttttttttttttttttgactgagtctccctctgtcacctaggctggagtgcagtggcacaatcttggctcgctgcaaccttcacccttcacctcccaggtcgaagcgattctcctgcctcagtctcccgagtagctgggattacaggcgtgcgccaccaaatctggctatttttttattattattatttttagtagagatggggtttcaccatgttggccagactggtcttgaactcttggcctcaaattatctgcccacctcggcctcccaaagtgctgggattacaggcatgagccaccatgcccagctgacaagactaattttttatcccttggtttattggcttcaacatcttctggaatcagaggtgattttttcttaccttggatgcctgagactaggggagtatagaattccaattggtaattaaggcatctttctgctcctgatcagaagggcaggttagttgggagaggtcagatggcacaacagaagtcaccttgtaagtaaggcaaagacttgaaggcattagcgtttctcattactaggtcaataacctgagggaatcaatggctttttgccgctctacctcttgtgtatctctttgacttttctttctctgtctagtttcctctgttctcagtttatattctatgttatcagtctctctttccacagtacaaacatccatcctttctcctgtgcaattctgtctctccctcttattatctttatttgtactttttccttcctccctgtctaggcattgggcatgtgcctcttcttagcctgtgattttgccttgggactgatgataaattatttccagattcaatcagccctggtcctaccccagtccaatcagaagtatgttggtgggaatcaacctgatcctggccctttcttcttctccattttcattcgtaatccccctcagcagatctttacaagcagtttccttatagctcatgtatctttaggtctttgccttccaagcactgtacagaatactttgtggttcctttttagtctgacattttgtggagcagtgaagcgtgctcagagacataatcagctgaagagaaaaaatccacccatggatttatatcagctaaatactaataattgattttgtttgatgtgcccataatttttaaagctgcaatataatataatgagggaccacaggtaatttctcctgtcatttgttttggctggatgggggtgggggagtaattgcttaaagttttaccattacacattaaactctctataataatcttgtttggggcttgctaactgttgagctgttttaactaaactggtaggcaatcggagttgatttaaatgaaaagataatttaacaaatctatactataaaaagagacatttgcttaattgacatgtattttttccttctgagtcacctaaacatttactcttgacaccaactgttcatgatactgaatagacagtccatataagagaaattagtggacctaaagaagccagattgtaggtgttaatttattaaacagagtgcaaagcccttggaaatgtcactgcttggcaataccatatggaatgccaaaatttacaatgacttttctttataagttatccaaaagggatttgaacaagtaagaggttatgccaaaatgtctccaatgtatggtcctgtaatatattgcagcttgaagccaatgatcccttatgacttgtatacaactaatgcatgttttattgaattttgcatttcccacgtgtggtaagttctttaaaatgtttttgatcacctttttgtgccattaaacttgtacagaaaatgtttttatggccattttcaaagggagaaagtttaaaatggaaacagcccaccctttctgccctatagctgtagttagaattgagtacctgtagcaaaacagctgtaattggtggttgtagtgttagaggtgttagcttgctagtgactagctttggagagtaaatgcatggtattgtacatcacatttcttaactcgttttaacctctgaaaagaatatattcttctttgtagtccttcttcccacccccttgccctctccctctccctgctcccagttgtcttacagttgtaaatatctgatttgaggcccaataactcttgccaagtaaagtcagcaaacaacaaacaaaccaaaatgtggggaaaaggcatttctcaaccatctctcagcagttattgatcatttcttaaggaacagcattgtgatcaaagactcaactttacgtaaaaatcagtggtaaattggggttgtatttggccatttgattacatttcaggattgaatagttttcagaatcacatgtaatccaaagacagtaggtagtgatgtcccttatccctgcagctgttttaagatagagacctcagaagactctgcttgaccgatgaccaataattatttgaaaaaaaaagaaaaaatgagagaaataaaacagatatttaagaactttagccacctatttagaatagttatagccagaaaaaaaaacaagggcatgagttcaaatgcattactatcagtgtcctaggcaatacctaacctactctgaaattgtgattcaaaagcagtatttcaagaggcattctccttttttggtttgctgaccccacttggactggtaggtttggtgaggcccccataaaccagctggagcagacccttttcatctcctgtgcctgtaacacccctcttcccccaccccctccgcaattcaatgagggctttcttgggtcagaggacttcaaggttgtctagagaagtttgccatgtgtgtaaggtgctgtgaactgtgagtgctgaagattcgcagcattcaataccaggcagccaaagagctgctcttgcaattattttggctctcaagctctgttcttcatcgcattctcatttctgtgtacatttgcaagatgtgtgtaatgtcattttccaaaaataaaatttgatttcaata

SEQ ID NO: 5359 - DNA, 9269 bp, Homo sapiens
  source 1..9269: mol_type = unassigned DNA
gaaacctttctagctgttaatgcagcctgtgaatttttttaaaagcatgtaattaatcataggaggttggggggattcactaagcctgagttacatgggagaagctggacaaggcactaggacctagaaggcatctatccaccctggcaggaatttcttgcttggagctcagacaacaaaggcatagagagattggttttctttctctcagcatctccacccaaccagcagaaaaccggtctctgaggttccaccaaaatatggaacttgattttggacactttgacgaaagagataagacatccaggaacatgcgaggctcccggatgaatgggttgcctagccccactcacagcgcccactgtagcttctaccgaaccagaaccttgcaggcactgagtaatgagaagaaagccaagaaggtacgtttctaccgcaatggggaccgctacttcaaggggattgtgtacgctgtgtcctctgaccgttttcgcagctttgacgccttgctggctgacctgacgcgatctctgtctgacaacatcaacctgcctcagggagtgcgttacatttacaccattgatggatccaggaagatcggaagcatggatgaactggaggaaggggaaagctatgtctgttcctcagacaacttctttaaaaaggtggagtacaccaagaatgtcaatcccaactggtctgtcaacgtaaaaacatctgccaatatgaaagccccccagtccttggctagcagcaacagtgcacaggccagggagaacaaggactttgtgcgccccaagctggttaccatcatccgcagtggggtgaagcctcggaaggctgtgcgtgtgcttctgaacaagaagacagcccactcttttgagcaagtcctcactgatatcacagaagccatcaaactggagaccggggttgtcaaaaaactctacactctggatggaaaacaggtaacttgtctccatgatttctttggtgatgatgatgtgtttattgcctgtggtcctgaaaaatttcgctatgctcaggatgatttttctctggatgaaaatgaatgccgagtcatgaagggaaacccatcagccacagctggcccaaaggcatccccaacacctcagaagacttcagccaagagccctggtcctatgcgccgaagcaagtctccagctgactcaggtaacgaccaagacgcaaacggaacctccagcagccagctctctacccccaagtctaagcagtctcccatctctacgcccaccagtcctggcagcctccggaagcacaaggtagacctgtacctgcctctgtccttggatgactcggactcgcttggtgattccatgtaaaggaggggagagtgctcagagtccagagtacaaatccaagcctatcattgtagtagggtacttctgctcaagtgtccaacagggctattggtgctttcaagtttttattttgttgttgttgttattttgaaaaacacattgtaatatgttgggtttattttcctgtgatttctcctctgggccactgatccacagttaccaattatgagagatagattgataaccatcctttggggcagcattccagggatgcaaaatgtgctagtccatgacctttcaatggaaagcttaggtgcctgcgttatatttgccctgtctaattttgcccatacagtcttccttctgtagagggctgtttacatatacagcacttaaaatgtttgtgtgggaaaaaaaaaactcattggcagatccaagaatgacaaacacaagtgccccttttctctggatctcaagaatggtggaggaccctggaaggacagcaaggcagctccccagcctcactcttcactcctgattgaggcccgggtttgttgtccagcaccaattctggctgtcaatggggagaaataaaccaacaacttataattgtgacaccagatgcttaggatcctggtgctgggttagctaagagaatagacagaattggaaaatactgcagacatttccgaagagtttataaagcacagtgaattcctggtcaatctctccactgaggcaatttggaatcaataagcaattgataatagtttggagtaagggacttcatatacctgattcctctagaaggctgtctaacataccacatgattacatgaactgtatggtatccatctatctctgttctattgaatgccttgttaacagccaacactgaaaacactgtgagaatttgttttcaggtctgacacctttcagtctctttttatagcaagaaatcaatatcctttttataaaaattcatgtctgtatttcaggagcaaactcttcaggctccttttttataaactggtgatttttcttttgtctaaaaaacacatgaagaaaatttaccaaaaaaaaaaaaaaaagcagaagaataatgtagtttagaaattatgctgtcactgccaaacagtaacctccaggagaaaacaagatgaatagcagaggccaattcaatagaatcagttttttgatagctttttaacagttatgcttgcattaataatttcaatgtggaccagacattctaattatattttaaatgaaatgttacagcatattttaagcaactctttttatctataatcctaatatttcatactgaagacacagaaatctttcacttgtctttaacattagaaaggatttctctttactaaggactgatcatttgaaatagttttcagtcttttgagatacaggtttataacactgcttttttttttctgtaatcatagcccataatggcaaagacaactaaatttaagtgaaggtcatgcatgccaattctgtgtttgcttttagcagatatgaagatttccttatttctttgtaattgtgcagatattttgaaaggcacagcattcgaagccaagctgctgtttggctactgaatggcttgcagttgttcctccactctaaatggaatgagcttgctgtgtgtgtgtgtggtggtggtgggagggggtggtgcatgtgtgtgtgtgtgtgtgcatctgcagctgcttcaaaattaggaaatactacaggacacccctgtaatggattggtggcaactgggtggcactgctgatgtgcactgtgtaggggggaacccagtggtggtggggtagctcagatgcccctagacaagcttcagatgtctgtagctaccagaaacattttcggttcaggaaaagtgagatgatggtagtactggtttctggtgaaattgaagaaccccaaatgatgaggatctctttttgccccctctcctttttttgtagacccattcaaaaccattaataagcccattttactaagcccctatttctttctagaagctcagggttttcttagtgcctcccagaacattttgtagttaattgggaaaaagtgatacttggattagggggtgtgggcataaagaatggtgggaggcctgattttaaacttcaggccagaacccccaatgactccacccatagtctcactttaggtctcatttagtccatcacctttattttaagttgaggaagtggaggctggtaaagagcaggaccagaggaagaatccagatttccttatgcttgggcctcacactagctctctgagtatttccttgattgcggtatatgtactactagaaaataccaaatggatatattttctttaggataacctttgaaccaacaatcttcaataacaatagtacatcttccatcttacttttaatcgagtataaggaaatgtttctttatggccattttggagggagcaggggatgaggcttggcatagtccaaaatttaagtctccaataattaattgcattttaaattggcccactttcaaggcaattttttttgtgtgtctgtaactgagctcctccacccctgtcattcacttccaattttacccaatccaattttagcactcaagttccattgtgttaatttctgcacggtcaacaaacatcaagtcagcaagcatttgccaccactccctatacttctccctccttcttacacacacacacacacacacacacacaatccatctcttgcttgttcctacctcctgatttttcttccctacagaaatagaaatagggacaaagaaggggaaaatgtatatattggggctgggctgaacaactaacttcataagtagtattaactaggggtaaattgagagaaaagctccttttctcttcactgttttggaaaggatagccattagcatgactgctttgtgtccttatggactttagtattagcctagattgaattatagcgttttctagctggaaggaaccttaagatcacatcatctactcctctactccaaatttctcattcttcaggccaggaaaccgagacacagaggtaaagtaatttccccaaggtcacacagctggctggggcaggattgggtttacaacccacatctcctggctcttattccagggccttttcccactaagtagtattgccttccattaggctcctgagagttatttctcagggtcatgttgcatcttggagccacatgctgctgccctgatctcagtgggaaatccacccagcaacctaatacagccccttttccctgcattcacctggttcccatccacatgggttgcagatgtccttgaagagagtgaggcattgagggccaataggagcaatggggtccctggccttgtccatctgattcaggagatcactgctccatcgtgaggagccctctgaatagccccccactgaatgcttgccttgcccaaatggaatggaggaagattgattttctccatcagttcaccttgtgtcatctcataatggttggtctttccaggctgagggaaatgtttcttgtttccagagtagaaaaagaaagagtggaacaatagctttgttcatcctaactttctgagatggcttttcaacattttaaaaaaactagtgtggctaccattcactggcaatgatttcttttagaatatgggagtaagatgagctagagaaaataacctggtctcactgtggttgccctcatccacaatgtccccaaagccatcctgctctgatgaggacaatttccaggtataagcaaggggctttgtgacaaaaatgtaccctggctgatgttaaacattggctcctgtgtttgcaccaaaatagcaagctgtgtgctctatacactcttcccatcgtcttgtgtacactgctcctgtggccttccacagcagaaaccagggcaaaagggtccaaacacatggttttccttgctgcaaggctcttcctgggaactaagggggtatttattagttcagttctaagagacctccttctgggcttaccccactcctcaggtacttctctctccttcctccttctcctccacagtcacaagtaaccaaggaacctgaaagtggatgtgtagctatttgaagaaggcaaggaaccctgagattcttctttgaatcctctagtccaagtcttagaccagtgattggtgcttaccttgaacaaaattttgtctgtgttcctaatcccttcaatactctgggtacaatgctcccaatcaccctgcacatttgattctaaatggcttttattttttaaaaatccatatccctaggacaagagaacaggatgcctatatccccaaaatgagctccaggacactgatgggaatgatcccaaagatcaccccacctcagaaacgtctgtgccaagagacttccccagatagaaacactgggacagtggtttgaacgacttcttttatggttgtccagtttgctatggaaataaaaggcattgattttttaaaaagatgattggaacctgtctttggccacatagggccacttggatccatttccaggccttactcatatattgccttcactgaagggctttggctttaagtcccagactggtctcccaagtgaaccataagtgttttggagctcatctggggtgaggcatgagaatgttgccccatctatcccttcaggaaaaggtgccttccctccctttctcctaaagcctggtccccagaaattgtttttgtctccaaaagtctagtatggtctttatacacccagactcttagtgttgcgtcctgccttgtttccttgttaaggatctatgcagacctcccgctttggcttagctagcgtgacattggctatcatttgacaagactaacttttttttttttttttttttgactgagtctccctctgtcacctaggctggagtgcagtggcacaatcttggctcgctgcaaccttcacccttcacctcccaggtcgaagcgattctcctgcctcagtctcccgagtagctgggattacaggcgtgcgccaccaaatctggctatttttttattattattatttttagtagagatggggtttcaccatgttggccagactggtcttgaactcttggcctcaaattatctgcccacctcggcctcccaaagtgctgggattacaggcatgagccaccatgcccagctgacaagactaattttttatcccttggtttattggcttcaacatcttctggaatcagaggtgattttttcttaccttggatgcctgagactaggggagtatagaattccaattggtaattaaggcatctttctgctcctgatcagaagggcaggttagttgggagaggtcagatggcacaacagaagtcaccttgtaagtaaggcaaagacttgaaggcattagcgtttctcattactaggtcaataacctgagggaatcaatggctttttgccgctctacctcttgtgtatctctttgacttttctttctctgtctagtttcctctgttctcagtttatattctatgttatcagtctctctttccacagtacaaacatccatcctttctcctgtgcaattctgtctctccctcttattatctttatttgtactttttccttcctccctgtctaggcattgggcatgtgcctcttcttagcctgtgattttgccttgggactgatgataaattatttccagattcaatcagccctggtcctaccccagtccaatcagaagtatgttggtgggaatcaacctgatcctggccctttcttcttctccattttcattcgtaatccccctcagcagatctttacaagcagtttccttatagctcatgtatctttaggtctttgccttccaagcactgtacagaatactttgtggttcctttttagtctgacattttgtggagcagtgaagcgtgctcagagacataatcagctgaagagaaaaaatccacccatggatttatatcagctaaatactaataattgattttgtttgatgtgcccataatttttaaagctgcaatataatataatgagggaccacaggtaatttctcctgtcatttgttttggctggatgggggtgggggagtaattgcttaaagttttaccattacacattaaactctctataataatcttgtttggggcttgctaactgttgagctgttttaactaaactggtaggcaatcggagttgatttaaatgaaaagataatttaacaaatctatactataaaaagagacatttgcttaattgacatgtattttttccttctgagtcacctaaacatttactcttgacaccaactgttcatgatactgaatagacagtccatataagagaaattagtggacctaaagaagccagattgtaggtgttaatttattaaacagagtgcaaagcccttggaaatgtcactgcttggcaataccatatggaatgccaaaatttacaatgacttttctttataagttatccaaaagggatttgaacaagtaagaggttatgccaaaatgtctccaatgtatggtcctgtaatatattgcagcttgaagccaatgatcccttatgacttgtatacaactaatgcatgttttattgaattttgcatttcccacgtgtggtaagttctttaaaatgtttttgatcacctttttgtgccattaaacttgtacagaaaatgtttttatggccattttcaaagggagaaagtttaaaatggaaacagcccaccctttctgccctatagctgtagttagaattgagtacctgtagcaaaacagctgtaattggtggttgtagtgttagaggtgttagcttgctagtgactagctttggagagtaaatgcatggtattgtacatcacatttcttaactcgttttaacctctgaaaagaatatattcttctttgtagtccttcttcccacccccttgccctctccctctccctgctcccagttgtcttacagttgtaaatatctgatttgaggcccaataactcttgccaagtaaagtcagcaaacaacaaacaaaccaaaatgtggggaaaaggcatttctcaaccatctctcagcagttattgatcatttcttaaggaacagcattgtgatcaaagactcaactttacgtaaaaatcagtggtaaattggggttgtatttggccatttgattacatttcaggattgaatagttttcagaatcacatgtaatccaaagacagtaggtagtgatgtcccttatccctgcagctgttttaagatagagacctcagaagactctgcttgaccgatgaccaataattatttgaaaaaaaaagaaaaaatgagagaaataaaacagatatttaagaactttagccacctatttagaatagttatagccagaaaaaaaaacaagggcatgagttcaaatgcattactatcagtgtcctaggcaatacctaacctactctgaaattgtgattcaaaagcagtatttcaagaggcattctccttttttggtttgctgaccccacttggactggtaggtttggtgaggcccccataaaccagctggagcagacccttttcatctcctgtgcctgtaacacccctcttcccccaccccctccgcaattcaatgagggctttcttgggtcagaggacttcaaggttgtctagagaagtttgccatgtgtgtaaggtgctgtgaactgtgagtgctgaagattcgcagcattcaataccaggcagccaaagagctgctcttgcaattattttggctctcaagctctgttcttcatcgcattctcatttctgtgtacatttgcaagatgtgtgtaatgtcattttccaaaaataaaatttgatttcaata

SEQ ID NO: 5360 - DNA, 9405 bp, Homo sapiens
  source 1..9405: mol_type = unassigned DNA
cttatttcttatgaatgtcggatagctgcaccagcttggtggggaaagggtttgatgaatagcacaaagacactggctgttccctggaggctgtccctttaaaggagaatcttagtttattctggggggaggggatgcacacattagagtaggaaagagggcttggaataaaatgaaaacactcccccttcatagtcattgtactgaaatgcaaagactgcttcctaagctggagatgctaaccttgggtagctccttctgttctcttcaaggggaattttgtcaggctatggattcatttacaactgttagtcatgtgggcatgtgtgaggaaacagatgccagttttaatgtatttagcccgaagttccaatttgataggagccactgtcagtctctgaggttccaccaaaatatggaacttgattttggacactttgacgaaagagataagacatccaggaacatgcgaggctcccggatgaatgggttgcctagccccactcacagcgcccactgtagcttctaccgaaccagaaccttgcaggcactgagtaatgagaagaaagccaagaaggtacgtttctaccgcaatggggaccgctacttcaaggggattgtgtacgctgtgtcctctgaccgttttcgcagctttgacgccttgctggctgacctgacgcgatctctgtctgacaacatcaacctgcctcagggagtgcgttacatttacaccattgatggatccaggaagatcggaagcatggatgaactggaggaaggggaaagctatgtctgttcctcagacaacttctttaaaaaggtggagtacaccaagaatgtcaatcccaactggtctgtcaacgtaaaaacatctgccaatatgaaagccccccagtccttggctagcagcaacagtgcacaggccagggagaacaaggactttgtgcgccccaagctggttaccatcatccgcagtggggtgaagcctcggaaggctgtgcgtgtgcttctgaacaagaagacagcccactcttttgagcaagtcctcactgatatcacagaagccatcaaactggagaccggggttgtcaaaaaactctacactctggatggaaaacaggtaacttgtctccatgatttctttggtgatgatgatgtgtttattgcctgtggtcctgaaaaatttcgctatgctcaggatgatttttctctggatgaaaatgaatgccgagtcatgaagggaaacccatcagccacagctggcccaaaggcatccccaacacctcagaagacttcagccaagagccctggtcctatgcgccgaagcaagtctccagctgactcagcaaacggaacctccagcagccagctctctacccccaagtctaagcagtctcccatctctacgcccaccagtcctggcagcctccggaagcacaaggacctgtacctgcctctgtccttggatgactcggactcgcttggtgattccatgtaaaggaggggagagtgctcagagtccagagtacaaatccaagcctatcattgtagtagggtacttctgctcaagtgtccaacagggctattggtgctttcaagtttttattttgttgttgttgttattttgaaaaacacattgtaatatgttgggtttattttcctgtgatttctcctctgggccactgatccacagttaccaattatgagagatagattgataaccatcctttggggcagcattccagggatgcaaaatgtgctagtccatgacctttcaatggaaagcttaggtgcctgcgttatatttgccctgtctaattttgcccatacagtcttccttctgtagagggctgtttacatatacagcacttaaaatgtttgtgtgggaaaaaaaaaactcattggcagatccaagaatgacaaacacaagtgccccttttctctggatctcaagaatggtggaggaccctggaaggacagcaaggcagctccccagcctcactcttcactcctgattgaggcccgggtttgttgtccagcaccaattctggctgtcaatggggagaaataaaccaacaacttataattgtgacaccagatgcttaggatcctggtgctgggttagctaagagaatagacagaattggaaaatactgcagacatttccgaagagtttataaagcacagtgaattcctggtcaatctctccactgaggcaatttggaatcaataagcaattgataatagtttggagtaagggacttcatatacctgattcctctagaaggctgtctaacataccacatgattacatgaactgtatggtatccatctatctctgttctattgaatgccttgttaacagccaacactgaaaacactgtgagaatttgttttcaggtctgacacctttcagtctctttttatagcaagaaatcaatatcctttttataaaaattcatgtctgtatttcaggagcaaactcttcaggctccttttttataaactggtgatttttcttttgtctaaaaaacacatgaagaaaatttaccaaaaaaaaaaaaaaaagcagaagaataatgtagtttagaaattatgctgtcactgccaaacagtaacctccaggagaaaacaagatgaatagcagaggccaattcaatagaatcagttttttgatagctttttaacagttatgcttgcattaataatttcaatgtggaccagacattctaattatattttaaatgaaatgttacagcatattttaagcaactctttttatctataatcctaatatttcatactgaagacacagaaatctttcacttgtctttaacattagaaaggatttctctttactaaggactgatcatttgaaatagttttcagtcttttgagatacaggtttataacactgcttttttttttctgtaatcatagcccataatggcaaagacaactaaatttaagtgaaggtcatgcatgccaattctgtgtttgcttttagcagatatgaagatttccttatttctttgtaattgtgcagatattttgaaaggcacagcattcgaagccaagctgctgtttggctactgaatggcttgcagttgttcctccactctaaatggaatgagcttgctgtgtgtgtgtgtggtggtggtgggagggggtggtgcatgtgtgtgtgtgtgtgtgcatctgcagctgcttcaaaattaggaaatactacaggacacccctgtaatggattggtggcaactgggtggcactgctgatgtgcactgtgtaggggggaacccagtggtggtggggtagctcagatgcccctagacaagcttcagatgtctgtagctaccagaaacattttcggttcaggaaaagtgagatgatggtagtactggtttctggtgaaattgaagaaccccaaatgatgaggatctctttttgccccctctcctttttttgtagacccattcaaaaccattaataagcccattttactaagcccctatttctttctagaagctcagggttttcttagtgcctcccagaacattttgtagttaattgggaaaaagtgatacttggattagggggtgtgggcataaagaatggtgggaggcctgattttaaacttcaggccagaacccccaatgactccacccatagtctcactttaggtctcatttagtccatcacctttattttaagttgaggaagtggaggctggtaaagagcaggaccagaggaagaatccagatttccttatgcttgggcctcacactagctctctgagtatttccttgattgcggtatatgtactactagaaaataccaaatggatatattttctttaggataacctttgaaccaacaatcttcaataacaatagtacatcttccatcttacttttaatcgagtataaggaaatgtttctttatggccattttggagggagcaggggatgaggcttggcatagtccaaaatttaagtctccaataattaattgcattttaaattggcccactttcaaggcaattttttttgtgtgtctgtaactgagctcctccacccctgtcattcacttccaattttacccaatccaattttagcactcaagttccattgtgttaatttctgcacggtcaacaaacatcaagtcagcaagcatttgccaccactccctatacttctccctccttcttacacacacacacacacacacacacacaatccatctcttgcttgttcctacctcctgatttttcttccctacagaaatagaaatagggacaaagaaggggaaaatgtatatattggggctgggctgaacaactaacttcataagtagtattaactaggggtaaattgagagaaaagctccttttctcttcactgttttggaaaggatagccattagcatgactgctttgtgtccttatggactttagtattagcctagattgaattatagcgttttctagctggaaggaaccttaagatcacatcatctactcctctactccaaatttctcattcttcaggccaggaaaccgagacacagaggtaaagtaatttccccaaggtcacacagctggctggggcaggattgggtttacaacccacatctcctggctcttattccagggccttttcccactaagtagtattgccttccattaggctcctgagagttatttctcagggtcatgttgcatcttggagccacatgctgctgccctgatctcagtgggaaatccacccagcaacctaatacagccccttttccctgcattcacctggttcccatccacatgggttgcagatgtccttgaagagagtgaggcattgagggccaataggagcaatggggtccctggccttgtccatctgattcaggagatcactgctccatcgtgaggagccctctgaatagccccccactgaatgcttgccttgcccaaatggaatggaggaagattgattttctccatcagttcaccttgtgtcatctcataatggttggtctttccaggctgagggaaatgtttcttgtttccagagtagaaaaagaaagagtggaacaatagctttgttcatcctaactttctgagatggcttttcaacattttaaaaaaactagtgtggctaccattcactggcaatgatttcttttagaatatgggagtaagatgagctagagaaaataacctggtctcactgtggttgccctcatccacaatgtccccaaagccatcctgctctgatgaggacaatttccaggtataagcaaggggctttgtgacaaaaatgtaccctggctgatgttaaacattggctcctgtgtttgcaccaaaatagcaagctgtgtgctctatacactcttcccatcgtcttgtgtacactgctcctgtggccttccacagcagaaaccagggcaaaagggtccaaacacatggttttccttgctgcaaggctcttcctgggaactaagggggtatttattagttcagttctaagagacctccttctgggcttaccccactcctcaggtacttctctctccttcctccttctcctccacagtcacaagtaaccaaggaacctgaaagtggatgtgtagctatttgaagaaggcaaggaaccctgagattcttctttgaatcctctagtccaagtcttagaccagtgattggtgcttaccttgaacaaaattttgtctgtgttcctaatcccttcaatactctgggtacaatgctcccaatcaccctgcacatttgattctaaatggcttttattttttaaaaatccatatccctaggacaagagaacaggatgcctatatccccaaaatgagctccaggacactgatgggaatgatcccaaagatcaccccacctcagaaacgtctgtgccaagagacttccccagatagaaacactgggacagtggtttgaacgacttcttttatggttgtccagtttgctatggaaataaaaggcattgattttttaaaaagatgattggaacctgtctttggccacatagggccacttggatccatttccaggccttactcatatattgccttcactgaagggctttggctttaagtcccagactggtctcccaagtgaaccataagtgttttggagctcatctggggtgaggcatgagaatgttgccccatctatcccttcaggaaaaggtgccttccctccctttctcctaaagcctggtccccagaaattgtttttgtctccaaaagtctagtatggtctttatacacccagactcttagtgttgcgtcctgccttgtttccttgttaaggatctatgcagacctcccgctttggcttagctagcgtgacattggctatcatttgacaagactaacttttttttttttttttttttgactgagtctccctctgtcacctaggctggagtgcagtggcacaatcttggctcgctgcaaccttcacccttcacctcccaggtcgaagcgattctcctgcctcagtctcccgagtagctgggattacaggcgtgcgccaccaaatctggctatttttttattattattatttttagtagagatggggtttcaccatgttggccagactggtcttgaactcttggcctcaaattatctgcccacctcggcctcccaaagtgctgggattacaggcatgagccaccatgcccagctgacaagactaattttttatcccttggtttattggcttcaacatcttctggaatcagaggtgattttttcttaccttggatgcctgagactaggggagtatagaattccaattggtaattaaggcatctttctgctcctgatcagaagggcaggttagttgggagaggtcagatggcacaacagaagtcaccttgtaagtaaggcaaagacttgaaggcattagcgtttctcattactaggtcaataacctgagggaatcaatggctttttgccgctctacctcttgtgtatctctttgacttttctttctctgtctagtttcctctgttctcagtttatattctatgttatcagtctctctttccacagtacaaacatccatcctttctcctgtgcaattctgtctctccctcttattatctttatttgtactttttccttcctccctgtctaggcattgggcatgtgcctcttcttagcctgtgattttgccttgggactgatgataaattatttccagattcaatcagccctggtcctaccccagtccaatcagaagtatgttggtgggaatcaacctgatcctggccctttcttcttctccattttcattcgtaatccccctcagcagatctttacaagcagtttccttatagctcatgtatctttaggtctttgccttccaagcactgtacagaatactttgtggttcctttttagtctgacattttgtggagcagtgaagcgtgctcagagacataatcagctgaagagaaaaaatccacccatggatttatatcagctaaatactaataattgattttgtttgatgtgcccataatttttaaagctgcaatataatataatgagggaccacaggtaatttctcctgtcatttgttttggctggatgggggtgggggagtaattgcttaaagttttaccattacacattaaactctctataataatcttgtttggggcttgctaactgttgagctgttttaactaaactggtaggcaatcggagttgatttaaatgaaaagataatttaacaaatctatactataaaaagagacatttgcttaattgacatgtattttttccttctgagtcacctaaacatttactcttgacaccaactgttcatgatactgaatagacagtccatataagagaaattagtggacctaaagaagccagattgtaggtgttaatttattaaacagagtgcaaagcccttggaaatgtcactgcttggcaataccatatggaatgccaaaatttacaatgacttttctttataagttatccaaaagggatttgaacaagtaagaggttatgccaaaatgtctccaatgtatggtcctgtaatatattgcagcttgaagccaatgatcccttatgacttgtatacaactaatgcatgttttattgaattttgcatttcccacgtgtggtaagttctttaaaatgtttttgatcacctttttgtgccattaaacttgtacagaaaatgtttttatggccattttcaaagggagaaagtttaaaatggaaacagcccaccctttctgccctatagctgtagttagaattgagtacctgtagcaaaacagctgtaattggtggttgtagtgttagaggtgttagcttgctagtgactagctttggagagtaaatgcatggtattgtacatcacatttcttaactcgttttaacctctgaaaagaatatattcttctttgtagtccttcttcccacccccttgccctctccctctccctgctcccagttgtcttacagttgtaaatatctgatttgaggcccaataactcttgccaagtaaagtcagcaaacaacaaacaaaccaaaatgtggggaaaaggcatttctcaaccatctctcagcagttattgatcatttcttaaggaacagcattgtgatcaaagactcaactttacgtaaaaatcagtggtaaattggggttgtatttggccatttgattacatttcaggattgaatagttttcagaatcacatgtaatccaaagacagtaggtagtgatgtcccttatccctgcagctgttttaagatagagacctcagaagactctgcttgaccgatgaccaataattatttgaaaaaaaaagaaaaaatgagagaaataaaacagatatttaagaactttagccacctatttagaatagttatagccagaaaaaaaaacaagggcatgagttcaaatgcattactatcagtgtcctaggcaatacctaacctactctgaaattgtgattcaaaagcagtatttcaagaggcattctccttttttggtttgctgaccccacttggactggtaggtttggtgaggcccccataaaccagctggagcagacccttttcatctcctgtgcctgtaacacccctcttcccccaccccctccgcaattcaatgagggctttcttgggtcagaggacttcaaggttgtctagagaagtttgccatgtgtgtaaggtgctgtgaactgtgagtgctgaagattcgcagcattcaataccaggcagccaaagagctgctcttgcaattattttggctctcaagctctgttcttcatcgcattctcatttctgtgtacatttgcaagatgtgtgtaatgtcattttccaaaaataaaatttgatttcaat

SEQ ID NO: 5361 - DNA, 6162 bp, Homo sapiens
  source 1..6162: mol_type = unassigned DNA
ggttttctttctctcagcatctccacccaaccagcagaaaaccggtctctgaggttccaccaaaatatggaacttgattttggacactttgacgaaagagataagacatccaggaacatgcgaggctcccggatgaatgggttgcctagccccactcacagcgcccactgtagcttctaccgaaccagaaccttgcaggcactgagtaatgagaagaaagccaagaaggtacgtttctaccgcaatggggaccgctacttcaaggggattgtgtacgctgtgtcctctgaccgttttcgcagctttgacgccttgctggctgacctgacgcgatctctgtctgacaacatcaacctgcctcagggagtgcgttacatttacaccattgatggatccaggaagatcggaagcatggatgaactggaggaaggggaaagctatgtctgttcctcagacaacttctttaaaaaggtggagtacaccaagaatgtcaatcccaactggtctgtcaacgtaaaaacatctgccaatatgaaagccccccagtccttggctagcagcaacagtgcacaggccagggagaacaaggactttgtgcgccccaagctggttaccatcatccgcagtggggtgaagcctcggaaggctgtgcgtgtgcttctgaacaagaagacagcccactcttttgagcaagtcctcactgatatcacagaagccatcaaactggagaccggggttgtcaaaaaactctacactctggatggaaaacaggtaacttgtctccatgatttctttggtgatgatgatgtgtttattgcctgtggtcctgaaaaatttcgctatgctcaggatgatttttctctggatgaaaatgaatgccgagtcatgaagggaaacccatcagccacagctggcccaaaggcatccccaacacctcagaagacttcagccaagagccctggtcctatgcgccgaagcaagtctccagctgactcagcaaacggaacctccagcagccagctctctacccccaagtctaagcagtctcccatctctacgcccaccagtcctggcagcctccggaagcacaaggtagacctgtacctgcctctgtccttggatgactcggactcgcttggtgattccatgtaaaggaggggagagtgctcagagtccagagtacaaatccaagcctatcattgtagtagggtacttctgctcaagtgtccaacagggctattggtgctttcaagtttttattttgttgttgttgttattttgaaaaacacattgtaatatgttgggtttattttcctgtgatttctcctctgggccactgatccacagttaccaattatgagagatagattgataaccatcctttggggcagcattccagggatgcaaaatgtgctagtccatgacctttcaatggaaagcttaggtgcctgcgttatatttgccctgtctaattttgcccatacagtcttccttctgtagagggctgtttacatatacagcacttaaaatgtttgtgtgggaaaaaaaaaactcattggcagatccaagaatgacaaacacaagtgccccttttctctggatctcaagaatggtggaggaccctggaaggacagcaaggcagctccccagcctcactcttcactcctgattgaggcccgggtttgttgtccagcaccaattctggctgtcaatggggagaaataaaccaacaacttataattgtgacaccagatgcttaggatcctggtgctgggttagctaagagaatagacagaattggaaaatactgcagacatttccgaagagtttataaagcacagtgaattcctggtcaatctctccactgaggcaatttggaatcaataagcaattgataatagtttggagtaagggacttcatatacctgattcctctagaaggctgtctaacataccacatgattacatgaactgtatggtatccatctatctctgttctattgaatgccttgttaacagccaacactgaaaacactgtgagaatttgttttcaggtctgacacctttcagtctctttttatagcaagaaatcaatatcctttttataaaaattcatgtctgtatttcaggagcaaactcttcaggctccttttttataaactggtgatttttcttttgtctaaaaaacacatgaagaaaatttaccaaaaaaaaaaaaaaaagcagaagaataatgtagtttagaaattatgctgtcactgccaaacagtaacctccaggagaaaacaagatgaatagcagaggccaattcaatagaatcagttttttgatagctttttaacagttatgcttgcattaataatttcaatgtggaccagacattctaattatattttaaatgaaatgttacagcatattttaagcaactctttttatctataatcctaatatttcatactgaagacacagaaatctttcacttgtctttaacattagaaaggatttctctttactaaggactgatcatttgaaatagttttcagtcttttgagatacaggtttataacactgcttttttttttctgtaatcatagcccataatggcaaagacaactaaatttaagtgaaggtcatgcatgccaattctgtgtttgcttttagcagatatgaagatttccttatttctttgtaattgtgcagatattttgaaaggcacagcattcgaagccaagctgctgtttggctactgaatggcttgcagttgttcctccactctaaatggaatgagcttgctgtgtgtgtgtgtggtggtggtgggagggggtggtgcatgtgtgtgtgtgtgtgtgcatctgcagctgcttcaaaattaggaaatactacaggacacccctgtaatggattggtggcaactgggtggcactgctgatgtgcactgtgtaggggggaacccagtggtggtggggtagctcagatgcccctagacaagcttcagatgtctgtagctaccagaaacattttcggttcaggaaaagtgagatgatggtagtactggtttctggtgaaattgaagaaccccaaatgatgaggatctctttttgccccctctcctttttttgtagacccattcaaaaccattaataagcccattttactaagcccctatttctttctagaagctcagggttttcttagtgcctcccagaacattttgtagttaattgggaaaaagtgatacttggattagggggtgtgggcataaagaatggtgggaggcctgattttaaacttcaggccagaacccccaatgactccacccatagtctcactttaggtctcatttagtccatcacctttattttaagttgaggaagtggaggctggtaaagagcaggaccagaggaagaatccagatttccttatgcttgggcctcacactagctctctgagtatttccttgattgcggtatatgtactactagaaaataccaaatggatatattttctttaggataacctttgaaccaacaatcttcaataacaatagtacatcttccatcttacttttaatcgagtataaggaaatgtttctttatggccattttggagggagcaggggatgaggcttggcatagtccaaaatttaagtctccaataattaattgcattttaaattggcccactttcaaggcaattttttttgtgtgtctgtaactgagctcctccacccctgtcattcacttccaattttacccaatccaattttagcactcaagttccattgtgttaatttctgcacggtcaacaaacatcaagtcagcaagcatttgccaccactccctatacttctccctccttcttacacacacacacacacacacacacacaatccatctcttgcttgttcctacctcctgatttttcttccctacagaaatagaaatagggacaaagaaggggaaaatgtatatattggggctgggctgaacaactaacttcataagtagtattaactaggggtaaattgagagaaaagctccttttctcttcactgttttggaaaggatagccattagcatgactgctttgtgtccttatggactttagtattagcctagattgaattatagcgttttctagctggaaggaaccttaagatcacatcatctactcctctactccaaatttctcattcttcaggccaggaaaccgagacacagaggtaaagtaatttccccaaggtcacacagctggctggggcaggattgggtttacaacccacatctcctggctcttattccagggccttttcccactaagtagtattgccttccattaggctcctgagagttatttctcagggtcatgttgcatcttggagccacatgctgctgccctgatctcagtgggaaatccacccagcaacctaatacagccccttttccctgcattcacctggttcccatccacatgggttgcagatgtccttgaagagagtgaggcattgagggccaataggagcaatggggtccctggccttgtccatctgattcaggagatcactgctccatcgtgaggagccctctgaatagccccccactgaatgcttgccttgcccaaatggaatggaggaagattgattttctccatcagttcaccttgtgtcatctcataatggttggtctttccaggctgagggaaatgtttcttgtttccagagtagaaaaagaaagagtggaacaatagctttgttcatcctaactttctgagatggcttttcaacattttaaaaaaactagtgtggctaccattcactggcaatgatttcttttagaatatgggagtaagatgagctagagaaaataacctggtctcactgtggttgccctcatccacaatgtccccaaagccatcctgctctgatgaggacaatttccaggtataagcaaggggctttgtgacaaaaatgtaccctggctgatgttaaacattggctcctgtgtttgcaccaaaatagcaagctgtgtgctctatacactcttcccatcgtcttgtgtacactgctcctgtggccttccacagcagaaaccagggcaaaagggtccaaacacatggttttccttgctgcaaggctcttcctgggaactaagggggtatttattagttcagttctaagagacctccttctgggcttaccccactcctcaggtacttctctctccttcctccttctcctccacagtcacaagtaaccaaggaacctgaaagtggatgtgtagctatttgaagaaggcaaggaaccctgagattcttctttgaatcctctagtccaagtcttagaccagtgattggtgcttaccttgaacaaaattttgtctgtgttcctaatcccttcaatactctgggtacaatgctcccaatcaccctgcacatttgattctaaatggcttttattttttaaaaatccatatccctaggacaagagaacaggatgcctatatccccaaaatgagctccaggacactgatgggaatgatcccaaagatcaccccacctcagaaacgtctgtgccaagagacttccccagatagaaacactgggacagtggtttgaacgacttcttttatggttgtccagtttgctatggaaataaaaggcattgattttttaaaaagatgattggaacctgtctttggccacatagggccacttggatccatttccaggccttactcatatattgccttcactgaagggctttggctttaagtcccagactggtctcccaagtgaaccataagtgttttggagctcatctggggtgaggcatgagaatgttgccccatctatcccttcaggaaaaggtgccttccctccctttctcctaaagcctggtccccagaaattgtttttgtctccaaaagtctagtatggtctttatacacccagactcttagtgttgcgtcctgccttgtttccttgttaaggatctatgcagacctcccgctttggcttagctagcgtgacattggctatcatttgacaagactaacttttttttttttttttttttgactgagtctccctctgtcacctaggctggagtgcagtggcacaatcttggctcgctgcaaccttcacccttcacctcccaggtcgaag

SEQ ID NO: 5362 - DNA, 3019 bp, Homo sapiens
  source 1..3019: mol_type = unassigned DNA
gagattggttttctttctctcagcatctccacccaaccagcagaaaaccgcttctacctgggattttcctttggaaaagtctctgaggttccaccaaaatatggaacttgattttggacactttgacgaaagagataagacatccaggaacatgcgaggctcccggatgaatgggttgcctagccccactcacagcgcccactgtagcttctaccgaaccagaaccttgcaggcactgagtaatgagaagaaagccaagaaggtacgtttctaccgcaatggggaccgctacttcaaggggattgtgtacgctgtgtcctctgaccgttttcgcagctttgacgccttgctggctgacctgacgcgatctctgtctgacaacatcaacctgcctcagggagtgcgttacatttacaccattgatggatccaggaagatcggaagcatggatgaactggaggaaggggaaagctatgtctgttcctcagacaacttctttaaaaaggtggagtacaccaagaatgtcaatcccaactggtctgtcaacgtaaaaacatctgccaatatgaaagccccccagtccttggctagcagcaacagtgcacaggccagggagaacaaggactttgtgcgccccaagctggttaccatcatccgcagtggggtgaagcctcggaaggctgtgcgtgtgcttctgaacaagaagacagcccactcttttgagcaagtcctcactgatatcacagaagccatcaaactggagaccggggttgtcaaaaaactctacactctggatggaaaacaggtaacttgtctccatgatttctttggtgatgatgatgtgtttattgcctgtggtcctgaaaaatttcgctatgctcaggatgatttttctctggatgaaaatgaatgccgagtcatgaagggaaacccatcagccacagctggcccaaaggcatccccaacacctcagaagacttcagccaagagccctggtcctatgcgccgaagcaagtctccagctgactcaggtaacgaccaagacgcaaacggaacctccagcagccagctctctacccccaagtctaagcagtctcccatctctacgcccaccagtcctggcagcctccggaagcacaaggtagacctgtacctgcctctgtccttggatgactcggactcgcttggtgattccatgtaaaggaggggagagtgctcagagtccagagtacaaatccaagcctatcattgtagtagggtacttctgctcaagtgtccaacagggctattggtgctttcaagtttttattttgttgttgttgttattttgaaaaacacattgtaatatgttgggtttattttcctgtgatttctcctctgggccactgatccacagttaccaattatgagagatagattgataaccatcctttggggcagcattccagggatgcaaaatgtgctagtccatgacctttcaatggaaagcttaggtgcctgcgttatatttgccctgtctaattttgcccatacagtcttccttctgtagagggctgtttacatatacagcacttaaaatgtttgtgtgggaaaaaaaaaactcattggcagatccaagaatgacaaacacaagtgccccttttctctggatctcaagaatggtggaggaccctggaaggacagcaaggcagctccccagcctcactcttcactcctgattgaggcccgggtttgttgtccagcaccaattctggctgtcaatggggagaaataaaccaacaacttataattgtgacaccagatgcttaggatcctggtgctgggttagctaagagaatagacagaattggaaaatactgcagacatttccgaagagtttataaagcacagtgaattcctggtcaatctctccactgaggcaatttggaatcaataagcaattgataatagtttggagtaagggacttcatatacctgattcctctagaaggctgtctaacataccacatgattacatgaactgtatggtatccatctatctctgttctattgaatgccttgttaacagccaacactgaaaacactgtgagaatttgttttcaggtctgacacctttcagtctctttttatagcaagaaatcaatatcctttttataaaaattcatgtctgtatttcaggagcaaactcttcaggctccttttttataaactggtgatttttcttttgtctaaaaaacacatgaagaaaatttaccaaaaaaaaaaaaaaaagcagaagaataatgtagtttagaaattatgctgtcactgccaaacagtaacctccaggagaaaacaagatgaatagcagaggccaattcaatagaatcagttttttgatagctttttaacagttatgcttgcattaataatttcaatgtggaccagacattctaattatattttaaatgaaatgttacagcatattttaagcaactctttttatctataatcctaatatttcatactgaagacacagaaatctttcacttgtctttaacattagaaaggatttctctttactaaggactgatcatttgaaatagttttcagtcttttgagatacaggtttataacactgcttttttttttctgtaatcatagcccataatggcaaagacaactaaatttaagtgaaggtcatgcatgccaattctgtgtttgcttttagcagatatgaagatttccttatttctttgtaattgtgcagatattttgaaaggcacagcattcgaagccaagctgctgtttggctactgaatggcttgcagttgttcctccactctaaatggaatgagcttgctgtgtgtgtgtgtggtggtggtgggagggggtggtgcatgtgtgtgtgtgtgtgtgcatctgcagctgcttcaaaattaggaaatactacaggacacccctgtaatggattggtggcaactgggtggcactgctgatgtgcactgtgtaggggggaacccagtggtggtggggtagc

SEQ ID NO: 5363 - DNA, 2476 bp, Homo sapiens
  source 1..2476: mol_type = unassigned DNA
gattttgtctgcgcaatctttttgctaccccgcaatttcctgttggttataaatgaaacctttctagctgttaatgcagcctgtgaatttttttaaaagcatgtaattaatcataggaggttggggggattcactaagcctgagttacatgggagaagctggacaaggcactaggacctagaaggcatctatccaccctggcaggaatttcttgcttggagctcagacaacaaaggcatagagagattggttttctttctctcagcatctccacccaaccagcagaaaaccggtctctgaggttccaccaaaatatggaacttgattttggacactttgacgaaagagataagacatccaggaacatgcgaggctcccggatgaatgggttgcctagccccactcacagcgcccactgtagcttctaccgaaccagaaccttgcaggcactgagtaatgagaagaaagccaagaaggtacgtttctaccgcaatggggaccgctacttcaaggggattgtgtacgctgtgtcctctgaccgttttcgcagctttgacgccttgctggctgacctgacgcgatctctgtctgacaacatcaacctgcctcagggagtgcgttacatttacaccattgatggatccaggaagatcggaagcatggatgaactggaggaaggggaaagctatgtctgttcctcagacaacttctttaaaaaggtggagtacaccaagaatgtcaatcccaactggtctgtcaacgtaaaaacatctgccaatatgaaagccccccagtccttggctagcagcaacagtgcacaggccagggagaacaaggactttgtgcgccccaagctggttaccatcatccgcagtggggtgaagcctcggaaggctgtgcgtgtgcttctgaacaagaagacagcccactcttttgagcaagtcctcactgatatcacagaagccatcaaactggagaccggggttgtcaaaaaactctacactctggatggaaaacaggtaacttgtctccatgatttctttggtgatgatgatgtgtttattgcctgtggtcctgaaaaatttcgctatgctcaggatgatttttctctggatgaaaatgaatgccgagtcatgaagggaaacccatcagccacagctggcccaaaggcatccccaacacctcagaagacttcagccaagagccctggtcctatgcgccgaagcaagtctccagctgactcagcaaacggaacctccagcagccagctctctacccccaagtctaagcagtctcccatctctacgcccaccagtcctggcagcctccggaagcacaaggacctgtacctgcctctgtccttggatgactcggactcgcttggtgattccatgtaaaggaggggagagtgctcagagtccagagtacaaatccaagcctatcattgtagtagggtacttctgctcaagtgtccaacagggctattggtgctttcaagtttttattttgttgttgttgttattttgaaaaacacattgtaatatgttgggtttattttcctgtgatttctcctctgggccactgatccacagttaccaattatgagagatagattgataaccatcctttggggcagcattccagggatgcaaaatgtgctagtccatgacctttcaatggaaagcttaggtgcctgcgttatatttgccctgtctaattttgcccatacagtcttccttctgtagagggctgtttacatatacagcacttaaaatgtttgtgtgggaaaaaaaaaactcattggcagatccaagaatgacaaacacaagtgccccttttctctggatctcaagaatggtggaggaccctggaaggacagcaaggcagctccccagcctcactcttcactcctgattgaggcccgggtttgttgtccagcaccaattctggctgtcaatggggagaaataaaccaacaacttataattgtgacaccagatgcttaggatcctggtgctgggttagctaagagaatagacagaattggaaaatactgcagacatttccgaagagtttataaagcacagtgaattcctggtcaatctctccactgaggcaatttggaatcaataagcaattgataatagtttggagtaagggacttcatatacctgattcctctagaaggctgtctaacataccacatgattacatgaactgtatggtatccatctatctctgttctattgaatgccttgttaacagccaacactgaaaacactgtgagaatttgttttcaggtctgacacctttcagtctctttttatagcaagaaatcaatatcctttttataaaaattcatgtctgtatttcaggagcaaactcttcaggctccttttttataaactggtgatttttcttttgtctaaaaaacacatgaagaaaatttaccaaaaaaaaaaaaaaaagcagaagaa

SEQ ID NO: 5364 - DNA, 2275 bp, Homo sapiens
  source 1..2275: mol_type = unassigned DNA
atagagagattggttttctttctctcagcatctccacccaaccagcagaaaaccggtgagtggggcttttaagtgattttcaagaagaatgtaacagatgtcaaacgggaaaagcacaaggcaaagcctgctctctctgtctctctgtctcctcttctccttttttgccttattctatccgattttttccctaagcttctacctgggattttcctttggaaaagtctctgaggttccaccaaaatatggaacttgattttggacactttgacgaaagagataagacatccaggaacatgcgaggctcccggatgaatgggttgcctagccccactcacagcgcccactgtagcttctaccgaaccagaaccttgcaggcactgagtaatgagaagaaagccaagaaggtacgtttctaccgcaatggggaccgctacttcaaggggattgtgtacgctgtgtcctctgaccgttttcgcagctttgacgccttgctggctgacctgacgcgatctctgtctgacaacatcaacctgcctcagggagtgcgttacatttacaccattgatggatccaggaagatcggaagcatggatgaactggaggaaggggaaagctatgtctgttcctcagacaacttctttaaaaaggtggagtacaccaagaatgtcaatcccaactggtctgtcaacgtaaaaacatctgccaatatgaaagccccccagtccttggctagcagcaacagtgcacaggccagggagaacaaggactttgtgcgccccaagctggttaccatcatccgcagtggggtgaagcctcggaaggctgtgcgtgtgcttctgaacaagaagacagcccactcttttgagcaagtcctcactgatatcacagaagccatcaaactggagaccggggttgtcaaaaaactctacactctggatggaaaacaggtaacttgtctccatgatttctttggtgatgatgatgtgtttattgcctgtggtcctgaaaaatttcgctatgctcaggatgatttttctctggatgaaaatgaatgccgagtcatgaagggaaacccatcagccacagctggcccaaaggcatccccaacacctcagaagacttcagccaagagccctggtcctatgcgccgaagcaagtctccagctgactcaggtaacgaccaagacgcaaacggaacctccagcagccagctctctacccccaagtctaagcagtctcccatctctacgcccaccagtcctggcagcctccggaagcacaaggtagacctgtacctgcctctgtccttggatgactcggactcgcttggtgattccatgtaaaggaggggagagtgctcagagtccagagtacaaatccaagcctatcattgtagtagggtacttctgctcaagtgtccaacagggctattggtgctttcaagtttttattttgttgttgttgttattttgaaaaacacattgtaatatgttgggtttattttcctgtgatttctcctctgggccactgatccacagttaccaattatgagagatagattgataaccatcctttggggcagcattccagggatgcaaaatgtgctagtccatgacctttcaatggaaagcttaggtgcctgcgttatatttgccctgtctaattttgcccatacagtcttccttctgtagagggctgtttacatatacagcacttaaaatgtttgtgtgggaaaaaaaaaactcattggcagatccaagaatgacaaacacaagtgccccttttctctggatctcaagaatggtggaggaccctggaaggacagcaaggcagctccccagcctcactcttcactcctgattgaggcccgggtttgttgtccagcaccaattctggctgtcaatggggagaaataaaccaacaacttataattgtgacaccagatgcttaggatcctggtgctgggttagctaagagaatagacagaattggaaaatactgcagacatttccgaagagtttataaagcacagtgaattcctggtcaatctctccactgaggcaatttggaatcaataagcaattgataatagtttggagtaagggacttcatatacctgattcctctagaaggctgtctaacataccacatgattacatgaactgtatggtatccatctatctctgttctattgaatgccttgttaacagccaacactgaaaacactgtgagaatttgttttcaggtctgacacctttcagtctctttttat

SEQ ID NO: 5365 - DNA, 1320 bp, Homo sapiens
  source 1..1320: mol_type = unassigned DNA
attgtactgaaatgcaaagactgcttcctaagctggagatgctaaccttgggtagctccttctgttctcttcaaggggaattttgtcaggctatggattcatttacaactgttagtcatgtgggcatgtgtgaggaaacagatgccagttttaatgtatttagcccgaagttccaatttgataggagccactgtcagtctctgaggttccaccaaaatatggaacttgattttggacactttgacgaaagagataagacatccaggaacatgcgaggctcccggatgaatgggttgcctagccccactcacagcgcccactgtagcttctaccgaaccagaaccttgcaggcactgagtaatgagaagaaagccaagaaggtacgtttctaccgcaatggggaccgctacttcaaggggattgtgtacgctgtgtcctctgaccgttttcgcagctttgacgccttgctggctgacctgacgcgatctctgtctgacaacatcaacctgcctcagggagtgcgttacatttacaccattgatggatccaggaagatcggaagcatggatgaactggaggaaggggaaagctatgtctgttcctcagacaacttctttaaaaaggtggagtacaccaagaatgtcaatcccaactggtctgtcaacgtaaaaacatctgccaatatgaaagccccccagtccttggctagcagcaacagtgcacaggccagggagaacaaggactttgtgcgccccaagctggttaccatcatccgcagtggggtgaagcctcggaaggctgtgcgtgtgcttctgaacaagaagacagcccactcttttgagcaagtcctcactgatatcacagaagccatcaaactggagaccggggttgtcaaaaaactctacactctggatggaaaacaggtaacttgtctccatgatttctttggtgatgatgatgtgtttattgcctgtggtcctgaaaaatttcgctatgctcaggatgatttttctctggatgaaaatgaatgccgagtcatgaagggaaacccatcagccacagctggcccaaaggcatccccaacacctcagaagacttcagccaagagccctggtcctatgcgccgaagcaagtctccagctgactcaggtaacgaccaagacgcaaacggaacctccagcagccagctctctacccccaagtctaagcagtctcccatctctacgcccaccagtcctggcagcctccggaagcacaaggacctgtacctgcctctgtccttggatgactcggactcgcttggtgattccatgtaaagga

SEQ ID NO: 5366 - DNA, 602 bp, Homo sapiens
  source 1..602: mol_type = unassigned DNA
aagcagcagatgggtcacaggcttttttcaaccagttcttttcacaagcagcagattgcagatctggatctggctaatatttaaaatcccttcttttttccttctccttgtccctttttgtttttgcctctcttcacccccatccctttctcccacgctcaggtctctgaggttccaccaaaatatggaacttgattttggacactttgacgaaagagataagacatccaggaacatgcgaggctcccggatgaatgggttgcctagccccactcacagcgcccactgtagcttctaccgaaccagaaccttgcaggcactgagtaatgagaagaaagccaagaaggtacgtttctaccgcaatggggaccgctacttcaaggggattgtgtacgctgtgtcctctgaccgttttcgcagctttgacgccttgctggctgacctgacgcgatctctgtctgacaacatcaacctgcctcagggagtgcgttacatttacaccattgatggatccaggaagatcggaagcatggatgaactggaggaaggggaaagctatgtctgttcctcagacaacttctttaaaaaggtggagtacacca

SEQ ID NO: 5367 - DNA, 518 bp, Homo sapiens
  source 1..518: mol_type = unassigned DNA
aatgctgagctcagcataggtcatggtgacattggaaaaaaggcggaattgagcctggcagacccattaggcaccagtctttcttatctcctgtcctcctggtcccttgcaaatatattgatgtggcagtgtgtagcagctgagccctgcttgctttgtctctgaggttccaccaaaatatggaacttgattttggacactttgacgaaagagataagacatccaggaacatgcgaggctcccggatgaatgggttgcctagccccactcacagcgcccactgtagcttctaccgaaccagaaccttgcaggcactgagtaatgagaagaaagccaagaaggtacgtttctaccgcaatggggaccgctacttcaaggggattgtgtacgctgtgtcctctgaccgttttcgcagctttgacgccttgctggctgacctgacgcgatctctgtctgacaacatcaacctgcctcagggagtgcgttacatttacaccattgatggatccaggaagatc

SEQ ID NO: 5368 - DNA, 9231 bp, Homo sapiens
  source 1..9231: mol_type = unassigned DNA
tagagagattggttttctttctctcagcatctccacccaaccagcagaaaaccggtgagtggggcttttaagtgattttcaagaagaatgtaacagatgtcaaacgggaaaagcacaaggcaaagcctgctctctctgtctctctgtctcctcttctccttttttgccttattctatccgattttttccctaagcttctacctgggattttcctttggaaaagtctctgaggttccaccaaaatatggaacttgattttggacactttgacgaaagagataagacatccaggaacatgcgaggctcccggatgaatgggttgcctagccccactcacagcgcccactgtagcttctaccgaaccagaaccttgcaggcactgagtaatgagaagaaagccaagaaggtacgtttctaccgcaatggggaccgctacttcaaggggattgtgtacgctgtgtcctctgaccgttttcgcagctttgacgccttgctggctgacctgacgcgatctctgtctgacaacatcaacctgcctcagggagtgcgttacatttacaccattgatggatccaggaagatcggaagcatggatgaactggaggaaggggaaagctatgtctgttcctcagacaacttctttaaaaaggtggagtacaccaagaatgtcaatcccaactggtctgtcaacgtaaaaacatctgccaatatgaaagccccccagtccttggctagcagcaacagtgcacaggccagggagaacaaggactttgtgcgccccaagctggttaccatcatccgcagtggggtgaagcctcggaaggctgtgcgtgtgcttctgaacaagaagacagcccactcttttgagcaagtcctcactgatatcacagaagccatcaaactggagaccggggttgtcaaaaaactctacactctggatggaaaacaggtaacttgtctccatgatttctttggtgatgatgatgtgtttattgcctgtggtcctgaaaaatttcgctatgctcaggatgatttttctctggatgaaaatgaatgccgagtcatgaagggaaacccatcagccacagctggcccaaaggcatccccaacacctcagaagacttcagccaagagccctggtcctatgcgccgaagcaagtctccagctgactcagcaaacggaacctccagcagccagctctctacccccaagtctaagcagtctcccatctctacgcccaccagtcctggcagcctccggaagcacaaggacctgtacctgcctctgtccttggatgactcggactcgcttggtgattccatgtaaaggaggggagagtgctcagagtccagagtacaaatccaagcctatcattgtagtagggtacttctgctcaagtgtccaacagggctattggtgctttcaagtttttattttgttgttgttgttattttgaaaaacacattgtaatatgttgggtttattttcctgtgatttctcctctgggccactgatccacagttaccaattatgagagatagattgataaccatcctttggggcagcattccagggatgcaaaatgtgctagtccatgacctttcaatggaaagcttaggtgcctgcgttatatttgccctgtctaattttgcccatacagtcttccttctgtagagggctgtttacatatacagcacttaaaatgtttgtgtgggaaaaaaaaaactcattggcagatccaagaatgacaaacacaagtgccccttttctctggatctcaagaatggtggaggaccctggaaggacagcaaggcagctccccagcctcactcttcactcctgattgaggcccgggtttgttgtccagcaccaattctggctgtcaatggggagaaataaaccaacaacttataattgtgacaccagatgcttaggatcctggtgctgggttagctaagagaatagacagaattggaaaatactgcagacatttccgaagagtttataaagcacagtgaattcctggtcaatctctccactgaggcaatttggaatcaataagcaattgataatagtttggagtaagggacttcatatacctgattcctctagaaggctgtctaacataccacatgattacatgaactgtatggtatccatctatctctgttctattgaatgccttgttaacagccaacactgaaaacactgtgagaatttgttttcaggtctgacacctttcagtctctttttatagcaagaaatcaatatcctttttataaaaattcatgtctgtatttcaggagcaaactcttcaggctccttttttataaactggtgatttttcttttgtctaaaaaacacatgaagaaaatttaccaaaaaaaaaaaaaaaagcagaagaataatgtagtttagaaattatgctgtcactgccaaacagtaacctccaggagaaaacaagatgaatagcagaggccaattcaatagaatcagttttttgatagctttttaacagttatgcttgcattaataatttcaatgtggaccagacattctaattatattttaaatgaaatgttacagcatattttaagcaactctttttatctataatcctaatatttcatactgaagacacagaaatctttcacttgtctttaacattagaaaggatttctctttactaaggactgatcatttgaaatagttttcagtcttttgagatacaggtttataacactgcttttttttttctgtaatcatagcccataatggcaaagacaactaaatttaagtgaaggtcatgcatgccaattctgtgtttgcttttagcagatatgaagatttccttatttctttgtaattgtgcagatattttgaaaggcacagcattcgaagccaagctgctgtttggctactgaatggcttgcagttgttcctccactctaaatggaatgagcttgctgtgtgtgtgtgtggtggtggtgggagggggtggtgcatgtgtgtgtgtgtgtgtgcatctgcagctgcttcaaaattaggaaatactacaggacacccctgtaatggattggtggcaactgggtggcactgctgatgtgcactgtgtaggggggaacccagtggtggtggggtagctcagatgcccctagacaagcttcagatgtctgtagctaccagaaacattttcggttcaggaaaagtgagatgatggtagtactggtttctggtgaaattgaagaaccccaaatgatgaggatctctttttgccccctctcctttttttgtagacccattcaaaaccattaataagcccattttactaagcccctatttctttctagaagctcagggttttcttagtgcctcccagaacattttgtagttaattgggaaaaagtgatacttggattagggggtgtgggcataaagaatggtgggaggcctgattttaaacttcaggccagaacccccaatgactccacccatagtctcactttaggtctcatttagtccatcacctttattttaagttgaggaagtggaggctggtaaagagcaggaccagaggaagaatccagatttccttatgcttgggcctcacactagctctctgagtatttccttgattgcggtatatgtactactagaaaataccaaatggatatattttctttaggataacctttgaaccaacaatcttcaataacaatagtacatcttccatcttacttttaatcgagtataaggaaatgtttctttatggccattttggagggagcaggggatgaggcttggcatagtccaaaatttaagtctccaataattaattgcattttaaattggcccactttcaaggcaattttttttgtgtgtctgtaactgagctcctccacccctgtcattcacttccaattttacccaatccaattttagcactcaagttccattgtgttaatttctgcacggtcaacaaacatcaagtcagcaagcatttgccaccactccctatacttctccctccttcttacacacacacacacacacacacacacaatccatctcttgcttgttcctacctcctgatttttcttccctacagaaatagaaatagggacaaagaaggggaaaatgtatatattggggctgggctgaacaactaacttcataagtagtattaactaggggtaaattgagagaaaagctccttttctcttcactgttttggaaaggatagccattagcatgactgctttgtgtccttatggactttagtattagcctagattgaattatagcgttttctagctggaaggaaccttaagatcacatcatctactcctctactccaaatttctcattcttcaggccaggaaaccgagacacagaggtaaagtaatttccccaaggtcacacagctggctggggcaggattgggtttacaacccacatctcctggctcttattccagggccttttcccactaagtagtattgccttccattaggctcctgagagttatttctcagggtcatgttgcatcttggagccacatgctgctgccctgatctcagtgggaaatccacccagcaacctaatacagccccttttccctgcattcacctggttcccatccacatgggttgcagatgtccttgaagagagtgaggcattgagggccaataggagcaatggggtccctggccttgtccatctgattcaggagatcactgctccatcgtgaggagccctctgaatagccccccactgaatgcttgccttgcccaaatggaatggaggaagattgattttctccatcagttcaccttgtgtcatctcataatggttggtctttccaggctgagggaaatgtttcttgtttccagagtagaaaaagaaagagtggaacaatagctttgttcatcctaactttctgagatggcttttcaacattttaaaaaaactagtgtggctaccattcactggcaatgatttcttttagaatatgggagtaagatgagctagagaaaataacctggtctcactgtggttgccctcatccacaatgtccccaaagccatcctgctctgatgaggacaatttccaggtataagcaaggggctttgtgacaaaaatgtaccctggctgatgttaaacattggctcctgtgtttgcaccaaaatagcaagctgtgtgctctatacactcttcccatcgtcttgtgtacactgctcctgtggccttccacagcagaaaccagggcaaaagggtccaaacacatggttttccttgctgcaaggctcttcctgggaactaagggggtatttattagttcagttctaagagacctccttctgggcttaccccactcctcaggtacttctctctccttcctccttctcctccacagtcacaagtaaccaaggaacctgaaagtggatgtgtagctatttgaagaaggcaaggaaccctgagattcttctttgaatcctctagtccaagtcttagaccagtgattggtgcttaccttgaacaaaattttgtctgtgttcctaatcccttcaatactctgggtacaatgctcccaatcaccctgcacatttgattctaaatggcttttattttttaaaaatccatatccctaggacaagagaacaggatgcctatatccccaaaatgagctccaggacactgatgggaatgatcccaaagatcaccccacctcagaaacgtctgtgccaagagacttccccagatagaaacactgggacagtggtttgaacgacttcttttatggttgtccagtttgctatggaaataaaaggcattgattttttaaaaagatgattggaacctgtctttggccacatagggccacttggatccatttccaggccttactcatatattgccttcactgaagggctttggctttaagtcccagactggtctcccaagtgaaccataagtgttttggagctcatctggggtgaggcatgagaatgttgccccatctatcccttcaggaaaaggtgccttccctccctttctcctaaagcctggtccccagaaattgtttttgtctccaaaagtctagtatggtctttatacacccagactcttagtgttgcgtcctgccttgtttccttgttaaggatctatgcagacctcccgctttggcttagctagcgtgacattggctatcatttgacaagactaacttttttttttttttttttttgactgagtctccctctgtcacctaggctggagtgcagtggcacaatcttggctcgctgcaaccttcacccttcacctcccaggtcgaagcgattctcctgcctcagtctcccgagtagctgggattacaggcgtgcgccaccaaatctggctatttttttattattattatttttagtagagatggggtttcaccatgttggccagactggtcttgaactcttggcctcaaattatctgcccacctcggcctcccaaagtgctgggattacaggcatgagccaccatgcccagctgacaagactaattttttatcccttggtttattggcttcaacatcttctggaatcagaggtgattttttcttaccttggatgcctgagactaggggagtatagaattccaattggtaattaaggcatctttctgctcctgatcagaagggcaggttagttgggagaggtcagatggcacaacagaagtcaccttgtaagtaaggcaaagacttgaaggcattagcgtttctcattactaggtcaataacctgagggaatcaatggctttttgccgctctacctcttgtgtatctctttgacttttctttctctgtctagtttcctctgttctcagtttatattctatgttatcagtctctctttccacagtacaaacatccatcctttctcctgtgcaattctgtctctccctcttattatctttatttgtactttttccttcctccctgtctaggcattgggcatgtgcctcttcttagcctgtgattttgccttgggactgatgataaattatttccagattcaatcagccctggtcctaccccagtccaatcagaagtatgttggtgggaatcaacctgatcctggccctttcttcttctccattttcattcgtaatccccctcagcagatctttacaagcagtttccttatagctcatgtatctttaggtctttgccttccaagcactgtacagaatactttgtggttcctttttagtctgacattttgtggagcagtgaagcgtgctcagagacataatcagctgaagagaaaaaatccacccatggatttatatcagctaaatactaataattgattttgtttgatgtgcccataatttttaaagctgcaatataatataatgagggaccacaggtaatttctcctgtcatttgttttggctggatgggggtgggggagtaattgcttaaagttttaccattacacattaaactctctataataatcttgtttggggcttgctaactgttgagctgttttaactaaactggtaggcaatcggagttgatttaaatgaaaagataatttaacaaatctatactataaaaagagacatttgcttaattgacatgtattttttccttctgagtcacctaaacatttactcttgacaccaactgttcatgatactgaatagacagtccatataagagaaattagtggacctaaagaagccagattgtaggtgttaatttattaaacagagtgcaaagcccttggaaatgtcactgcttggcaataccatatggaatgccaaaatttacaatgacttttctttataagttatccaaaagggatttgaacaagtaagaggttatgccaaaatgtctccaatgtatggtcctgtaatatattgcagcttgaagccaatgatcccttatgacttgtatacaactaatgcatgttttattgaattttgcatttcccacgtgtggtaagttctttaaaatgtttttgatcacctttttgtgccattaaacttgtacagaaaatgtttttatggccattttcaaagggagaaagtttaaaatggaaacagcccaccctttctgccctatagctgtagttagaattgagtacctgtagcaaaacagctgtaattggtggttgtagtgttagaggtgttagcttgctagtgactagctttggagagtaaatgcatggtattgtacatcacatttcttaactcgttttaacctctgaaaagaatatattcttctttgtagtccttcttcccacccccttgccctctccctctccctgctcccagttgtcttacagttgtaaatatctgatttgaggcccaataactcttgccaagtaaagtcagcaaacaacaaacaaaccaaaatgtggggaaaaggcatttctcaaccatctctcagcagttattgatcatttcttaaggaacagcattgtgatcaaagactcaactttacgtaaaaatcagtggtaaattggggttgtatttggccatttgattacatttcaggattgaatagttttcagaatcacatgtaatccaaagacagtaggtagtgatgtcccttatccctgcagctgttttaagatagagacctcagaagactctgcttgaccgatgaccaataattatttgaaaaaaaaagaaaaaatgagagaaataaaacagatatttaagaactttagccacctatttagaatagttatagccagaaaaaaaaacaagggcatgagttcaaatgcattactatcagtgtcctaggcaatacctaacctactctgaaattgtgattcaaaagcagtatttcaagaggcattctccttttttggtttgctgaccccacttggactggtaggtttggtgaggcccccataaaccagctggagcagacccttttcatctcctgtgcctgtaacacccctcttcccccaccccctccgcaattcaatgagggctttcttgggtcagaggacttcaaggttgtctagagaagtttgccatgtgtgtaaggtgctgtgaactgtgagtgctgaagattcgcagcattcaataccaggcagccaaagagctgctcttgcaattattttggctctcaagctctgttcttcatcgcattctcatttctgtgtacatttgcaagatgtgtgtaatgtcattttccaaaaataaaatttgatttc

SEQ ID NO: 5369 - DNA, 12769 bp, Homo sapiens
  source 1..12769: mol_type = unassigned DNA
agattagaaacttcgggtggagagggcggcggcgttgaatgtgtggcggaagcgctgggggtcacggctccgcgcgccgccggacagccggcggcgtctccacagcatgaattacccgggccgcgggtccccacggagccccgagcataacggccgaggcggcggcggcggcgcctgggagctgggctcagacgcgaggccagcgttcggcggcggcgtctgctgcttcgagcacctgcccggcggggacccggacgacggcgacgtgcccctggccctgctgcgcggggaacccgggctgcatttggcgccgggcaccgacgaccacaaccaccacctcgcgctggacccctgcctcagtgacgagaactatgacttcagctccgccgagtcgggctcctcgctgcgctactacagcgagggtgagagcggcggcggcggcagctccttgtcgctgcacccgccgcagcagcctccgctggtcccgacgaactcggggggcggcggcgcgacaggagggtcccccggggaaaggaaacgtacccggcttggcggcccggcggcccggcaccgctatgaggtagtgacggagctgggcccggaggaggtacgctggttctacaaggaggacaagaagacctggaagcccttcatcggctacgactcgctccgcatcgagctcgccttccggaccctgctgcagaccacgggtgcccggccccagggcggggaccgggacggcgaccatgtgtgctcccccacgggcccagcctccagttccggagaagatgacgatgaggaccgcgcctgcggcttctgccagagtacgacggggcacgagccggagatggtggagcttgtgaacatcgagcctgtgtgcgtgcggggcggcctctacgaggtggatgtgacccaaggagagtgctacccggtgtactggaaccaggctgataaaataccagtaatgcgtggacagtggtttattgacggcacttggcagcctctagaagaggaagaaagtaatttaattgagcaagaacatctcaattgttttaggggccagcagatgcaggaaaatttcgatattgaagtgtcaaaatccatagatggaaaagatggcagtgggatcaactattctgctgttcatagtttcaagttgagtcgaaaccatgtggactggcacagtgtggatgaagtatatctttatagtgatgcaacaacatctaaaattgcaagaacagttacccaaaaactgggattttctaaagcatcaagtagtggtaccagacttcatagaggttatgtagaagaagccacattagaagacaagccatcacagactacccatattgtatttgttgtgcatggcattgggcagaaaatggaccaaggaagaattatcaaaaatacagctatgatgagagaagctgcaagaaaaatagaagaaaggcatttttccaaccatgcaacacatgttgaatttctgcctgttgagtggcggtcaaaacttactcttgatggagacactgttgattccattactcctgacaaagtacgaggtttaagggatatgctgaacagcagtgcaatggacataatgtattatactagtccactttatagagatgaactagttaaaggccttcagcaagagctgaatcgattgtattcccttttctgttctcggaatccagactttgaagaaaaagggggtaaagtctcaatagtatcacattccttgggatgtgtaattacttatgacataatgactggctggaatccagttcggctgtatgaacagttgctgcaaaaggaagaagagttgcctgatgaacgatggatgagctatgaagaacgacatcttcttgatgaactctatataactaaacgacggctgaaggaaatagaagaacggcttcacggattgaaagcatcatctatgacacaaacacctgccttaaaatttaaggttgagaatttcttctgtatgggatccccattagcagttttcttggcgttgcgtggcatccgcccaggaaatactggaagtcaagaccatattttgcctagagagatttgtaaccggttactaaatatttttcatcctacagatccagtggcttatagattagaaccattaatactgaaacactacagcaacatttcacctgtccagatccactggtacaatacttcaaatcctttaccttatgaacatatgaagccaagctttctcaacccagctaaagaacctacctcagtttcagagaatgaaggcatttcaaccataccaagccctgtgacctcaccagttttgtcccgccgacactatggagaatctataacaaatataggcaaagcaagcatattaggggctgctagcattggaaagggacttggaggaatgttgttctcaagatttggacgttcatctacaacacagtcatctgaaacatcaaaagactcaatggaagatgagaagaagccagttgcctcaccttctgctaccaccgtagggacacagacccttccacatagcagttctggcttcctcgattctgcattggagttggatcacaggattgattttgaactcagagaaggccttgtggagagccgctattggtcagctgtcacgtcgcatactgcctattggtcatccttggatgttgccctttttcttttaaccttcatgtataaacatgagcacgatgatgatgcaaaacccaatttagatccaatctgaactctcttgaaggacatgaatggcctaaaactgattttttttttttccgttaaaatgtgtgtgtcaagatacggagatttcagggttaaagtatatttcagttttctttagggcaacatatatttgaatttaaaagcactttatttaaaaaaaaaagaagttttcagttctgaagaagtcatttacagtttgcatcattttaattatgagtctgacaaaaccttctccagagaatcaagcaagacctggatgtgaagaaggtttgggtaaactgcatgtaaaggctacaaatcacaatctgattcctcccaaatataaaggcatatggaacataatgtattaaccaaagtatgttataaatcaaaaatggtcaaggttcagcatattctatatgaagatcacaaggtggtatcgttttagatttctatgaaggctttcatttgtacatccctttgaaaaaatataacagatttaaaatgttttgaatttaacttgtttagaaaaactaatgcttaaaacaatatttgaactactgtatttataatttattacctctaattgctttatttcagtgtatgagacattactgttttaatgtttgctttgaacataatttaagaaccagatttattttctatagtgataaacccttttttctcagaactccatctttgtactcttcagatgaatatatagacactgtggcatacattttttttcattaaaaacttatggcttcatacaacactagttcaattttttaaataaactttttattatgttacatgtacttcagagaaagctaaagtttctctaaacttgacacggagtactccataatgggtacatttcattagctttattagaaaactagtaaatgcttttgaataggtagtatgacagctattttaaatgtataaacatttgtgtgccaaacaacatatatgaagggatgtgatgccactaactagtgcacattgtttctcaatgtgccattgagacacaaggcacagtaagtcaggattctgaggcattggaagggttttcttcagctgtaattgtttccacagtgcttttcatctgaggggctcaaagtttaagagtgcattcaataacccatgtactagcttcttgaggtaagtaaataaatcttgttctcatgttacatgttaatacaccaaggcaccaaaacatttaaagtgccatgaattagattacatcagaaatcagaaaagcttggattgagctagtcaccgtggttcacgcctgtaatcccaacacttcgggaggccaagatgggaggatctcttgagcccaggatttcaagaccagcttgggcaacatagtgagaccctcttctctgcaaaaactgacaaaaattagccacttgtagtggtgtacacctgtagtcccagctactcaagaggctgaggtgggaggatcacccgagcccagaagttcaaagctgcagtgagctctgatcacaccaatgcactccagcctgggtgacagagccagaccctgtctctaaaaaacaaaaaagaaaagcttgggttgaagccaggccatattcttttatatgctgttcaatgacttgattcacatgtgaccttttagtagtttgcaaacaataataacagaagttgcaattcataattcagagaaatgaccatgaagccggtgtttccctgcttgatttctatgttcttggattctcacacaaaagaggagttacctagaggggatcagtagccatccctgttgcacacaaccctcacttctgagtggtttccactaggttccacttaaggtgctgtcttttcttaacttgcaaggaattgcttagcttcccaataatcattgtcaaactgggagcaaagttggtcagctgtatctctcacctcctcctttcttcataagatagtagaatctgtggcttacttgtaggttttacttagtgcttcagtactgttggctgttttggccttttgctgaatttgcacaacaacataaagcacttctttttaatgtttaaaaaaaattccaaggctccatgaccaagtatgtgactcactaagaaacccttgctataaaaggcttttgatgaaatcttagcaaagctaaattatctctaacttagagattcctatgaactcaggtcattttcatagcctgtttattttgtaggtctaatttagttctcaggaaaattaaactcatgctatatgactgtatcgttaaaggtacttgagcgtatgttgctgtaggtggtatgacactcaaatgcataagaacttgaagggatttattcttaaccactagaatatgaagagccctttttacctgagaagagtgaaattatgtcagaccttttaatttgatatcactgagtaaaaggtatgttcctatagccataggaatatgtctgcttcctttttttcatgttgagaaaacagtcaaatttaaccatttggagtttatttgaattcttggaaagagcaatattcaaaaccttttcaaaaataagatattctggactactggatggatgttttgttttcagttcatttttcatcagtagagatggtgatttcggttttgtagtatccttgtttctatgtctgtgcatgttaacattggatgtatttgtatatacttaattaatatacagactgtgtgtcattctggcttgattagaagctaagtcagttactgagtaacattttgcaactttattccagcaagtactaaatcggccaaaaaaagttttgtttttgataccattaaaattttattctctattttgtgtacatgctatgatgattctcccaagtactgattagatcactgaactttagttagcttcccaagaattattaaccgttagaataagacttagattaaatcttgctttatttttactttaaaattagtcttgctaaggccttatgttagttcatactttcttttcaacagtaatcttgtttataatccagtgtttctgtgttttaggacataatttaaaaatatactggattttggccaggtgtggcagctcatgcctgtaatcccagcactttgggaggccaagcagggaagattacttgagcccaagagttgaaaaccaacctggacaacatggtgaaacccagactctacaaaaaatgcaaagattagctgggtgtgttggcagacgcctgtggtcccagctactcaggaggctgaggtcggtaggactgcatgattccgggaggtcaaggcttcagtgagccaagattgcaccactgcactccaccttgggtgacagagctggacactgtatccaaaaaaaaaaagtatgtatttacacacacacacacacacacacacacacactggatgttctaataactgctcttttgtatgtgaagcaagccttaggaatcttacgttttacttctttctgttaaacggcatctgttatcttttgaagtactcacactgaacatgcttcatgctgaatactcacgctaaaggcctcagacatgtaaacattcatccttagtctcttttttctctgttttctcattgggagctgaagcatcctagtctgcagaaaatttaacacaccatattccagctttgcatcacctagacagtagacaaaaggaaaagaaattgtcagtaccgtatcacagctagtgcctctgttcattccagtgatagtacatgagccccttccagtggagtcagatcaagccaaaagattttcctgtaaagtctgtagtagaagacaaatttctttttgatccattagattggtatttctatcttctcagctaattaatgagtaaggcatgtggacaatcgagaaaactaatttgagtgtatgtattaaaattgctcttctaaaaacacgtaaaatattaaagatcaaggcagagcaaaaaagaacgtagcaatcatatactagaaaaagaaactaagttttgctaaactatgtttgggttagttgacctctgtagctattctaaagttttctatcccttatctgtattccgctgtcattcctgtgcctcaagcctctgccaggaatctgatggtactctggctgaacttaaaacataagaatctcaaaggtctcatttagtaaatgttagtgctaagttggtgacagcctgggttatatgctttctctttcagtcttcagtagatgcttgtgatagttttcaaagaactgtaaaatttccgggtctgtacagatttttagagatcatttaatccaaccctgttacagtatcatgtcagcatttaaatagcagtaaaggtcatgaaaagtgaagtgaaaggcagcaaactccatgaaaaactaaatacagtgacaactgagggaagtggtaaagtaaaaaaatattaatgatggaattttaaagctggaaggggcatagagaccattcttttctcaataatattctgcaaatattaacaggtgtcatgtcagaaactaagtttaggaattgacaaattcaaaaatctcccttacagcagggctttgagagcctttgctacactaaatgctctgtgaatctatctggtgctgcgtgggggcctccaaatttatttaaccatattttttaatttggcatttacctagagaaatgctatcacatttaattccttcgttttacagtttcacctcctcatgtgattccttcattttgtaagtgaccgattccaccctatacaatcacatggccaatgaatgacagtcagaattagaacctagtcccctgattcccaaccatgtcttataccagactgtttcccctaatcgataggaaactactcctaaagggcagaaactgcctctctttgtttttgtcccccaacctcccctccacacatacacctctgtaatctgatgctttaagctcagattaaagcatcagcaagctttaatctgacacatggccgtaggcttgagttagcagttggtcccttctttcttccagactctcataagagtaccctatcaggtctggacagacttccgtttatgcctcagattcaaaatacccaggaaaaagaagaagaaatacaaaacaacaaaaagaaaatcaagaaaaaaataagatatccaggaaatattttgttagttttctattctggtgacaaatgcaaacttaaggaaacaagttgcacagtgttaactaatgtttaacattcctttccatagtgtttatgtgggccttttatcaattcatgacaaataggtcacctccaaaactgttccaacataggttaactcagaaatttaaaatttaagtactatcctttttggagactatgagaagagtttttactattgtgttttgttttgttttttggtgtgtgtgtgtatgtatgtgcattccccaaaaatagtccattggcagattgttagggtgaacttttcctctgcctttgtgtttgtataagggcgggtgcatgcttagtattgtctgctaccttatggtttttcatttatatgtaacatggtacaacttgcttcctccccacccaacagttgtcaggatatgttggggaatattctttaggaagattacatctggtcttctgttggagtaagatgaaaaacaagtatgttaacacttgacctttactgctttctcctggaagacattgaatatctaggagcgtcactcataccttcccttgactgtacccacacccactgcggtccctgcttgatctctcaaactttttgtttccctttgagcttcatgacaaaaaattataaccattttctggttctaaggctgccataatcccaactttgccagtaagaagatggagaatttttgctcatagggacatttctcagaagcagctggcaccataactctcctgagacccttgtttcctttctttcagctcctatgacttcttatgttcactctctctaacactactaaatgttgtcaatgactgcaatcacaactctttgaaggcaggctttttcttttcctttgttacctcttattttcaatagccaaagcaggttagttttctcagaatcttcagttttactgaagcatgcattatttctgttttctctctgcagtgatcagtttggatgacagaaactttaaacttttattctggcattgtccagttctgattttctcagctggaactggtgcatgcacatttaataatttcaaagaagtgagaggtaaatgttttctcctgcattatactgtgtttctctagctgaattgatccgtttgttatcttgctcacccgaaacaagtagttgtgccctacagtgagcaacctcagactaggctgttctaagcattctggagaaaataatcctcatcatacagtttgtggtaactcttccaaaaagtttatgaaaattgaaagatctccctatgcatcagctgtggctgccacattccgttctactaggaaggctagtggccacaactccctctagaacatcagaggataaagtacacttatatattagaaaagacaggcatattctgattatggttcattcacaatttctcagtccagggttcagtcagtgaccatagctctgaggtcttcaggctaactccaagaacccgtgccagatagaaacctactcctactacctttccactcaccttcccattcccccacctttgctaccaaagtgactttaaaagtcgagttttaggtgtttgtttttttaacagtctaggaatttcagtgcaattccgtgaggtggtgctgaccttagatgagaaatacgtggccaggctataaggactacatgtagaattgagatgggacagtgtacgtatggactgtgaggggaaagaaaaggtaaatgtgtgaaaggaaagagattggtgcatggtcatgacagtctgacagcttagacatttcagaggcattgtttatgagaaaggggatagggacacataggtctgatgacaaccaaagccctttgatgatgccatctgtcactcaaggctccccacagcctgcccaacctgactctcctgcctgcttctccactgcctaccttcaacaatcaaactatatttttgttacagcaaactacattccatttgcctttaaatgcttgcattttagttattgtactggctacctgtttttgtctgcccagcatcctgtttcccctccttttggatcctctcctagccaattccatgtcttgaatcctttcctgctccttgttaaaattattttctgctttgtgtgagtccctgtaagcaccagcagctcaatcagcactgtctgtaccatggtcaagagatgagtacatgactcaggtcagaccttatttcccaccccataagccacaatgattagacaagaaataggcacagaaccctaactagatagggcagaagccttccataggattttatttgctggccctgaaatgcaggtagccttctatggctgttaaacacaatccagtggcacatggggtgatatgaggatggagccatccatggcaaaactccaccctttcctgtgacatggattatgtgcatctgccatgaaaaggaagcatacacaagaaatgagccaagagttcctggagaactgaagcaagtatcacctccagatcagttgtacttttatttgcttacactattctgaggtgggtctctgtctcttggatccaaaagagttcaaattaataatcatttgacaaaaaattacctccacattcctaatgaagttgtctttgaagataatgtcttgtgatcccctggttgaagttaattactgcttgtgagcccccattaacaacgtgttcctttccccattgcttgcttgtatcagctttgctgaagatctattggctgtaggtgtgcagctttatttctgtgttctctattgtgttccattggtctacgtgtctgttattgtaccagtgccgtgctgttttggttactgtggtcttatagtttgaagccacatctgtgtgatgctgctggctttgttctttctgctttgggttgctttggctattcaggctctttctttggttccatctgaattttagaatagttgttttctaattctgtgaaaatgttccaacctctgtgaaaaatgaggttggtagtttgataggacagcattgattctgtaaattgctttgggcagtatggccatttttaaactatattgattcttccaatccatgaacatggaatgtttttccattttttggtttcatccctgatttctttctgccatgttttgtagttctccttgtagagatctttcacctccttggttaggtgtatttttaagtatttcagtttttttatggctattgtaaatggtattgggttcttgatttgctctcagcttgaacgttattggtgtatagaaatgctcctaatttttgtgcattgattttgtatcctgaaacttgactaaagttgtttatcagtctaggagcttttggcagagtcttcggggttttctaggtataaaatcatatcagcgaagagagctagtttgatttcttttcccagttggatgccttttatttatttctcttgcctgattgctctaagttgaatgggagcgatgagactgggcatcctcttcttattccagttctcagaaggaatagttccagcttttgctcatccagtatgatgtctgtgggttggttgtagatggctcttattattttgagatatgttcctttgatacctagtctgttgaggggttttatcatgagggatgttggattttatccgtattcaataaatggtgttgggataactggctagccctatgcagaagaatgaaactggaccccccacctttcaccgtatatgaaaattaactcaagatggattaaagatttaaatgtaagacctcaaactgtaaaaatcctagaagaaaacctaggaaatacccttatcaacatcagccttggcaaagaacttttggctaagtccccaaaggcaattgcaacaaaacagaaattggcaagtggggacctaattaaagcactctgcacagcaaaagacactatcaacagagtaaacagacaacatacagaattggagaaaatatttgcaaactagacatccaacaaagatctgacatccagaatcaataaggaacttaacaagcaaaaaacaaccccattaaaaaatgggtgaaggacatgaacagacacttctcaaaagaagacatacaagcaatcaacaaacgtgaaaaaatgctcatcactaatcatcagagaaatgcaaatcaaaaccacaataagataccatctcacaccagttagaatggctattgtaaagaagtctaataacatgccagtaaggtttcagagaaaagagaacatttatacactgttgtgggaatgtaaattagttcagtcactgtggaaagcagtttggagatttctcaaataacttaaaacagatctaccattcaacccagcatatgggtttatttcccaaaaggaaataaatccttctaccaaaaacacatatggtcatcacagtgctattcacagtagcaaagacagatcaacgtggctgcccatcaacagtggactggataaagaaaatgtggtacatataaatcatggagtattaggcagccataaaaagaacaaaatcatgtcctttgcagccagccacatggatacagctggaagccataatctaagcaaattaagaacagaaaaccaagtactgcatgttctaacaaatgggagctaaatattgagtacctcaggatgcaaaggtgggaacaacagacactgcagactggaacactgtgggtgaggagggcagaaggataggttgaaaaactacctattgggtactatgctcactacctgggtgatgggatctgtacctcaaacctcagcatcacacaatatacccttgtaacaaacttgcacatttacccactgtttctaaatgaaaagttgaaatattttttattaaaaaacacaaaagcaatatgtttctc

SEQ ID NO: 5370 - DNA, 5503 bp, Homo sapiens
  source 1..5503: mol_type = unassigned DNA
atgaattacccgggccgcgggtccccacggagccccgagcataacggccgaggcggcggcggcggcgcctgggagctgggctcagacgcgaggccagcgttcggcggcggcgtctgctgcttcgagcacctgcccggcggggacccggacgacggcgacgtgcccctggccctgctgcgcggggaacccgggctgcatttggcgccgggcaccgacgaccacaaccaccacctcgcgctggacccctgcctcagtgacgagaactatgacttcagctccgccgagtcgggctcctcgctgcgctactacagcgagggtgagagcggcggcggcggcagctccttgtcgctgcacccgccgcagcagcctccgctggtcccgacgaactcggggggcggcggcgcgacaggagggtcccccggggaaaggaaacgtacccggcttggcggcccggcggcccggcaccgctatgaggtagtgacggagctgggcccggaggaggtacgctggttctacaaggaggacaagaagacctggaagcccttcatcggctacgactcgctccgcatcgagctcgccttccggaccctgctgcagaccacgggtgcccggccccagggcggggaccgggacggcgaccatgtgtgctcccccacgggcccagcctccagttccggagaagatgacgatgaggaccgcgcctgcggcttctgccagagtacgacggggcacgagccggagatggtggagcttgtgaacatcgagcctgtgtgcgtgcggggcggcctctacgaggtggatgtgacccaaggagagtgctacccggtgtactggaaccaggctgataaaataccagtaatgcgtggacagtggtttattgacggcacttggcagcctctagaagaggaagaaagtaatttaattgagcaagaacatctcaattgttttaggggccagcagatgcaggaaaatttcgatattgaagtgtcaaaatccatagatggaaaagatgctgttcatagtttcaagttgagtcgaaaccatgtggactggcacagtgtggatgaagtatatctttatagtgatgcaacaacatctaaaattgcaagaacagttacccaaaaactgggattttctaaagcatcaagtagtggtaccagacttcatagaggttatgtagaagaagccacattagaagacaagccatcacagactacccatattgtatttgttgtgcatggcattgggcagaaaatggaccaaggaagaattatcaaaaatacagctatgatgagagaagctgcaagaaaaatagaagaaaggcatttttccaaccatgcaacacatgttgaatttctgcctgttgagtggcggtcaaaacttactcttgatggagacactgttgattccattactcctgacaaagtacgaggtttaagggatatgctgaacagcagtgcaatggacataatgtattatactagtccactttatagagatgaactagttaaaggccttcagcaagagctgaatcgattgtattcccttttctgttctcggaatccagactttgaagaaaaagggggtaaagtctcaatagtatcacattccttgggatgtgtaattacttatgacataatgactggctggaatccagttcggctgtatgaacagttgctgcaaaaggaagaagagttgcctgatgaacgatggatgagctatgaagaacgacatcttcttgatgaactctatataactaaacgacggctgaaggaaatagaagaacggcttcacggattgaaagcatcatctatgacacaaacacctgccttaaaatttaaggttgagaatttcttctgtatgggatccccattagcagttttcttggcgttgcgtggcatccgcccaggaaatactggaagtcaagaccatattttgcctagagagatttgtaaccggttactaaatatttttcatcctacagatccagtggcttatagattagaaccattaatactgaaacactacagcaacatttcacctgtccagatccactggtacaatacttcaaatcctttaccttatgaacatatgaagccaagctttctcaacccagctaaagaacctacctcagtttcagagaatgaaggcatttcaaccataccaagccctgtgacctcaccagttttgtcccgccgacactatggagaatctataacaaatataggcaaagcaagcatattaggggctgctagcattggaaagggacttggaggaatgttgttctcaagatttggacgttcatctacaacacagtcatctgaaacatcaaaagactcaatggaagatgagaagaagccagttgcctcaccttctgctaccaccgtagggacacagacccttccacatagcagttctggcttcctcgattctgcatatttcagacttcaagaatcgttctttaatctcccacaacttctttttccggaaaatgtaatgcagaataaagataatgccctcgtggagttggatcacaggattgattttgaactcagagaaggccttgtggagagccgctattggtcagctgtcacgtcgcatactgcctattggtcatccttggatgttgccctttttcttttaaccttcatgtataaacatgagcacgatgatgatgcaaaacccaatttagatccaatctgaactctcttgaaggacatgaatggcctaaaactgattttttttttttccgttaaaatgtgtgtgtcaagatacggagatttcagggttaaagtatatttcagttttctttagggcaacatatatttgaatttaaaagcactttatttaaaaaaaaaagaagttttcagttctgaagaagtcatttacagtttgcatcattttaattatgagtctgacaaaaccttctccagagaatcaagcaagacctggatgtgaagaaggtttgggtaaactgcatgtaaaggctacaaatcacaatctgattcctcccaaatataaaggcatatggaacataatgtattaaccaaagtatgttataaatcaaaaatggtcaaggttcagcatattctatatgaagatcacaaggtggtatcgttttagatttctatgaaggctttcatttgtacatccctttgaaaaaatataacagatttaaaatgttttgaatttaacttgtttagaaaaactaatgcttaaaacaatatttgaactactgtatttataatttattacctctaattgctttatttcagtgtatgagacattactgttttaatgtttgctttgaacataatttaagaaccagatttattttctatagtgataaacccttttttctcagaactccatctttgtactcttcagatgaatatatagacactgtggcatacattttttttcattaaaaacttatggcttcatacaacactagttcaattttttaaataaactttttattatgttacatgtacttcagagaaagctaaagtttctctaaacttgacacggagtactccataatgggtacatttcattagctttattagaaaactagtaaatgcttttgaataggtagtatgacagctattttaaatgtataaacatttgtgtgccaaacaacatatatgaagggatgtgatgccactaactagtgcacattgtttctcaatgtgccattgagacacaaggcacagtaagtcaggattctgaggcattggaagggttttcttcagctgtaattgtttccacagtgcttttcatctgaggggctcaaagtttaagagtgcattcaataacccatgtactagcttcttgaggtaagtaaataaatcttgttctcatgttacatgttaatacaccaaggcaccaaaacatttaaagtgccatgaattagattacatcagaaatcagaaaagcttggattgagctagtcaccgtggttcacgcctgtaatcccaacacttcgggaggccaagatgggaggatctcttgagcccaggatttcaagaccagcttgggcaacatagtgagaccctcttctctgcaaaaactgacaaaaattagccacttgtagtggtgtacacctgtagtcccagctactcaagaggctgaggtgggaggatcacccgagcccagaagttcaaagctgcagtgagctctgatcacaccaatgcactccagcctgggtgacagagccagaccctgtctctaaaaaacaaaaaagaaaagcttgggttgaagccaggccatattcttttatatgctgttcaatgacttgattcacatgtgaccttttagtagtttgcaaacaataataacagaagttgcaattcataattcagagaaatgaccatgaagccggtgtttccctgcttgatttctatgttcttggattctcacacaaaagaggagttacctagaggggatcagtagccatccctgttgcacacaaccctcacttctgagtggtttccactaggttccacttaaggtgctgtcttttcttaacttgcaaggaattgcttagcttcccaataatcattgtcaaactgggagcaaagttggtcagctgtatctctcacctcctcctttcttcataagatagtagaatctgtggcttacttgtaggttttacttagtgcttcagtactgttggctgttttggccttttgctgaatttgcacaacaacataaagcacttctttttaatgtttaaaaaaaattccaaggctccatgaccaagtatgtgactcactaagaaacccttgctataaaaggcttttgatgaaatcttagcaaagctaaattatctctaacttagagattcctatgaactcaggtcattttcatagcctgtttattttgtaggtctaatttagttctcaggaaaattaaactcatgctatatgactgtatcgttaaaggtacttgagcgtatgttgctgtaggtggtatgacactcaaatgcataagaacttgaagggatttattcttaaccactagaatatgaagagccctttttacctgagaagagtgaaattatgtcagaccttttaatttgatatcactgagtaaaaggtatgttcctatagccataggaatatgtctgcttcctttttttcatgttgagaaaacagtcaaatttaaccatttggagtttatttgaattcttggaaagagcaatattcaaaaccttttcaaaaataagatattctggactactggatggatgttttgttttcagttcatttttcatcagtagagatggtgatttcggttttgtagtatccttgtttctatgtctgtgcatgttaacattggatgtatttgtatatacttaattaatatacagactgtgtgtcattctggcttgattagaagctaagtcagttactgagtaacattttgcaactttattccagcaagtactaaatcggccaaaaaaagttttgtttttgataccattaaaattttattctct

SEQ ID NO: 5371 - DNA, 5603 bp, Homo sapiens
  source 1..5603: mol_type = unassigned DNA
aacgcagctgcggcggctgcgggtctcgtgggggcggagcggtcgccgctgccgccgcagctcgggtcgggatttgaaagattagaaacttcgggtggagagggcggcggcgttgaatgtgtggcggaagcgctgggggtcacggctccgcgcgccgccggacagccggcggcgtctccacagcatgaattacccgggccgcgggtccccacggagccccgagcataacggccgaggcggcggcggcggcgcctgggagctgggctcagacgcgaggccagcgttcggcggcggcgtctgctgcttcgagcacctgcccggcggggacccggacgacggcgacgtgcccctggccctgctgcgcggggaacccgggctgcatttggcgccgggcaccgacgaccacaaccaccacctcgcgctggacccctgcctcagtgacgagaactatgacttcagctccgccgagtcgggctcctcgctgcgctactacagcgagggtgagagcggcggcggcggcagctccttgtcgctgcacccgccgcagcagcctccgctggtcccgacgaactcggggggcggcggcgcgacaggagggtcccccggggaaaggaaacgtacccggcttggcggcccggcggcccggcaccgctatgaggtagtgacggagctgggcccggaggaggtacgctggttctacaaggaggacaagaagacctggaagcccttcatcggctacgactcgctccgcatcgagctcgccttccggaccctgctgcagaccacgggtgcccggccccagggcggggaccgggacggcgaccatgtgtgctcccccacgggcccagcctccagttccggagaagatgacgatgaggaccgcgcctgcggcttctgccagagtacgacggggcacgagccggagatggtggagcttgtgaacatcgagcctgtgtgcgtgcggggcggcctctacgaggtggatgtgacccaaggagagtgctacccggtgtactggaaccaggctgataaaataccagtaatgcgtggacagtggtttattgacggcacttggcagcctctagaagaggaagaaagtaatttaattgagcaagaacatctcaattgttttaggggccagcagatgcaggaaaatttcgatattgaagtgtcaaaatccatagatggaaaagatgctgttcatagtttcaagttgagtcgaaaccatgtggactggcacagtgtggatgaagtatatctttatagtgatgcaacaacatctaaaattgcaagaacagttacccaaaaactgggattttctaaagcatcaagtagtggtaccagacttcatagaggttatgtagaagaagccacattagaagacaagccatcacagactacccatattgtatttgttgtgcatggcattgggcagaaaatggaccaaggaagaattatcaaaaatacagctatgatgagagaagctgcaagaaaaatagaagaaaggcatttttccaaccatgcaacacatgttgaatttctgcctgttgagtggcggtcaaaacttactcttgatggagacactgttgattccattactcctgacaaagtacgaggtttaagggatatgctgaacagcagtgcaatggacataatgtattatactagtccactttatagagatgaactagttaaaggccttcagcaagagctgaatcgattgtattcccttttctgttctcggaatccagactttgaagaaaaagggggtaaagtctcaatagtatcacattccttgggatgtgtaattacttatgacataatgactggctggaatccagttcggctgtatgaacagttgctgcaaaaggaagaagagttgcctgatgaacgatggatgagctatgaagaacgacatcttcttgatgaactctatataactaaacgacggctgaaggaaatagaagaacggcttcacggattgaaagcatcatctatgacacaaacacctgccttaaaatttaaggttgagaatttcttctgtatgggatccccattagcagttttcttggcgttgcgtggcatccgcccaggaaatactggaagtcaagaccatattttgcctagagagatttgtaaccggttactaaatatttttcatcctacagatccagtggcttatagattagaaccattaatactgaaacactacagcaacatttcacctgtccagatccactggtacaatacttcaaatcctttaccttatgaacatatgaagccaagctttctcaacccagctaaagaacctacctcagtttcagagaatgaaggcatttcaaccataccaagccctgtgacctcaccagttttgtcccgccgacactatggagaatctataacaaatataggcaaagcaagcatattaggggctgctagcattggaaagggacttggaggaatgttgttctcaagatttggacgttcatctacaacacagtcatctgaaacatcaaaagactcaatggaagatgagaagaagccagttgcctcaccttctgctaccaccgtagggacacagacccttccacatagcagttctggcttcctcgattctgcattggagttggatcacaggattgattttgaactcagagaaggccttgtggagagccgctattggtcagctgtcacgtcgcatactgcctattggtcatccttggatgttgccctttttcttttaaccttcatgtataaacatgagcacgatgatgatgcaaaacccaatttagatccaatctgaactctcttgaaggacatgaatggcctaaaactgattttttttttttccgttaaaatgtgtgtgtcaagatacggagatttcagggttaaagtatatttcagttttctttagggcaacatatatttgaatttaaaagcactttatttaaaaaaaaaagaagttttcagttctgaagaagtcatttacagtttgcatcattttaattatgagtctgacaaaaccttctccagagaatcaagcaagacctggatgtgaagaaggtttgggtaaactgcatgtaaaggctacaaatcacaatctgattcctcccaaatataaaggcatatggaacataatgtattaaccaaagtatgttataaatcaaaaatggtcaaggttcagcatattctatatgaagatcacaaggtggtatcgttttagatttctatgaaggctttcatttgtacatccctttgaaaaaatataacagatttaaaatgttttgaatttaacttgtttagaaaaactaatgcttaaaacaatatttgaactactgtatttataatttattacctctaattgctttatttcagtgtatgagacattactgttttaatgtttgctttgaacataatttaagaaccagatttattttctatagtgataaacccttttttctcagaactccatctttgtactcttcagatgaatatatagacactgtggcatacattttttttcattaaaaacttatggcttcatacaacactagttcaattttttaaataaactttttattatgttacatgtacttcagagaaagctaaagtttctctaaacttgacacggagtactccataatgggtacatttcattagctttattagaaaactagtaaatgcttttgaataggtagtatgacagctattttaaatgtataaacatttgtgtgccaaacaacatatatgaagggatgtgatgccactaactagtgcacattgtttctcaatgtgccattgagacacaaggcacagtaagtcaggattctgaggcattggaagggttttcttcagctgtaattgtttccacagtgcttttcatctgaggggctcaaagtttaagagtgcattcaataacccatgtactagcttcttgaggtaagtaaataaatcttgttctcatgttacatgttaatacaccaaggcaccaaaacatttaaagtgccatgaattagattacatcagaaatcagaaaagcttggattgagctagtcaccgtggttcacgcctgtaatcccaacacttcgggaggccaagatgggaggatctcttgagcccaggatttcaagaccagcttgggcaacatagtgagaccctcttctctgcaaaaactgacaaaaattagccacttgtagtggtgtacacctgtagtcccagctactcaagaggctgaggtgggaggatcacccgagcccagaagttcaaagctgcagtgagctctgatcacaccaatgcactccagcctgggtgacagagccagaccctgtctctaaaaaacaaaaaagaaaagcttgggttgaagccaggccatattcttttatatgctgttcaatgacttgattcacatgtgaccttttagtagtttgcaaacaataataacagaagttgcaattcataattcagagaaatgaccatgaagccggtgtttccctgcttgatttctatgttcttggattctcacacaaaagaggagttacctagaggggatcagtagccatccctgttgcacacaaccctcacttctgagtggtttccactaggttccacttaaggtgctgtcttttcttaacttgcaaggaattgcttagcttcccaataatcattgtcaaactgggagcaaagttggtcagctgtatctctcacctcctcctttcttcataagatagtagaatctgtggcttacttgtaggttttacttagtgcttcagtactgttggctgttttggccttttgctgaatttgcacaacaacataaagcacttctttttaatgtttaaaaaaaattccaaggctccatgaccaagtatgtgactcactaagaaacccttgctataaaaggcttttgatgaaatcttagcaaagctaaattatctctaacttagagattcctatgaactcaggtcattttcatagcctgtttattttgtaggtctaatttagttctcaggaaaattaaactcatgctatatgactgtatcgttaaaggtacttgagcgtatgttgctgtaggtggtatgacactcaaatgcataagaacttgaagggatttattcttaaccactagaatatgaagagccctttttacctgagaagagtgaaattatgtcagaccttttaatttgatatcactgagtaaaaggtatgttcctatagccataggaatatgtctgcttcctttttttcatgttgagaaaacagtcaaatttaaccatttggagtttatttgaattcttggaaagagcaatattcaaaaccttttcaaaaataagatattctggactactggatggatgttttgttttcagttcatttttcatcagtagagatggtgatttcggttttgtagtatccttgtttctatgtctgtgcatgttaacattggatgtatttgtatatacttaattaatatacagactgtgtgtcattctggcttgattagaagctaagtcagttactgagtaacattttgcaactttattccagcaagtactaaatcggccaaaaaaagttttgtttttgataccattaaaattttattctct

SEQ ID NO: 5372 - DNA, 3951 bp, Homo sapiens
  source 1..3951: mol_type = unassigned DNA
gccattccctgtagcaggattaatcatttataaaataaagtccctatccattacttgcttcacataactttttttatgtgaaatagtgttttattgaattaagttccatatctgagttttttagataacatattgattttaaaatctgagtgttataattcttcaaacaaataaagtttgtcttggagaccttcaaattagcttttcctttttgcaatagctgttcatagtttcaagttgagtcgaaaccatgtggactggcacagtgtggatgaagtatatctttatagtgatgcaacaacatctaaaattgcaagaacagttacccaaaaactgggattttctaaaggtaattgttaaatattactagagcttatcaaaattttgggaatctgactttctctcatattcaaaatagacaattcatattctgtttttagtatgttttaagtatattaaatttagtgacagattcctttttaaatgaaacttttattaagttgattgagttgacatgtgttcatcaaggaataattattatatatttagaatgatttgacaaaattaataaatatcttttatacttctaaaagcacaaaagctgttaaacctaaaatgtggcagttgaaatatagtgtcaaggaagatgaggactgaaagttttccattgtatttagtgatctggaggtcactggtgacttagatggattgatggggcagaaaccagatcggcatgggttgaagcgtaagtagaaggtgaagcaatggaagcaatgagaatagacaactcctttttttttttcttcttttatttttaagatggggtctcactctgtctcccaggctggagtacagtggtgtgatcatagcacatcataacctggaactaattcctgggctcaagcaatcctccaaactcagcctcctcagtaactaggattacagggatgcatcactatgcccagctaattttttttatttttttgtagaaacggagtctccttgtgttgtccaggctggtctcaaatttttgggcacaagccatcctctcgccttggtctcccaaagctctggggttacaggcttgaaatacagtgcctggcctgacaactgtttagagaagtttgactaaatgaaagaaaagagagaatgatacctgggaaagatgtgagagcattatcaaaaaataaatgtaaaaagaattttaaagtttgataaaatttttatatcctattttaaaattttaatttcatcaataagtgtgctttgaatatctttttatgtttattagttatatttattttgaattaccttccataactttaacttattttgctatttgaatggttgtctttactttttaattagtaagctctctctgtatacttaagtaattatgtgttatattttgcatatttttttccagtttgccatttcttttttcctgatattttcttattataatatagaagctttaaatttttatatattcagtttgtccttctttccttccatttctttctctttatggtttctggctttggtgttgtgtccagttcactttatatcacagctgatcaatatataccttcttacagtttttatttcctcccccacagccagtgaaattttttcataatattccttttacttcttttttttcttttaacatattgtggaaatgctatttctcagattaaatagtaaacttagaattataatttttctacagcatcaagtagtggtaccagacttcatagaggttatgtagaagaagccacattagaagacaagccatcacagactacccatattgtatttgttgtgcatggcattgggcagaaaatggaccaaggaagaattatcaaaaatacagctatgatgagagaagctgcaagaaaaatagaagaaaggcatttttccaaccatgcaacacatgttgaatttctgcctgttgagtggcggtcaaaacttactcttgatggagacactgttgattccattactcctgacaaagtacgaggtttaagggatatgctgaacagcagtgcaatggacataatgtattatactagtccactttatagagatgaactagttaaaggccttcagcaagagctgaatcgattgtattcccttttctgttctcggaatccagactttgaagaaaaagggggtaaagtctcaatagtatcacattccttgggatgtgtaattacttatgacataatgactggctggaatccagttcggctgtatgaacagttgctgcaaaaggaagaagagttgcctgatgaacgatggatgagctatgaagaacgacatcttcttgatgaactctatataactaaacgacggctgaaggaaatagaagaacggcttcacggattgaaagcatcatctatgacacaaacacctgccttaaaatttaaggttgagaatttcttctgtatgggatccccattagcagttttcttggcgttgcgtggcatccgcccaggaaatactggaagtcaagaccatattttgcctagagagatttgtaaccggttactaaatatttttcatcctacagatccagtggcttatagattagaaccattaatactgaaacactacagcaacatttcacctgtccagatccactggtacaatacttcaaatcctttaccttatgaacatatgaagccaagctttctcaacccagctaaagaacctacctcagtttcagagaatgaaggcatttcaaccataccaagccctgtgacctcaccagttttgtcccgccgacactatggagaatctataacaaatataggcaaagcaagcatattaggggctgctagcattggaaagggacttggaggaatgttgttctcaagatttggacgttcatctacaacacagtcatctgaaacatcaaaagactcaatggaagatgagaagaagccagttgcctcaccttctgctaccaccgtagggacacagacccttccacatagcagttctggcttcctcgattctgcattggagttggatcacaggattgattttgaactcagagaaggccttgtggagagccgctattggtcagctgtcacgtcgcatactgcctattggtcatccttggatgttgccctttttcttttaaccttcatgtataaacatgagcacgatgatgatgcaaaacccaatttagatccaatctgaactctcttgaaggacatgaatggcctaaaactgattttttttttttccgttaaaatgtgtgtgtcaagatacggagatttcagggttaaagtatatttcagttttctttagggcaacatatatttgaatttaaaagcactttatttaaaaaaaaaagaagttttcagttctgaagaagtcatttacagtttgcatcattttaattatgagtctgacaaaaccttctccagagaatcaagcaagacctggatgtgaagaaggtttgggtaaactgcatgtaaaggctacaaatcacaatctgattcctcccaaatataaaggcatatggaacataatgtattaaccaaagtatgttataaatcaaaaatggtcaaggttcagcatattctatatgaagatcacaaggtggtatcgttttagatttctatgaaggctttcatttgtacatccctttgaaaaaatataacagatttaaaatgttttgaatttaacttgtttagaaaaactaatgcttaaaacaatatttgaactactgtatttataatttattacctctaattgctttatttcagtgtatgagacattactgttttaatgtttgctttgaacataatttaagaaccagatttattttctatagtgataaacccttttttctcagaactccatctttgtactcttcagatgaatatatagacactgtggcatacattttttttcattaaaaacttatggcttcat

SEQ ID NO: 5373 - DNA, 566 bp, Homo sapiens
  source 1..566: mol_type = unassigned DNA
gagcaagaagagcagggtagggtttaaccccctagaaaaagggtaatgaaaacgtatgtatagaatctacaggctctgaggaaatatcttcctttctttgacttaaaaaacagaattgtaactaaagagtgttggactaggaaaacattatgaagtggcatttgaaagtgaagtcttaaaaattataactttgtggtcttcaccaatattaacacattttccaactgtttttcatcttctttttcctttgtaattcatcttgactcatcttcattgtgcttgagcattccagtttcttgttctatttttgtcttcccgtctactgtgtcagaatgtactacaaatctaatacaaatgtcccatggaatacaaaagattaagacatttactaactcaccagtccacatggatttcagctatttctgacttgttattgattagcttattgtaatttaaattttaaaaatgcagtccaggccgggtgcggtggtgcacacttgtaatcccagcactttgggaggctgaggtgggtggatcacaaggtcaggagtttcaagaccagcctg

SEQ ID NO: 5374 - DNA, 2722 bp, Homo sapiens
  source 1..2722: mol_type = unassigned DNA
caggattaatgtgagggatagtgggccatcatctgcgtctttatactttagtaagctagcaagcatctaatatttatgaaattataaatacgtgtgtgtatataatctcataccccttcttaggctgaaggaaatagaagaacggcttcacggattgaaagcatcatctatgacacaaacacctgccttaaaatttaaggttgagaatttcttctgtatgggatccccattagcagttttcttggcgttgcgtggcatccgcccaggaaatactggaagtcaagaccatattttgcctagagagatttgtaaccggttactaaatatttttcatcctacagatccagtggcttatagattagaaccattaatactgaaacactacagcaacatttcacctgtccagatccactggtacaatacttcaaatcctttaccttatgaacatatgaagccaagctttctcaacccagctaaagaacctacctcagtttcagagaatgaaggcatttcaaccataccaagccctgtgacctcaccagttttgtcccgccgacactatggagaatctataacaaatataggcaaagcaagcatattaggggctgctagcattggaaagggacttggaggaatgttgttctcaagatttggacgttcatctacaacacagtcatctgaaacatcaaaagactcaatggaagatgagaagaagccagttgcctcaccttctgctaccaccgtagggacacagacccttccacatagcagttctggcttcctcgattctgcatgttagttcatacattatttccttaagttgatactgtatctttttaaaacttggggagggcagggaggtataaaatattaatactagctagtcaactctaagatctaaagtgtgccttaactttgaaagaaaaaaatgctttccttctgcttatatttttaagaataatttccaggaaaatgcagttttactttctgcattgatgaattaatagaatattagtaattagggccttgtggcacaaggtcttaaccatcaagcataaaacaaatctctttagggtaagtaccccctgaagtttataaagtagatttttactaatgtgatcttctcagtctcaaaaatcgtgtaattattgctttagatctatgctgtatctggtcttgagactttaaaaactgctataccaaagtcatcctacttctattcaaagcttagaaattttattggatctgctgaatggcttccaattctatcccagctacctagtgtaaagcagatattgaaaaaatgagtaaataaatggatagttatgttggacttagcattatatggatctttaagctttctccggtggacttagaaagtttgaaatgttgagtagttgtgaaacacgaatacacttagtatatatttacttccaagagtctgaacttgaacattatttttaggtgtctagtaaaataaaactaaaacgtcaagtcctattttttcattgacacctataatgaaatataaattctgaaactagctactccttttctgtaactatagcagggagaaaacttttctttctctagaaatttttaaacagattttatttgttacttagagtattgtgttcttactgtgtctgctactctaaattgtaaaatgatggcattcattgccatccatccttagaaagttcaggtgtgacactcctagaggctgaataattcttccacagtcaactccactccaggatgaattattaatagggttgaacattcctacttgggccaacagcatttttaatttaattatatctgtgccagactctggacactgaaaattttataattgcaagtctggaaaattcttttttagactttgatatttgcattaaatatattttaccttctataagagttctcatactatttctgacttgtttccttttctacttaatatcaaaaatgtgattgtgaaaatacaaaattctgtcgtgacatgcagatgtcaagaaaactctaactgctgaagaaaattaatttcaaagaattttgtaaggtagcaggtaaaaagtcatggttctctgtaatgtcattaatgtgcaacagtagtgctagtaaacatcagagtgagggagggagcaagaagagcagggtagggtttaaccccctagaaaaagggtaatgaaaacgtatgtatagaatctacaggctctgagggaataaaacttttttaggttttttttttctgtttaacatagtaatttcaaaataatagagaaacccccagttttttcttccagaacagcagttagtagaggtgcatagctgtattgcatctttttattttgagagcttaacaaaatacatactatgtcattcttacacataaattctttgatagtccgaatggtaaaatagtcaacaagactcaatatgaggtaattatgagtcttacacatattcacatattacacatacttatatattatacatattacacatattcacctctagatatagatataactattaaaattggactattataataagattctgccttttaaatcctattcccaagatttgctttactaattatttggcttgcttcaataatgtaatctgtgtaatcgtcataatttctcgtcgttaagtgctgtcttggctatatcgtgcaaatcataaaacttttcttcattaaatcttctttctg

SEQ ID NO: 5375 - DNA, 558 bp, Homo sapiens
  source 1..558: mol_type = unassigned DNA
atcagtagaagaaactgaaattaagttgctctgtcaaagctattgagggcttgaggtatatatgccttagacccagtgaagagtcagccacatcacccgggaaagcagttaattatcaaaacacatagaagctgtatattagaggttaaaattatgatagttaagtaactcaatggtttaaaaagttgccattccctgtagcaggattaatcatttataaaataaagtccctatccattacttgcttcacataactttttttatgtgaaatagtgttttattgaattaagttccatatctgagttttttagataacatattgattttaaaatctgagtgttataattcttcaaacaaataaagtttgtcttggagaccttcaaattagcttttcctttttgcaatagctgttcatagtttcaagttgagtcgaaaccatgtggactggcacagtgtggatgaagtatatctttatagtgatgcaacaacatctaaaattgcaagaacagttacccaaaaactgggattttctaaagcatcaagtagtggtaccagact

SEQ ID NO: 5376 - DNA, 599 bp, Homo sapiens
  source 1..599: mol_type = unassigned DNA
aagtatgtgagggatggtgtttggtcagggacaggatggagattgtgaagggagcacctgcacatgaatggcgcatttgggacaatagctggaaaagagacagggtagatatgcagtgctaaggagtttggcctttatcctgcgagtaatgaggaaccaaacagtagaaggttctttatacttacatgtgattaatgacaatgcaaaagttgagctggagagttggaagcagaatatcagtagaatgctagtgtcataaatcaggtgaaaactggtgggagcctacagaagttaacctaaagaggctgataaaataccagtaatgcgtggacagtggtttattgacggcacttggcagcctctagaagaggaagaaagtaatttaattgagcaagaacatctcaattgttttaggggccagcagatgcaggaaaatttcgatattgaagtgtcaaaatccatagatggaaaagatgctgttcatagtttcaagttgagtcgaaaccatgtggactggcacagtgtggatgaagtatatctttatagtgatgcaacaacatctaaaattgcaagaacagttacccaaaaactgggatttt

SEQ ID NO: 5377 - DNA, 698 bp, Homo sapiens
  source 1..698: mol_type = unassigned DNA
cgcctgcggcttctgccagagtacgacggggcacgagccggagatggtggagcttgtgaacatcgagcctgtgtgcgtgcggggcggcctctacgaggtggatgtgacccaaggagagtgctacccggtgtactggaaccaggctgataaaataccagtaatgcgtggacagtggtttattgacggcacttggcagcctctagaagaggaagaaagtaatttaattgagcaagaacatctcaattgttttaggggccagcagatgcaggaaaatttcgatattgaagtgtcaaaatccatagatggaaaagatggtaagatcaattgatacatttaatatattctacaaaccaagtaagttgttgataaagtttagagtggtttgtaaatttgacataataattcaggaggtttagaattagaaaatttgatttttttaaacatttgattattctagaatttaaaaattaactactataaatatctgaactatctcaatttttattttaatatgtatggtaagtgtcatgatattaacacagtttactataaatgtacagattgttacaatgcactccctatttaatcttttttagtaattttttagttatcaaaggaaattgaacttaacccaaaaattccttgttgttatatcaagacaagtttcattaatatttcaatgttcttttcctgaagtt

SEQ ID NO: 5378 - DNA, 12339 bp, Homo sapiens
  source 1..12339: mol_type = unassigned DNA
atgaattacccgggccgcgggtccccacggagccccgagcataacggccgaggcggcggcggcggcgcctgggagctgggctcagacgcgaggccagcgttcggcggcggcgtctgctgcttcgagcacctgcccggcggggacccggacgacggcgacgtgcccctggccctgctgcgcggggaacccgggctgcatttggcgccgggcaccgacgaccacaaccaccacctcgcgctggacccctgcctcagtgacgagaactatgacttcagctccgccgagtcgggctcctcgctgcgctactacagcgagggtgagagcggcggcggcggcagctccttgtcgctgcacccgccgcagcagcctccgctggtcccgacgaactcggggggcggcctctacgaggtggatgtgacccaaggagagtgctacccggtgtactggaaccaggctgataaaataccagtaatgcgtggacagtggtttattgacggcacttggcagcctctagaagaggaagaaagtaatttaattgagcaagaacatctcaattgttttaggggccagcagatgcaggaaaatttcgatattgaagtgtcaaaatccatagatggaaaagatgctgttcatagtttcaagttgagtcgaaaccatgtggactggcacagtgtggatgaagtatatctttatagtgatgcaacaacatctaaaattgcaagaacagttacccaaaaactgggattttctaaagcatcaagtagtggtaccagacttcatagaggttatgtagaagaagccacattagaagacaagccatcacagactacccatattgtatttgttgtgcatggcattgggcagaaaatggaccaaggaagaattatcaaaaatacagctatgatgagagaagctgcaagaaaaatagaagaaaggcatttttccaaccatgcaacacatgttgaatttctgcctgttgagtggcggtcaaaacttactcttgatggagacactgttgattccattactcctgacaaagtacgaggtttaagggatatgctgaacagcagtgcaatggacataatgtattatactagtccactttatagagatgaactagttaaaggccttcagcaagagctgaatcgattgtattcccttttctgttctcggaatccagactttgaagaaaaagggggtaaagtctcaatagtatcacattccttgggatgtgtaattacttatgacataatgactggctggaatccagttcggctgtatgaacagttgctgcaaaaggaagaagagttgcctgatgaacgatggatgagctatgaagaacgacatcttcttgatgaactctatataactaaacgacggctgaaggaaatagaagaacggcttcacggattgaaagcatcatctatgacacaaacacctgccttaaaatttaaggttgagaatttcttctgtatgggatccccattagcagttttcttggcgttgcgtggcatccgcccaggaaatactggaagtcaagaccatattttgcctagagagatttgtaaccggttactaaatatttttcatcctacagatccagtggcttatagattagaaccattaatactgaaacactacagcaacatttcacctgtccagatccactggtacaatacttcaaatcctttaccttatgaacatatgaagccaagctttctcaacccagctaaagaacctacctcagtttcagagaatgaaggcatttcaaccataccaagccctgtgacctcaccagttttgtcccgccgacactatggagaatctataacaaatataggcaaagcaagcatattaggggctgctagcattggaaagggacttggaggaatgttgttctcaagatttggacgttcatctacaacacagtcatctgaaacatcaaaagactcaatggaagatgagaagaagccagttgcctcaccttctgctaccaccgtagggacacagacccttccacatagcagttctggcttcctcgattctgcatatttcagacttcaagaatcgttctttaatctcccacaacttctttttccggaaaatgtaatgcagaataaagataatgccctcgtggagttggatcacaggattgattttgaactcagagaaggccttgtggagagccgctattggtcagctgtcacgtcgcatactgcctattggtcatccttggatgttgccctttttcttttaaccttcatgtataaacatgagcacgatgatgatgcaaaacccaatttagatccaatctgaactctcttgaaggacatgaatggcctaaaactgattttttttttttccgttaaaatgtgtgtgtcaagatacggagatttcagggttaaagtatatttcagttttctttagggcaacatatatttgaatttaaaagcactttatttaaaaaaaaaagaagttttcagttctgaagaagtcatttacagtttgcatcattttaattatgagtctgacaaaaccttctccagagaatcaagcaagacctggatgtgaagaaggtttgggtaaactgcatgtaaaggctacaaatcacaatctgattcctcccaaatataaaggcatatggaacataatgtattaaccaaagtatgttataaatcaaaaatggtcaaggttcagcatattctatatgaagatcacaaggtggtatcgttttagatttctatgaaggctttcatttgtacatccctttgaaaaaatataacagatttaaaatgttttgaatttaacttgtttagaaaaactaatgcttaaaacaatatttgaactactgtatttataatttattacctctaattgctttatttcagtgtatgagacattactgttttaatgtttgctttgaacataatttaagaaccagatttattttctatagtgataaacccttttttctcagaactccatctttgtactcttcagatgaatatatagacactgtggcatacattttttttcattaaaaacttatggcttcatacaacactagttcaattttttaaataaactttttattatgttacatgtacttcagagaaagctaaagtttctctaaacttgacacggagtactccataatgggtacatttcattagctttattagaaaactagtaaatgcttttgaataggtagtatgacagctattttaaatgtataaacatttgtgtgccaaacaacatatatgaagggatgtgatgccactaactagtgcacattgtttctcaatgtgccattgagacacaaggcacagtaagtcaggattctgaggcattggaagggttttcttcagctgtaattgtttccacagtgcttttcatctgaggggctcaaagtttaagagtgcattcaataacccatgtactagcttcttgaggtaagtaaataaatcttgttctcatgttacatgttaatacaccaaggcaccaaaacatttaaagtgccatgaattagattacatcagaaatcagaaaagcttggattgagctagtcaccgtggttcacgcctgtaatcccaacacttcgggaggccaagatgggaggatctcttgagcccaggatttcaagaccagcttgggcaacatagtgagaccctcttctctgcaaaaactgacaaaaattagccacttgtagtggtgtacacctgtagtcccagctactcaagaggctgaggtgggaggatcacccgagcccagaagttcaaagctgcagtgagctctgatcacaccaatgcactccagcctgggtgacagagccagaccctgtctctaaaaaacaaaaaagaaaagcttgggttgaagccaggccatattcttttatatgctgttcaatgacttgattcacatgtgaccttttagtagtttgcaaacaataataacagaagttgcaattcataattcagagaaatgaccatgaagccggtgtttccctgcttgatttctatgttcttggattctcacacaaaagaggagttacctagaggggatcagtagccatccctgttgcacacaaccctcacttctgagtggtttccactaggttccacttaaggtgctgtcttttcttaacttgcaaggaattgcttagcttcccaataatcattgtcaaactgggagcaaagttggtcagctgtatctctcacctcctcctttcttcataagatagtagaatctgtggcttacttgtaggttttacttagtgcttcagtactgttggctgttttggccttttgctgaatttgcacaacaacataaagcacttctttttaatgtttaaaaaaaattccaaggctccatgaccaagtatgtgactcactaagaaacccttgctataaaaggcttttgatgaaatcttagcaaagctaaattatctctaacttagagattcctatgaactcaggtcattttcatagcctgtttattttgtaggtctaatttagttctcaggaaaattaaactcatgctatatgactgtatcgttaaaggtacttgagcgtatgttgctgtaggtggtatgacactcaaatgcataagaacttgaagggatttattcttaaccactagaatatgaagagccctttttacctgagaagagtgaaattatgtcagaccttttaatttgatatcactgagtaaaaggtatgttcctatagccataggaatatgtctgcttcctttttttcatgttgagaaaacagtcaaatttaaccatttggagtttatttgaattcttggaaagagcaatattcaaaaccttttcaaaaataagatattctggactactggatggatgttttgttttcagttcatttttcatcagtagagatggtgatttcggttttgtagtatccttgtttctatgtctgtgcatgttaacattggatgtatttgtatatacttaattaatatacagactgtgtgtcattctggcttgattagaagctaagtcagttactgagtaacattttgcaactttattccagcaagtactaaatcggccaaaaaaagttttgtttttgataccattaaaattttattctctattttgtgtacatgctatgatgattctcccaagtactgattagatcactgaactttagttagcttcccaagaattattaaccgttagaataagacttagattaaatcttgctttatttttactttaaaattagtcttgctaaggccttatgttagttcatactttcttttcaacagtaatcttgtttataatccagtgtttctgtgttttaggacataatttaaaaatatactggattttggccaggtgtggcagctcatgcctgtaatcccagcactttgggaggccaagcagggaagattacttgagcccaagagttgaaaaccaacctggacaacatggtgaaacccagactctacaaaaaatgcaaagattagctgggtgtgttggcagacgcctgtggtcccagctactcaggaggctgaggtcggtaggactgcatgattccgggaggtcaaggcttcagtgagccaagattgcaccactgcactccaccttgggtgacagagctggacactgtatccaaaaaaaaaaagtatgtatttacacacacacacacacacacacacacacactggatgttctaataactgctcttttgtatgtgaagcaagccttaggaatcttacgttttacttctttctgttaaacggcatctgttatcttttgaagtactcacactgaacatgcttcatgctgaatactcacgctaaaggcctcagacatgtaaacattcatccttagtctcttttttctctgttttctcattgggagctgaagcatcctagtctgcagaaaatttaacacaccatattccagctttgcatcacctagacagtagacaaaaggaaaagaaattgtcagtaccgtatcacagctagtgcctctgttcattccagtgatagtacatgagccccttccagtggagtcagatcaagccaaaagattttcctgtaaagtctgtagtagaagacaaatttctttttgatccattagattggtatttctatcttctcagctaattaatgagtaaggcatgtggacaatcgagaaaactaatttgagtgtatgtattaaaattgctcttctaaaaacacgtaaaatattaaagatcaaggcagagcaaaaaagaacgtagcaatcatatactagaaaaagaaactaagttttgctaaactatgtttgggttagttgacctctgtagctattctaaagttttctatcccttatctgtattccgctgtcattcctgtgcctcaagcctctgccaggaatctgatggtactctggctgaacttaaaacataagaatctcaaaggtctcatttagtaaatgttagtgctaagttggtgacagcctgggttatatgctttctctttcagtcttcagtagatgcttgtgatagttttcaaagaactgtaaaatttccgggtctgtacagatttttagagatcatttaatccaaccctgttacagtatcatgtcagcatttaaatagcagtaaaggtcatgaaaagtgaagtgaaaggcagcaaactccatgaaaaactaaatacagtgacaactgagggaagtggtaaagtaaaaaaatattaatgatggaattttaaagctggaaggggcatagagaccattcttttctcaataatattctgcaaatattaacaggtgtcatgtcagaaactaagtttaggaattgacaaattcaaaaatctcccttacagcagggctttgagagcctttgctacactaaatgctctgtgaatctatctggtgctgcgtgggggcctccaaatttatttaaccatattttttaatttggcatttacctagagaaatgctatcacatttaattccttcgttttacagtttcacctcctcatgtgattccttcattttgtaagtgaccgattccaccctatacaatcacatggccaatgaatgacagtcagaattagaacctagtcccctgattcccaaccatgtcttataccagactgtttcccctaatcgataggaaactactcctaaagggcagaaactgcctctctttgtttttgtcccccaacctcccctccacacatacacctctgtaatctgatgctttaagctcagattaaagcatcagcaagctttaatctgacacatggccgtaggcttgagttagcagttggtcccttctttcttccagactctcataagagtaccctatcaggtctggacagacttccgtttatgcctcagattcaaaatacccaggaaaaagaagaagaaatacaaaacaacaaaaagaaaatcaagaaaaaaataagatatccaggaaatattttgttagttttctattctggtgacaaatgcaaacttaaggaaacaagttgcacagtgttaactaatgtttaacattcctttccatagtgtttatgtgggccttttatcaattcatgacaaataggtcacctccaaaactgttccaacataggttaactcagaaatttaaaatttaagtactatcctttttggagactatgagaagagtttttactattgtgttttgttttgttttttggtgtgtgtgtgtatgtatgtgcattccccaaaaatagtccattggcagattgttagggtgaacttttcctctgcctttgtgtttgtataagggcgggtgcatgcttagtattgtctgctaccttatggtttttcatttatatgtaacatggtacaacttgcttcctccccacccaacagttgtcaggatatgttggggaatattctttaggaagattacatctggtcttctgttggagtaagatgaaaaacaagtatgttaacacttgacctttactgctttctcctggaagacattgaatatctaggagcgtcactcataccttcccttgactgtacccacacccactgcggtccctgcttgatctctcaaactttttgtttccctttgagcttcatgacaaaaaattataaccattttctggttctaaggctgccataatcccaactttgccagtaagaagatggagaatttttgctcatagggacatttctcagaagcagctggcaccataactctcctgagacccttgtttcctttctttcagctcctatgacttcttatgttcactctctctaacactactaaatgttgtcaatgactgcaatcacaactctttgaaggcaggctttttcttttcctttgttacctcttattttcaatagccaaagcaggttagttttctcagaatcttcagttttactgaagcatgcattatttctgttttctctctgcagtgatcagtttggatgacagaaactttaaacttttattctggcattgtccagttctgattttctcagctggaactggtgcatgcacatttaataatttcaaagaagtgagaggtaaatgttttctcctgcattatactgtgtttctctagctgaattgatccgtttgttatcttgctcacccgaaacaagtagttgtgccctacagtgagcaacctcagactaggctgttctaagcattctggagaaaataatcctcatcatacagtttgtggtaactcttccaaaaagtttatgaaaattgaaagatctccctatgcatcagctgtggctgccacattccgttctactaggaaggctagtggccacaactccctctagaacatcagaggataaagtacacttatatattagaaaagacaggcatattctgattatggttcattcacaatttctcagtccagggttcagtcagtgaccatagctctgaggtcttcaggctaactccaagaacccgtgccagatagaaacctactcctactacctttccactcaccttcccattcccccacctttgctaccaaagtgactttaaaagtcgagttttaggtgtttgtttttttaacagtctaggaatttcagtgcaattccgtgaggtggtgctgaccttagatgagaaatacgtggccaggctataaggactacatgtagaattgagatgggacagtgtacgtatggactgtgaggggaaagaaaaggtaaatgtgtgaaaggaaagagattggtgcatggtcatgacagtctgacagcttagacatttcagaggcattgtttatgagaaaggggatagggacacataggtctgatgacaaccaaagccctttgatgatgccatctgtcactcaaggctccccacagcctgcccaacctgactctcctgcctgcttctccactgcctaccttcaacaatcaaactatatttttgttacagcaaactacattccatttgcctttaaatgcttgcattttagttattgtactggctacctgtttttgtctgcccagcatcctgtttcccctccttttggatcctctcctagccaattccatgtcttgaatcctttcctgctccttgttaaaattattttctgctttgtgtgagtccctgtaagcaccagcagctcaatcagcactgtctgtaccatggtcaagagatgagtacatgactcaggtcagaccttatttcccaccccataagccacaatgattagacaagaaataggcacagaaccctaactagatagggcagaagccttccataggattttatttgctggccctgaaatgcaggtagccttctatggctgttaaacacaatccagtggcacatggggtgatatgaggatggagccatccatggcaaaactccaccctttcctgtgacatggattatgtgcatctgccatgaaaaggaagcatacacaagaaatgagccaagagttcctggagaactgaagcaagtatcacctccagatcagttgtacttttatttgcttacactattctgaggtgggtctctgtctcttggatccaaaagagttcaaattaataatcatttgacaaaaaattacctccacattcctaatgaagttgtctttgaagataatgtcttgtgatcccctggttgaagttaattactgcttgtgagcccccattaacaacgtgttcctttccccattgcttgcttgtatcagctttgctgaagatctattggctgtaggtgtgcagctttatttctgtgttctctattgtgttccattggtctacgtgtctgttattgtaccagtgccgtgctgttttggttactgtggtcttatagtttgaagccacatctgtgtgatgctgctggctttgttctttctgctttgggttgctttggctattcaggctctttctttggttccatctgaattttagaatagttgttttctaattctgtgaaaatgttccaacctctgtgaaaaatgaggttggtagtttgataggacagcattgattctgtaaattgctttgggcagtatggccatttttaaactatattgattcttccaatccatgaacatggaatgtttttccattttttggtttcatccctgatttctttctgccatgttttgtagttctccttgtagagatctttcacctccttggttaggtgtatttttaagtatttcagtttttttatggctattgtaaatggtattgggttcttgatttgctctcagcttgaacgttattggtgtatagaaatgctcctaatttttgtgcattgattttgtatcctgaaacttgactaaagttgtttatcagtctaggagcttttggcagagtcttcggggttttctaggtataaaatcatatcagcgaagagagctagtttgatttcttttcccagttggatgccttttatttatttctcttgcctgattgctctaagttgaatgggagcgatgagactgggcatcctcttcttattccagttctcagaaggaatagttccagcttttgctcatccagtatgatgtctgtgggttggttgtagatggctcttattattttgagatatgttcctttgatacctagtctgttgaggggttttatcatgagggatgttggattttatccgtattcaataaatggtgttgggataactggctagccctatgcagaagaatgaaactggaccccccacctttcaccgtatatgaaaattaactcaagatggattaaagatttaaatgtaagacctcaaactgtaaaaatcctagaagaaaacctaggaaatacccttatcaacatcagccttggcaaagaacttttggctaagtccccaaaggcaattgcaacaaaacagaaattggcaagtggggacctaattaaagcactctgcacagcaaaagacactatcaacagagtaaacagacaacatacagaattggagaaaatatttgcaaactagacatccaacaaagatctgacatccagaatcaataaggaacttaacaagcaaaaaacaaccccattaaaaaatgggtgaaggacatgaacagacacttctcaaaagaagacatacaagcaatcaacaaacgtgaaaaaatgctcatcactaatcatcagagaaatgcaaatcaaaaccacaataagataccatctcacaccagttagaatggctattgtaaagaagtctaataacatgccagtaaggtttcagagaaaagagaacatttatacactgttgtgggaatgtaaattagttcagtcactgtggaaagcagtttggagatttctcaaataacttaaaacagatctaccattcaacccagcatatgggtttatttcccaaaaggaaataaatccttctaccaaaaacacatatggtcatcacagtgctattcacagtagcaaagacagatcaacgtggctgcccatcaacagtggactggataaagaaaatgtggtacatataaatcatggagtattaggcagccataaaaagaacaaaatcatgtcctttgcagccagccacatggatacagctggaagccataatctaagcaaattaagaacagaaaaccaagtactgcatgttctaacaaatgggagctaaatattgagtacctcaggatgcaaaggtgggaacaacagacactgcagactggaacactgtgggtgaggagggcagaaggataggttgaaaaactacctattgggtactatgctcactacctgggtgatgggatctgtacctcaaacctcagcatcacacaatatacccttgtaacaaacttgcacatttacccactgtttctaaatgaaaagttgaaatattttttattaaaaaacacaaaagcaatatgtttctc

SEQ ID NO: 5379 - DNA, 872 bp, Homo sapiens
  source 1..872: mol_type = unassigned DNA
actgagcgtatcatgttaaagatgagcgggtggcagcgacagagccaaaatcagagctggaacctgaggagagagtgttcaagaaggaagtgtatcttcatacatcaccacacctgaaagcagactgatccaactgcagagatggcagctgagtcattgcctttctccttcgggacactgtccagctgggagctggaagcctggtatgaggacctgcaagaggtcctgtcttcagatgaaaatgggggtacctatgtttcacctcctggaaatgaagaggaagaatcaaaaatcttcaccactcttgaccctgcttctctggcttggctgactgaggaggagccagaaccagcagaggtcacaagcacctcccagagccctcactctccagattccagtcagagctccctggctcaggaggaagaggaggaagaccaagggagaaccaggaaacggaaacagagtggtcattccccagcccgggctggaaagcagcgcatgaaggagaaagaacaggagaatgaaaggaaagtggcacagctagctgaagagaatgaacggctcaagcaggaaatcgagcgcctgaccagggaagtagaggcgactcgccgagctctgattgaccgaatggtgaatctgcaccaagcatgaacaattgggagcatcagtcccccacttgggccacactacccacctttcccagaagtggctactgactaccctctcactagtgccaatgatgtgaccctcaatcccacatacgcagggggaaggcttggagtagacaaaaggaaaggtctcagcttgtatatagagattgtacatttatttattactgtccctatctattaaagtgactttctatgagccaa

SEQ ID NO: 5380 - DNA, 1067 bp, Homo sapiens
  source 1..1067: mol_type = unassigned DNA
gaggtcagagacttaagtctaaggcactgagcgtatcatgttaaagatgagcgggtggcagcgacagagccaaaatcagagctggaacctgaggagagagtgttcaagaaggaagtgtatcttcatacatcaccacacctgaaagcagcaccaaagcagccataaacaatatgtaaataaacagatgtggctgtattccagtacaactttacctacaaaaacaggcatcagaccagcttgccaacttgtggcatagactgtttgctacatggagcttgttccagccactccccattatcctgcagatgtgcttttccagactgatccaactgcagagatggcagctgagtcattgcctttctccttcgggacactgtccagctgggagctggaagcctggtatgaggacctgcaagaggtcctgtcttcagatgaaaatgggggtacctatgtttcacctcctggaaatgaagaggaagaatcaaaaatcttcaccactcttgaccctgcttctctggcttggctgactgaggaggagccagaaccagcagaggtcacaagcacctcccagagccctcactctccagattccagtcagagctccctggctcaggaggaagaggaggaagaccaagggagaaccaggaaacggaaacagagtggtcattccccagcccgggctggaaagcagcgcatgaaggagaaagaacaggagaatgaaaggaaagtggcacagctagctgaagagaatgaacggctcaagcaggaaatcgagcgcctgaccagggaagtagaggcgactcgccgagctctgattgaccgaatggtgaatctgcaccaagcatgaacaattgggagcatcagtcccccacttgggccacactacccacctttcccagaagtggctactgactaccctctcactagtgccaatgatgtgaccctcaatcccacatacgcagggggaaggcttggagtagacaaaaggaaaggtctcagcttgtatatagagattgtacatttatttattactgtccctatctattaaagtgactttctatgagcca

SEQ ID NO: 5381 - DNA, 1151 bp, Homo sapiens
  source 1..1151: mol_type = unassigned DNA
ggaagtgtatcttcatacatcaccacacctgaaagcaggtaaacttaacctacccttttccaaaaattttaaacggcaggacagtaaatattttagatgttaaaagtcctatagtctctagcgtgactcttcatctctgccactgtagcaccaaagcagccataaacaatatgtaaataaacagatgtggctgtattccagtacaactttacctacaaaaacaggcatcagaccagcttgccaacttgtggcatagactgtttgctacatggagcttgttccagccactccccattatcctgcagatgtgcttttccagactgatccaactgcagagatggcagctgagtcattgcctttctccttcgggacactgtccagctgggagctggaagcctggtatgaggacctgcaagaggtcctgtcttcagatgaaaatgggggtacctatgtttcacctcctggaaatgaagaggtaagaatgttagccctaaagctaaagggggatgttacctttcccttctcaactaatatctatgttccctttcctcatttccttgaaggaagaatcaaaaatcttcaccactcttgaccctgcttctctggcttggctgactgaggaggagccagaaccagcagaggtcacaagcacctcccagagccctcactctccagattccagtcagagctccctggctcaggaggaagaggaggaagaccaagggagaaccaggaaacggaaacagagtggtcattccccagcccgggctggaaagcagcgcatgaaggagaaagaacaggagaatgaaaggaaagtggcacagctagctgaagagaatgaacggctcaagcaggaaatcgagcgcctgaccagggaagtagaggcgactcgccgagctctgattgaccgaatggtgaatctgcaccaagcatgaacaattgggagcatcagtcccccacttgggccacactacccacctttcccagaagtggctactgactaccctctcactagtgccaatgatgtgaccctcaatcccacatacgcagggggaaggcttggagtagacaaaaggaaaggtctcagcttgtatatagagattgtacatttatttattactgtccctatctattaaagtgactttctatga

SEQ ID NO: 5382 - DNA, 906 bp, Homo sapiens
  source 1..906: mol_type = unassigned DNA
gaggtcagagacttaagtctaaggcactgagcgtatcatgttaaagatgagcgggtggcagcgacagagccaaaatcagagctggaacctgaggagagagtgttcaagaaggaagtgtatcttcatacatcaccacacctgaaagcagatgtgcttttccagactgatccaactgcagagatggcagctgagtcattgcctttctccttcgggacactgtccagctgggagctggaagcctggtatgaggacctgcaagaggtcctgtcttcagatgaaaatgggggtacctatgtttcacctcctggaaatgaagaggaagaatcaaaaatcttcaccactcttgaccctgcttctctggcttggctgactgaggaggagccagaaccagcagaggtcacaagcacctcccagagccctcactctccagattccagtcagagctccctggctcaggaggaagaggaggaagaccaagggagaaccaggaaacggaaacagagtggtcattccccagcccgggctggaaagcagcgcatgaaggagaaagaacaggagaatgaaaggaaagtggcacagctagctgaagagaatgaacggctcaagcaggaaatcgagcgcctgaccagggaagtagaggcgactcgccgagctctgattgaccgaatggtgaatctgcaccaagcatgaacaattgggagcatcagtcccccacttgggccacactacccacctttcccagaagtggctactgactaccctctcactagtgccaatgatgtgaccctcaatcccacatacgcagggggaaggcttggagtagacaaaaggaaaggtctcagcttgtatatagagattgtacatttatttattactgtccctatctattaaagtgactttctatga

SEQ ID NO: 5383 - DNA, 951 bp, Homo sapiens
  source 1..951: mol_type = unassigned DNA
agagacttaagtctaaggcactgagcgtatcatgttaaagatgagcgggtggcagcgacagagccaaaatcagagctggaacctgaggagagagtgttcaagaaggaagtgtatcttcatacatcaccacacctgaaagcaggtaaacttaacctacccttttccaaaaattttaaacggcaggacagtaaatattttagatgttaaaagtcctatagtctctagcgtgactcttcatctctgccactgtagcaccaaagcagccataaacaatatgtaaataaacagatgtggctgtattccagtacaactttacctacaaaaacaggcatcagaccagcttgccaacttgtggcatagactgtttgctacatggagcttgttccagccactccccattatcctgcagatgtgcttttccagactgatccaactgcagagatggcagctgagtcattgcctttctccttcgggacactgtccagctgggagctggaagcctggtatgaggacctgcaagaggtcctgtcttcagatgaaaatgggggtacctatgtttcacctcctggaaatgaagaggaagaatcaaaaatcttcaccactcttgaccctgcttctctggcttggctgactgaggaggagccagaaccagcagaggtcacaagcacctcccagagccctcactctccagattccagtcagagctccctggctcaggaggaagaggaggaagaccaagggagaaccaggaaacggaaacagagtggtcattccccagcccgggctggaaagcagcgcatgaaggagaaagaacaggagaatgaaaggaaagtggcacagctagctgaagagaatgaacggctcaagcaggaaatcgagcgcctgaccagggaagtagaggcgactcgccgagctctgattgaccgaatggtgaatctgcaccaagcatga

SEQ ID NO: 5384 - DNA, 644 bp, Homo sapiens
  source 1..644: mol_type = unassigned DNA
agagacttaagtctaaggcactgagcgtatcatgttaaagatgagcgggtggcagcgacagagccaaaatcagagctggaacctgaggagagagtgttcaagaaggaagtgtatcttcatacatcaccacacctgaaagcagtacaactttacctacaaaaacaggcatcagaccagcttgccaacttgtggcatagactgtttgctacatggagcttgttccagccactccccattatcctgcagatgtgcttttccagactgatccaactgcagagatggcagctgagtcattgcctttctccttcgggacactgtccagctgggagctggaagcctggtatgaggacctgcaagaggtcctgtcttcagatgaaaatgggggtacctatgtttcacctcctggaaatgaagaggaagaatcaaaaatcttcaccactcttgaccctgcttctctggcttggctgactgaggaggagccagaaccagcagaggtcacaagcacctcccagagccctcactctccagattccagtcagagctccctggctcaggaggaagaggaggaagaccaagggagaaccaggaaacggaaacagagtggtcattccccagcccgggctggaaagcagcgcatgaaggag

SEQ ID NO: 5385 - DNA, 1748 bp, Homo sapiens
  source 1..1748: mol_type = unassigned DNA
gggcgcagcaggccaagggggaggtgcgagcgtggacctgggacgggtctgggcggctctcggtggttggcacgggttcgcacacccattcaagcggcaggacgcacttgtcttagcagttctcgctgaccgcgctagctgcggcttctacgctccggcactctgagttcatcagcaaacgccctggcgtctgtcctcaccatgcctagcctttgggaccgcttctcgtcgtcgtccacctcctcttcgccctcgtccttgccccgaactcccaccccagatcggccgccgcgctcagcctgggggtcggcgacccgggaggaggggtttgaccgctccacgagcctggagagctcggactgcgagtccctggacagcagcaacagtggcttcgggccggaggaagacacggcttacctggatggggtgtcgttgcccgacttcgagctgctcagtgaccctgaggatgaacacttgtgtgccaacctgatgcagctgctgcaggagagcctggcccaggcgcggctgggctctcgacgccctgcgcgcctgctgatgcctagccagttggtaagccaggtgggcaaagaactactgcgcctggcctacagcgagccgtgcggcctgcggggggcgctgctggacgtctgcgtggagcagggcaagagctgccacagcgtgggccagctggcactcgaccccagcctggtgcccaccttccagctgaccctcgtgctgcgcctggactcacgactctggcccaagatccaggggctgtttagctccgccaactctcccttcctccctggcttcagccagtccctgacgctgagcactggcttccgagtcatcaagaagaagctgtacagctcggaacagctgctcattgaggagtgttgaacttcaacctgagggggccgacagtgccctccaagacagagacgactgaacttttggggtggagactagaggcaggagctgagggactgattcctgtggttggaaaactgaggcagccacctaaggtggaggtgggggaatagtgtttcccaggaagctcattgagttgtgtgcgggtggctgtgcattggggacacatacccctcagtactgtagcatgaaacaaaggcttaggggccaacaaggcttccagctggatgtgtgtgtagcatgtaccttattatttttgttactgacagttaacagtggtgtgacatccagagagcagctgggctgctcccgccccagcccggcccagggtgaaggaagaggcacgtgctcctcagagcagccggagggaggggggaggtcggaggtcgtggaggtggtttgtgtatcttactggtctgaagggaccaagtgtgtttgttgtttgttttgtatcttgtttttctgatcggagcatcactactgacctgttgtaggcagctatcttacagacgcatgaatgtaagagtaggaaggggtgggtgtcagggatcacttgggatctttgacacttgaaaaattacacctggcagctgcgtttaagccttcccccatcgtgtactgcagagttgagctggcaggggaggggctgagagggtgggggctggaacccctccccgggaggagtgccatctgggtcttccatctagaactgtttacatgaagataagatactcactgttcatgaatacacttgatgttcaagtattaagacctatgcaatattttttacttttctaataaacatgtttgttaaaaca

SEQ ID NO: 5386 - DNA, 753 bp, Homo sapiens
  source 1..753: mol_type = unassigned DNA
cagcaggccaagggggaggtgcgagcgtggacctgggacgggtctgggcggctctcggtggttggcacgggttcgcacacccattcaagcggcaggacgcacttgtcttagcagttctcgctgaccgcgctagctggtgagtgtcccttctgtgtgtgggtcctagagctcgcggtctggtctggtctggtccccagactgacgcctggtcggtccccctcttgtcttacagcggcttctacgctccggcactctgagttcatcagcaaacgccctggcgtctgtcctcaccatgcctagcctttgggaccgcttctcgtcgtcgtccacctcctcttcgccctcgtccttgccccgaactcccaccccagatcggccgccgcgctcagcctgggggtcggcgacccgggaggaggggtttgaccgctccacgagcctggagagctcggactgcgagtccctggacagcagcaacagtggcttcgggccggaggaagacacggcttacctggatggggtgtcgttgcccgacttcgagctgctcagtgaccctgaggatgaacacttgtgtgccaacctgatgcagctgctgcaggagagcctggcccaggcgcggctgggctctcgacgccctgcgcgcctgctgatgcctagccagttggtaagccaggtgggcaaagaactactgcgcctggcctacagcgagccgtgcggcctgcggggggcgctgctggacgtctgcgtggagcaggg

SEQ ID NO: 5387 - DNA, 521 bp, Homo sapiens
  source 1..521: mol_type = unassigned DNA
ggacgcacttgtcttagcagttctcgctgaccgcgctagctgcggcttctacgctccggcactctgagttcatcagcaaacgccctggcgtctgtcctcaccatgcctagcctttgggaccgcttctcgtcgtcgtccacctcctcttcgccctcgtccttgccccgaactcccaccccagatcggccgccgcgctcagcctgggggtcggcgacccgggaggaggggtttgaccgctccacgagcctggagagctcggactgcgagtccctggacagcagcaacagtggcttcgggccggaggaaggtgagcggtgggcgggtgccgacgcgactcgaggggccgggaaggtggggaagccccggtgctggaaggggtcagagccgccttggcttcctatcccatcgggacccagattgcttgggggcagggggaattggagtataaggtgagtgaggcggaaactgaggcacggagtgggaaggagcgttggtttcttaaggaaacagcacctcccccg

SEQ ID NO: 5388 - DNA, 2604 bp, Homo sapiens
  source 1..2604: mol_type = unassigned DNA
gctactgcgaggagccggcgcagggtggcccgggaggggtgagcagggtgccgctggctgctggggtctgcaggtcaccgagtccccaggagaggggactcctaagaagccacctgcctgtgtttacccggcagcgagcgcgcaggcccccgcgaactcctggcagcgctcaggaaaggccgttgcgcctcgcgaaggaaacagagccgttgaccatggttgcaactggcagtttgagcagcaagaacccggccagcatttcagaattgctggactgtggctatcacccagagagcctgctaagtgattttgactactgggattatgttgttcctgaacccaacctcaacgaggtaatatttgaggaatcaacttgccagaatttggttaaaatgctggagaactgtctgtccaaatcaaagcaaactaaacttggttgctcaaaggtccttgtccctgagaaactgacccagagaattgctcaagatgtcctgcggctttcctcaacggagccctgcggcttgcgaggttgtgttatgcacgtgaacttggaaattgaaaatgtatgtaaaaagctggataggattgtgtgtgattctagcgtcgtacctacttttgagcttacacttgtgtttaagcaggagaactgctcatggactagcttcagggactttttctttagtagaggtcgcttctcctctggtttcaggagaactctgatcctcagctcaggatttcgacttgttaagaaaaaactttactcactgattggaacaacagtgattgaagggtcctaaaaagggaaaatatataaagattatttcatgattgggtagtaaaactattcagctagtcagctaaagtcatttgtagtttgccccacctgccctaaataagaaaccccaaatgtagtctcttttctttctgtgtttcacattcatagcaactgcagctaacaggctgattttctggcctttggagaagtgattcaaaatagtgtagattttctgcatagatcccatttttgtacagaattgaatgggatggaataggtaagcaaaagtagaagcccatttgagttttacatttgattccacaatttggtttcaggtaggcttggtaatagactatataaaccagatttgcctattttgattttcatatggcttttttttctgtaagttttcagaggattttttaaatcacagaatcatactaaatgatatttagcctatcaaaacttccaaaagcccacaccaccagttcctgactcaaatttgaagggtttttagacaggagggtaggattaagtaggtgagtttaattaaagcttaaccctaggtaagagtaaatgagaaatattacggcaataatggaactgcttcactgtttcttggtgacttcctcactctaatgttttaaagaggcaacaaaagcttgtggtgccatttcagtaaccacggtgttgttttagatgcctttataagctcagtttcccctgttcttaagtgttgaatactgtctttaaactagaaaaatgcaaaatattgaactgatatttttgtgtgtagttgattactcttccattgagtgaatgatgaatacctgtgaggataggaaattagttctgagatctagtccctctctgattcacttagtaatctatcctcttttcagtattacatgtgcttaatctcagatgaaccatttcaccatggcagtgttatctcatctctgggcttttctgggaattgaagtatctctccttaaccccaattgtcaagggtagtagctgtatactaccactttgaattattgaaacgggtcaatttacgaagtctgcattggctatggagatatggtttatagtacagcctagagaatgaaactcaccgtccagataaccatgcatgcacccagattttttccaccttggatacctgtcactagggaataataaaggcctgattttttgtcttattccaactaagtagatcattatctctttccttttttatgttaatgagagaatttagcctccactcaacaatgttcaattcagcaaggctttcatatccttgctgtgggtcgtggataaggagcttattcaggtttcctgccctagctattagctccacttcacatgctggagaccggcgtagggacagatgtattcatcctggtgttactgaaaaacaggtgtgatcctgttactgatactataagtgacctaaaatgtcactgttcaaattagccagtgttctaacaaactaaactcttcaaatgcttggaaagatactacaaagccaatctttatagaattgggccaagataaatctatgttgttttgcatggctattgttaagctccaaaggttcactgtgtttctgccgctgtcctggagttgtcaccactgactgggcaaggcttcttgggcatggatgtagaactgttgtccttttcccactaacagttatctttgactctcttgcctgttatgcttacaaaatggtgatggcttatggaaggctgttaaattaatattcctgttaaaggaaattaaagtttgtctatttttgacaataaaacattatatatttttaa

SEQ ID NO: 5389 - DNA, 852 bp, Homo sapiens
  source 1..852: mol_type = unassigned DNA
aggtgagcgaagctgcggccttggtgggggcagcggggccggggggcgctccgcggggcaggtcgcttccaagttttgcgaactgttgagttagtttcaggttgcggctccgctcccagggctttgtcaaattgagttgcagaggccggttccacccctttggcaaaggagttcctccgctagttcgctcccgggacgccgggcattttaggagcctctgcacgactcgcctgcttttgcaaatccgtctcttctcgcctcattttttccagcgctcaggaaaggccgttgcgcctcgcgaaggaaacagagccgttgaccatggttgcaactggcagtttgagcagcaagaacccggccagcatttcagaattgctggactgtggctatcacccagagagcctgctaagtgattttgactactgggattatgttgttcctgaacccaacctcaacgaggtaatatttgaggaatcaacttgccagaatttggttaaaatgctggagaactgtctgtccaaatcaaagcaaactaaacttggttgctcaaaggtccttgtccctgagaaactgacccagagaattgctcaagatgtcctgcggctttcctcaacggagccctgcggcttgcgaggttgtgttatgcacgtgaacttggaaattgaaaatgtatgtaaaaagctggataggattgtgtgtgattctagcgtcgtacctacttttgagcttacacttgtgtttaagcaggagaactgctcatggactagcttcagggactttttctttagtagaggtcgcttctcctctggtttcaggagaactctgatcctcagctcaggatttcgacttgtt

SEQ ID NO: 5390 - DNA, 553 bp, Homo sapiens
  source 1..553: mol_type = unassigned DNA
gagtgtgaaagcgcggacgctcggggaggggtcgcactgaacaatcaggttcaggctttgacgagtcgtgcacccggaattgcggtcccagtggcccgagatctaccctggaagcaacagcgctcaggaaaggccgttgcgcctcgcgaaggaaacagagccgttgaccatggttgcaactggcagtttgagcagcaagaacccggccagcatttcagaattgctggactgtggctatcacccagagagcctgctaagtgattttgactactgggattatgttgttcctgaacccaacctcaacgaggtaatatttgaggaatcaacttgccagaatttggttaaaatgctggagaactgtctgtccaaatcaaagcaaactaaacttggttgctcaaaggtccttgtccctgagaaactgacccagagaattgctcaagatgtcctgcggctttcctcaacggagccctgcggcttgcgaggttgtgttatgcacgtgaacttggaaattgaaaatgtatgtaaaaagctggataggattgtgtgtgattct

SEQ ID NO: 5391 - DNA, 3749 bp, Homo sapiens
  source 1..3749: mol_type = unassigned DNA
ggccggggtggggtggggcaggatgctggatggcccactgttctccgaggggcctgacagcccccgggagctccaggatgaggagtctggcagctgcctctgggtgcagaagtccaagctattggtgatagaagtgaagactatttcctgtcattatagtcgccgcgccccttctcgacagcccatggacttccaggccagccactgggctcgcgggttccagaaccgcacgtgtgggccgcgcccgggatccccacagccgccgccccgccggccctgggcctccagggtgctgcaggaggcgaccaactggcgggcggggcccctggccgaggtccgagctcgggagcaagagaaaaggaaagcggcgtcgcaggagcgggaggccaaggagaccgagcgaaaaaggcgcaaggctggtggggcccgacggagccccccgggtcgaccccgcccggagccccgcaacgcccctcgggtggcccagctggcagggctccctgctcccttgcggccggagcgcctggcgcctgtggggcgagcgccccgtccatccgcgcagccgcagagcgacccagggtcggcgtgggcggggccctggggaggtcggcggcccgggcccccaagctacgaggctcacctgctgctgagaggttctgccgggaccgccccacgacgccgctgggaccggccgccaccctacgtggctccaccttcttacgaaggcccccataggaccttggggactaagagaggccccgggaactctcaggtgcccacttcatcagccccagctgcgactccagccaggacagacggagggcgcacaaagaagaggctggatcctcggatctaccgggacgtcctcggggcttggggtctccgacaggggcaaggtctcttggggggatccccaggctgtggagcggccagagcaaggccagagcccggcaagggggtcgtggagaaaagcctggggctggctgctgctgacctgaacagtggtagcgacagccatccccaagccaaagctacagggagcgcaggcaccgagatagctcctgcggggtctgcaactgcggctccctgtgccccgcatcccgctcccagatccaggcaccacctcaagggctcgagggaagggaaagaaggagaacagatctggtttcccaaatgctggattccctcccctaaaaagcagccgccccgccatagccagacactccccagaccctgggctcccggaggcaccggatggagagaatctctgggtcttggagagggggcaggaccggagaccctggagggttggaaggcgacccgccgtgcccacaccttgccccgcagttcccagggcctgtcccgtggggaaggcgtctttgtcattgacgccacgtgcgtagtgatacgatcccaatatgttccaaccccccgaacccagcaggtgcagcttttgccctctggggtgacacgcgtggtgggggattcccccagccaatcgaagcccggcaaggaggagggtgaaggggccacggtctttccttccccttgtcaaaagcggctgtcgagcagtcgccttttacaccagcccggcgggggccgcgggggcgaagctgagggcgggaggccgggggactccacactggaggagcgcactttccgcatcttggggctcccggcccccgaagtaaacctgcgggacgcccccacgcagccaggtagcccagagcaccaagccttaggcccagcagcttcgggagcccagggcagagccgaggggtcggaagtggcggtggtccagcggcgcgccggccggggctgggcgcggaccccagggccctacgccggggccctgcgagaagccgtgtcccgtatccgccgccacacagcccctgactcggacacggacgaagctgaggagctcagcgtccatagcggctcctctgatggaagcgacacagaagccccgggcgcctcctggcggaatgagaggaccctgcccgaggttggaaacagttcgccagaggaagatgggaagacagcggaactgagcgacagtgtcggggagatcctagatgtcataagccaaaccgaggaggtcctcttcggggtgagggacatcagagggacccaacagggaaataggaagaggcagtgagaggccccttcttgtatttgtgtccccaacgcatccatccttgggtccactggtccccattcttccccacagacttcctttgcttctcttttccttgtatctttacccatacctgttctcatccttgaaatataaatgaaaggaagggaagcatatgcccattaatgattttgtttcaggagaggtgagaatgagcagatttaattaatgtctgttatgttcagggcacaagggtgagctcttcgcaggggctgatgcactgggtgtggagctgagcagagaggcctaaccaggatcaggcaggagggcagggatggtggcagccataggagggcagggtagggtagggcctctgaggaggagggaaaaagtgaaggagaggctttggacctggtgacagagtgatcagatgacagaggggttcttgggagaagaggcataggtccagcaacaaccaacaaagcagaaggagggctcaccttggtgtcacaagtcttggatttcaatcccaactctgccactgagttgctggttgactgaggccagtcactttccctctccaggcctccaggcctcctggtatataaaatgatggtattctaaggtccatccttccgtctctgacattttgagatctttggaaaggactctatctcatcctcccctcgacaagccaagaatgagaattgggaataagtgaacagagtttgagggtttctgggcggcctccgtgtcacccaaagtcatgatcaattcaggagactgcccaaggcttgcagaagaggtaagggagtgaggcactcctatcccagtctcccaggtttggttgagggctccccaaggcagggcaagatagcggccctgtcactgaccctggcctgtggtggtctgagctggggagggaaggacaccaatgaatcagcttgggacctctttaggccttccccttttcctccaccccgatgctccttagtgatgctctgaggcgtggccacgatctccctcccaggtggtatcgcccacctgaaaaaatcctgagaatttctcccatcttggcctcttccagaaaccggccaggcaaggaaagaggccggtcaccagaagccagcaggcgtggggtgtgatactctctatagccactacagggcgcgcgcaggtcgcggatctccccagttgctaatcccggctctgccactcaatcctatccctagttcccgagcgcgggtcccccgccttgcagtctccagccgtgcggggccgggagcaggcctccggcctcccagacttctagagcccgccgggcccatctttgtactcatccaccccagccggcttgggactcagacaccgaagtctttttttttttctctccgatccttggacacctcctctgtctgccatttattagccatgtgaacttggccacatcacttcacctccctgagcctcagtttcctcatctgtcaaatgggggtttataaacacctacctcgcagggttgttgtgaggatttaatgcgataatgtatgtaaagcgccttgcacactgcctggcacacagtaggcgctcaataaatctaagcttcccttta

SEQ ID NO: 5392 - DNA, 2130 bp, Homo sapiens
  source 1..2130: mol_type = unassigned DNA
ctctgtctctcagggcatgagaccagccaggcactgggaaacaaggtttggtgccagagattttggtggcttccaagactgctttttcagagacaggctcatggacacagcacggattgcagttgtcggggcaggtgtggtggggctctccacggctgtgtgcatctccaaactggtgccccgatgctccgttaccatcatttcagacaagtttactccagataccaccagtgatgtggcagccggaatgcttattcctcacacttatccagatacacccattcacacgcagaagcagtggttcagagaaacctttaatcacctctttgcaattgccaattctgcagaagctggagatgctggtgttcatttggtatcaggttggcagatatttcagagcactccgactgaagaagtgccattctgggctgacgtggttctgggatttcgaaagatgactgaggctgagctgaagaaattcccccagtatgtgtttggtcaggcttttacaaccctgaaatgtgaatgccctgcctacctcccgtggttggagaaaaggataaagggaagtggaggctggacactcactcggcgaatagaagacctgtgggaacttcatccgtcctttgacatcgtggtcaactgttcaggccttggaagcagacagcttgcaggagactcaaagattttccctgtaaggggccaagtcctccaagttcaggctccctgggtggagcattttatccgagatggcagtgggctgacatatatttatcctggtacatcccatgtaaccctaggtggaactaggcaaaaaggggactggaatctgtccccggatgcagaaaatagcagagagattctttcccgatgctgtgctctggagccctccctccacggagcctgcaacatcagggagaaggtgggcttgaggccctacaggccaggcgtgcgactgcagacagagctccttgcgcgagatggacagaggctgcctgtagtccaccactatggccatgggagtgggggcatctcagtgcactggggcactgctctggaggccgccaggctggtgagcgagtgtgtccatgccctcaggacccccattcccaagtcaaacctgtagatgacataaaatgacagcaaagagactgagagactgttgatcaaagcacagaacaggttcaaataacttttccactgcatgaaagtttaattagacatttctttgttttcaacattagaagtggtgtaacatgtaagctgagcacggtggcatgcctatagtcccagctacttgagaggctgaggcaggaggattgttgagcccaggagtttgagtgcaatctgggtaacattttttagaggtgccagttcccacctctaaaaaaaacaccaacaacaaaagaaatgatgcaacatgtaggcttacttaggaagtccagcattaatggcatagggcataaagctctattttttgttaaaaatacttcttatagagtaaaatttatttagaactgatgtccaaggacctatgcagatttatatgaatgttggaagctatagagattttgatatcatttggcttataaatccacaggaggagataatgtatggaaaacatttaaatcactgtcaattgcagagctgcctgtgatcttcttaggttatagccaagtcagcaacataattcctctaaataaaattacattgtgctcacacagtgctggattattacatttaattgaagacaaagcatgcttgctcctagtactagcagcaagcttttcctcccctcagctggtaatgatggtaggagacagagatgaagttgcctatgtatgtcatatcaattcaatagctgcctggggtcaaacacctaggggttgtacattccattactgtaaatgattgagagctggtttgtggtatggttggctttgcctaagcatttttgaagatgaacagcatgtgcagccaaagaactaatttgctaattaaggtggaacaatcattctgaatgaaatataatcagagtactccgcagtttgttaagaagtattggggaggaggggaatgtgtctcacaataaaatgagttggaattgttgagttaaatgaatttaacctg

SEQ ID NO: 5393 - DNA, 1953 bp, Homo sapiens
  source 1..1953: mol_type = unassigned DNA
ctctgtctctcagggcatgagaccagccaggcactgggaaacaaggtttggtgccagagattttggtggcttccaagactgctttttcagagacaggctcatggacacagcacggattgcagttgtcggggcaggtgtggtggggctctccacggctgtgtgcatctccaaactggtgccccgatgctccgttaccatcatttcagacaagtttactccagataccaccagtgatgtggcagccggaatgcttattcctcacacttatccagatacacccattcacacgcagaagcagtggttcagagaaacctttaatcacctctttgcaattgccaattctgcagaagctggagatgctggtgttcatttggtatcagggataaagggaagtggaggctggacactcactcggcgaatagaagacctgtgggaacttcatccgtcctttgacatcgtggtcaactgttcaggccttggaagcagacagcttgcaggagactcaaagattttccctgtaaggggccaagtcctccaagttcaggctccctgggtggagcattttatccgagatggcagtgggctgacatatatttatcctggtacatcccatgtaaccctaggtggaactaggcaaaaaggggactggaatctgtccccggatgcagaaaatagcagagagattctttcccgatgctgtgctctggagccctccctccacggagcctgcaacatcagggagaaggtgggcttgaggccctacaggccaggcgtgcgactgcagacagagctccttgcgcgagatggacagaggctgcctgtagtccaccactatggccatgggagtgggggcatctcagtgcactggggcactgctctggaggccgccaggctggtgagcgagtgtgtccatgccctcaggacccccattcccaagtcaaacctgtagatgacataaaatgacagcaaagagactgagagactgttgatcaaagcacagaacaggttcaaataacttttccactgcatgaaagtttaattagacatttctttgttttcaacattagaagtggtgtaacatgtaagctgagcacggtggcatgcctatagtcccagctacttgagaggctgaggcaggaggattgttgagcccaggagtttgagtgcaatctgggtaacattttttagaggtgccagttcccacctctaaaaaaaacaccaacaacaaaagaaatgatgcaacatgtaggcttacttaggaagtccagcattaatggcatagggcataaagctctattttttgttaaaaatacttcttatagagtaaaatttatttagaactgatgtccaaggacctatgcagatttatatgaatgttggaagctatagagattttgatatcatttggcttataaatccacaggaggagataatgtatggaaaacatttaaatcactgtcaattgcagagctgcctgtgatcttcttaggttatagccaagtcagcaacataattcctctaaataaaattacattgtgctcacacagtgctggattattacatttaattgaagacaaagcatgcttgctcctagtactagcagcaagcttttcctcccctcagctggtaatgatggtaggagacagagatgaagttgcctatgtatgtcatatcaattcaatagctgcctggggtcaaacacctaggggttgtacattccattactgtaaatgattgagagctggtttgtggtatggttggctttgcctaagcatttttgaagatgaacagcatgtgcagccaaagaactaatttgctaattaaggtggaacaatcattctgaatgaaatataatcagagtactccgcagtttgttaagaagtattggggaggaggggaatgtgtctcacaataaaatgagttggaattgttgagttaaatgaatttaacctg

SEQ ID NO: 5394 - DNA, 2021 bp, Homo sapiens
  source 1..2021: mol_type = unassigned DNA
ctctgtctctcagggcatgagaccagccaggcactgggaaacaaggtttggtgccagagattttggtggcttccaagactgctttttcagagacaggctcatggacacagcacggattgcagttgtcggggcaggtgtggtggggctctccacggctgtgtgcatctccaaactggtgccccgatgctccgttaccatcatttcagacaagtttactccagataccaccagtgatgtggcagccggaatgcttattcctcacacttatccagttggcagatatttcagagcactccgactgaagaagtgccattctgggctgacgtggttctgggatttcgaaagatgactgaggctgagctgaagaaattcccccagtatgtgtttggtcaggcttttacaaccctgaaatgtgaatgccctgcctacctcccgtggttggagaaaaggataaagggaagtggaggctggacactcactcggcgaatagaagacctgtgggaacttcatccgtcctttgacatcgtggtcaactgttcaggccttggaagcagacagcttgcaggagactcaaagattttccctgtaaggggccaagtcctccaagttcaggctccctgggtggagcattttatccgagatggcagtgggctgacatatatttatcctggtacatcccatgtaaccctaggtggaactaggcaaaaaggggactggaatctgtccccggatgcagaaaatagcagagagattctttcccgatgctgtgctctggagccctccctccacggagcctgcaacatcagggagaaggtgggcttgaggccctacaggccaggcgtgcgactgcagacagagctccttgcgcgagatggacagaggctgcctgtagtccaccactatggccatgggagtgggggcatctcagtgcactggggcactgctctggaggccgccaggctggtgagcgagtgtgtccatgccctcaggacccccattcccaagtcaaacctgtagatgacataaaatgacagcaaagagactgagagactgttgatcaaagcacagaacaggttcaaataacttttccactgcatgaaagtttaattagacatttctttgttttcaacattagaagtggtgtaacatgtaagctgagcacggtggcatgcctatagtcccagctacttgagaggctgaggcaggaggattgttgagcccaggagtttgagtgcaatctgggtaacattttttagaggtgccagttcccacctctaaaaaaaacaccaacaacaaaagaaatgatgcaacatgtaggcttacttaggaagtccagcattaatggcatagggcataaagctctattttttgttaaaaatacttcttatagagtaaaatttatttagaactgatgtccaaggacctatgcagatttatatgaatgttggaagctatagagattttgatatcatttggcttataaatccacaggaggagataatgtatggaaaacatttaaatcactgtcaattgcagagctgcctgtgatcttcttaggttatagccaagtcagcaacataattcctctaaataaaattacattgtgctcacacagtgctggattattacatttaattgaagacaaagcatgcttgctcctagtactagcagcaagcttttcctcccctcagctggtaatgatggtaggagacagagatgaagttgcctatgtatgtcatatcaattcaatagctgcctggggtcaaacacctaggggttgtacattccattactgtaaatgattgagagctggtttgtggtatggttggctttgcctaagcatttttgaagatgaacagcatgtgcagccaaagaactaatttgctaattaaggtggaacaatcattctgaatgaaatataatcagagtactccgcagtttgttaagaagtattggggaggaggggaatgtgtctcacaataaaatgagttggaattgttgagttaaatgaatttaacctg

SEQ ID NO: 5395 - DNA, 656 bp, Homo sapiens
  source 1..656: mol_type = unassigned DNA
aaacagagaagagctggtgatagctccagagctcagagaaaggaggtctctttacaagaagtctggctctcaaagcctccatcaagggagacctgcaagttgcctggggttcagtgctctagaaagttccaaggtttgtggcttgaattattctaaagaagctgaaataattgaagagaagcagaggccagctgtttttgaggatcctgctccacagagaatgctctgcacccgttgatactccagttccaacaccatcttctgagatgatcctgattcccagaatgctcttggtgctgttcctgctgctgcctatcttgagttctgcaaaagctcaggttaatccagctatatgccgctatcctctgggcatgtcaggaggccagattccagatgaggacatcacagcttccagtcagtggtcagagtccacagctgccaaatatggaaggctggactcagaagaaggggatggagcctggtgccctgagattccagtggaacctgatgacctgaaggagtttctgcagattgacttgcacaccctccattttatcactctggtggggacccaggggcgccatgcaggaggtcatggcatcgagtttgcccccatgtacaagatcaattacagtcgggatggcactcgctggatc

SEQ ID NO: 5396 - DNA, 718 bp, Homo sapiens
  source 1..718: mol_type = unassigned DNA
gctccgcgtgtgtgccccaactgtcctggaagcttcaattggaaaactccaaactttaagttttgcttatagcttcagctcaacctccatcaagggagacctgcaagttgcctggggttcagtgctctagaaagttccaaggtttgtggcttgaattattctaaagaagctgaaataattgaagagaagcagaggccagctgtttttgaggatcctgctccacagagaatgctctgcacccgttgatactccagttccaacaccatcttctgagatgatcctgattcccagaatgctcttggtgctgttcctgctgctgcctatcttgagttctgcaaaagctcaggttaatccagctatatgccgctatcctctgggcatgtcaggaggccagattccagatgaggacatcacagcttccagtcagtggtcagagtccacagctgccaaatatggaaggctggactcagaagaaggggatggagcctggtgccctgagattccagtggaacctgatgacctgaaggagtttctgcagattgacttgcacaccctccattttatcactctggtggggacccaggggcgccatgcaggaggtcatggcatcgagtttgcccccatgtacaagatcaattacagtcgggatggcactcgctggatctcttggcggaaccgtcatgggaaacaggtgctggatggaaatagtaacccctat

SEQ ID NO: 5397 - DNA, 10160 bp, Homo sapiens
  source 1..10160: mol_type = unassigned DNA
aaaggcatcttgcatcagcctgtggatgtatgcctaccaccgggctccttcaccagcaaagtggaaaaagaagcgtttcacaacaaattcttctttttgggttggggaaacgcagtggattatagctctgttttcttctttccaaaactgtgcacccctggatgaaacctccatcaagggagacctgcaagttgcctggggttcagtgctctagaaagttccaaggtttgtggcttgaattattctaaagaagctgaaataattgaagagaagcagaggccagctgtttttgaggatcctgctccacagagaatgctctgcacccgttgatatgcctcccaggacccagagggagactgtagcctcatttctgtggagacctttggctggactctcctggctctcccagagactccagttccaacaccatcttctgagatgatcctgattcccagaatgctcttggtgctgttcctgctgctgcctatcttgagttctgcaaaagctcaggttaatccagctatatgccgctatcctctgggcatgtcaggaggccagattccagatgaggacatcacagcttccagtcagtggtcagagtccacagctgccaaatatggaaggctggactcagaagaaggggatggagcctggtgccctgagattccagtggaacctgatgacctgaaggagtttctgcagattgacttgcacaccctccattttatcactctggtggggacccaggggcgccatgcaggaggtcatggcatcgagtttgcccccatgtacaagatcaattacagtcgggatggcactcgctggatctcttggcggaaccgtcatgggaaacaggtgctggatggaaatagtaacccctatgacattttcctaaaggacttggagccgcccattgtagccagatttgtccggttcattccagtcaccgaccactccatgaatgtgtgtatgagagtggagctttacggctgtgtctggctagatggcttggtgtcttacaatgctccagctgggcagcagtttgtactccctggaggttccatcatttatctgaatgattctgtctatgatggagctgttggatacagcatgacagaagggctaggccaattgaccgatggtgtgtctggcctggacgatttcacccagacccatgaataccacgtgtggcccggctatgactatgtgggctggcggaacgagagtgccaccaatggctacattgagatcatgtttgaatttgaccgcatcaggaatttcactaccatgaaggtccactgcaacaacatgtttgctaaaggtgtgaagatctttaaggaggtacagtgctacttccgctctgaagccagtgagtgggaacctaatgccatttccttcccccttgtcctggatgacgtcaaccccagtgctcggtttgtcacggtgcctctccaccaccgaatggccagtgccatcaagtgtcaataccattttgcagatacctggatgatgttcagtgagatcaccttccaatcagatgctgcaatgtacaacaactctgaagccctgcccacctctcctatggcacccacaacctatgatccaatgcttaaagttgatgacagcaacactcggatcctgattggctgcttggtggccatcatctttatcctcctggccatcattgtcatcatcctctggaggcagttctggcagaaaatgctggagaaggcttctcggaggatgctggatgatgaaatgacagtcagcctttccctgccaagtgattctagcatgttcaacaataaccgctcctcatcacctagtgaacaagggtccaactcgacttacgatcgcatctttccccttcgccctgactaccaggagccatccaggctgatacgaaaactcccagaatttgctccaggggaggaggagtcaggctgcagcggtgttgtgaagccagtccagcccagtggccctgagggggtgccccactatgcagaggctgacatagtgaacctccaaggagtgacaggaggcaacacatactcagtgcctgccgtcaccatggacctgctctcaggaaaagatgtggctgtggaggagttccccaggaaactcctaactttcaaagagaagctgggagaaggacagtttggggaggttcatctctgtgaagtggagggaatggaaaaattcaaagacaaagattttgccctagatgtcagtgccaaccagcctgtcctggtggctgtgaaaatgctccgagcagatgccaacaagaatgccaggaatgattttcttaaggagataaagatcatgtctcggctcaaggacccaaacatcatccatctattagctgtgtgtatcactgatgaccctctctgtatgatcactgaatacatggagaatggagatctcaatcagtttctttcccgccacgagccccctaattcttcctccagcgatgtacgcactgtcagttacaccaatctgaagtttatggctacccaaattgcctctggcatgaagtacctttcctctcttaattttgttcaccgagatctggccacacgaaactgtttagtgggtaagaactacacaatcaagatagctgactttggaatgagcaggaacctgtacagtggtgactattaccggatccagggccgggcagtgctccctatccgctggatgtcttgggagagtatcttgctgggcaagttcactacagcaagtgatgtgtgggcctttggggttactttgtgggagactttcaccttttgtcaagaacagccctattcccagctgtcagatgaacaggttattgagaatactggagagttcttccgagaccaagggaggcagacttacctccctcaaccagccatttgtcctgactctgtgtataagctgatgctcagctgctggagaagagatacgaagaaccgtccctcattccaagaaatccaccttctgctccttcaacaaggcgacgagtgatgctgtcagtgcctggccatgttcctacggctcaggtcctccctacaagacctaccactcacccatgcctatgccactccatctggacatttaatgaaactgagagacagaggcttgtttgctttgccctcttttcctggtcacccccactccctacccctgactcatatacacttttttttttttttacattaaagaactaaaaaaggaaaaaaaaaagcctagggcagatacaatctagtaaaagaaaatctttgatataccaaagtgttggataacaaaggctagaaaattcagataatttataaaggttaactatacttgtgcttataaatgtgcagattctacaatatttttccatgtcattctaaaagaatcttcagaaagaaaaacttgaagaatactaatgtcttgggaaacatgagattaagtttagggaaaacacttgatagatgtggagaatctgaggactcagaattcagcaactaatcacaggtggttttctaatttggcctctggacatgtctcactgtttgtatttctctctcctgtcaaagtgaatgatatattcttgaaaacccccaatttcttgaaatgggtgttctgttcattcatgggcaggggtcaggattgaagttcatatatgaaacaactggggatgtagataggaaagaatgtctgctgcaagagtgtatgaagggggattgtcatttacaaaaaaaaagtacctcatggatggaaggattcatgaatagataatggacataggaaaggaggtcaatggaggacacataacagacatgctatccaccatttatttgtgattttgtaagagggttctcttctttgtcttgttcagatattttcatgtgtgtgttttagtgagaatctgagtttttaatcagtaaagtctgatgttttgatatcttgatgttttgatggtagactcttgagttcatcttgtccaaatcttctagcattttcaaggatgaagcctctgtgggatctttgggcttggggctgaatttctcaggcataaatacctaatggccttgtctaagagggaatagatctgttctgagtgtccccaaaaaagttgtcctaggaactgatgtggagaagttacagggagactgatttccattccttattggggaaaacgaagcactcagaacatacaaggataaatgggctgccaccagaggtgaggagtctcttgtcactggagaggttaagatagaggctcaagaacaatgcaaggaaaatggaggttttcaaacacaaagtggatggtggtatgagacaatgtttaatgtccttctaactccgagagtccttgattctggagaggcacaggatgaacatctgttgctactgctgagtatacacactcttgcctctgagatggcgtgaccagcagaaaagaaagctcagggctgtggcttcagaattcatggaaacagagccactgtcaagaaggaatctgctcagagcagattctgagttttcacactccacaaatcctcagatttagtgggaagctggaaaaaggaactcttaattccaattgaggagaaacaagaaaacattacaaatcagtttcccaagctgagaaggattagccttgaccccttgggtctgcctctgttgccctcaccagtttaccttctacaacagtttctcaggaacatgtgtatttccccattcagctttcagcattgctccacgccacagcataagcatagatcccaagtccacaggctccattttgcaggtcatcttctgatcctagcaaatgtcctttccccatagttgtcctatgcctttgggctttagtctatcccaggactaactgtggagaaatcattggtttgagagtcaagagagcattggtttgggagctttaatcctctttctgcttcacactaagtgtgtcatcttggctaaatcacttggtctttctgcattttgttttcttatttataggatgaggaaattagattaaatggttttgaggtcctttcttgttctgatatgtccagtactcactggaaaattggatctataactgatgggtttagtaatctggtcatttcttgctctgaaaattgtagtcagcaaaagagatcatggaagaaatcactgtaatggtagtaatagtaacacatgccatttgtattgtgccttaggtttaccaggtgtttccaaatacattagcatatttgatatgtgcaggactagataccttgggacctgccacactccactttcaagatatgtattagcttcattagaattaaagggacttgaactcaggacctgcagcctattcttctttatccacatgtctctggtagggctacatccagatcacaccatgacttcttatagagcaagagaaaataatattattatatcttcctttgcctaaaatctctccacttattcttttttatgattctgcaccagttcactgggttattctatgattccatattttttttaaaaaaaatcatatttaaaatgaacttacaatgtctgaattttcctggccttgagtcacagaagtaatatgtttcagatggctgcccaatatgtattatcatgtaatacatatctgtgtccttttctgggatgaggaaggcttcaacttctggcactgagaactttgtattacagacacaggtttagtttctagcttagtcatgcctttagagtttagtagcacaaatccatgcaacccaacagaatacatggtgagggcctagtatgtagaatttgaaagtagttcaaatttgaattagaagaatgaagctaggacttatttggaaaaggagatagaaaaaaaatgatcagaaactgtggggccttattacctttgcagtaagttatcttcttcatgatatatgtgaattattttatgtgcagattgtgttttgggattgtcagatctaaacttatattcttgctggctaatgtgctgatagccaggtctgaaacttgatgtgctatccagacacatatgatcagaaaagatctagagtgcaaagaggtgcctgaggagcaaaatgtggttttaatgttgtggaaagatcacttgcaagtatataagactgtataaagaagaggactgtgtgcaagtggggtgaaaaaaaaggatacgtgaatgtgcatatgactgaatagggaggaaggtcagggctagaaaggaggctacataaaaaggggcaatggagaatgcacaggaaagacacaggggaaggtcaagtcgagcaaggtagaaacaggagtagctagagccattgggaatccattttgaaacaagaaggagttttgaaagggaataggaaagtaagtgtcttgaagtaaaagataaatatggatggagaaagaagaaattctggatgatagagatgataaaaatatttattaagaaatgaagtcaggttcagtgtatgaaatggaaaggaatttttcagaattttaagaaaggggaagttcctcttggaaaagatatagcaaccatcggggaatgaccttttcatttcagaagtggatgaggaaggtggtgtgagcatcaggtatattctggaccatttcaagtgctggtgagaagaaaggaactctttgcctgaactgggcttggttttccaagtgctgctttggaaatgaagacccagagatgcagagcttatggtagttcataaatcttcatgttctattatctttcatctgccaataaagttcattttcaataatgtccaccattgctgtgcccagaataaccacaggcaaacatcaaaacaatacgcataagttagacaagattaaatcttgtctgatatctgcacaaacagatatgcaccatgttggaaacatgtgttttcctagtcccatccaggcttcccacaagaaagccatgatgtgggtctaaaccatatgttttgagtaaaggagaatagaagaaggggagtgtccgcaaaatggaaagagatgaagatgttccaaggaagtatgctgaaacagaacagtgaatgttttgcccaaaactacaaaaataaaagaaaaaaagaaaattgcaatacatggctactaagtctttgatcataagtcgaatttatagacctggaatttgccatcctagtctttcctttttagtaagacttctgtcctctggcagtgcatatggtaggtctctaatgtttcttcatctccaggaagatgcagatccttatttttgctgggaaatccttctaaatagaaatgtaacatttttataaaaacagattaatgtgtttttcacttagtaaatgttttcaagagctgaattgagaaggaaagagactggagtggttaatggtgatttgatttctggcattctgagttttctgctacaattagctgcattacttggtgccaaagagcagtggggaattgttgagttgctgtatcctttaaaaaaaaacaaaaaacttgttattttgaaagaacttaaggctcacaagatgttacaaaaatagtagagtggccttaccctagatccagttttccccatttataacatttcacttagtccattttcggaaccagaaaattaacattggcataatgctattaactaaactacagaccttttttcaatttcgccagtttttccacacatattcatttagttgctggatacttttaattcttgctgatttgtaaactggccttgcttggatacaacaggaaagatactatctggataaagttctacagttttagagagactattaacacattaatgtgttcctttgtcatgagcaataccctgcctacactgcttctaaattttctgatttgtttggctgtttggcatctgaaacaatccaagacaaacttagaaagattaggcaacacaaaacacagtaagacctgttcatagcttgttgtctagaaaaccaggtagcaggatattctagatgcttcctgctgcttctacgtgagtaggattagcactggggacaaaataaggagtttagagtaaaccagtatttcagtcaagagttagttggcacttagttaatggcactggaaatagcttgtggagagaatagaatacaatggtatagactcctaatgtttgataaaatactattttcagagtggtagagaggttttatttgcctaaatagccgttattaaatggaataacaaccacattagaccaaattaattgcaaacacagcggcaacctggggagaagttgaaactccagttttgtggattacagttttgagttttatgattgacatttttaagtcccctatttaaggggtcaagattataacaatgtgtgtcttactaagtttctaggtcattgtgagcacttgataaatatttgctgaatgttgtttttttgaatgaacataagatagaaacaaaaacttctcatccagttaactagagtgaatgtagggagaattgttttgcttgtaacatggagagtttattttcaagtgaggaaagagaaaaaaattactcagacttgttcctggtgaagtgcattctctgtttgtatactttttgatggagaaattgatctatagaactgcttaattttttgaggcatttagacagcaatgaaaggtagttctccacaggacaccgaatcaaaaggagagaccagactctggcctcatacccagcctatttgaaacaagctatctagtttctcctgcagacaccttgtcaacaacatgcaacagtgtcaggtgccttgcaggaaaataatctgagtcccaagctagcctgtgctcatccacaatcacaatgaacatgtcaaggaagaatttgcagagactcaagggaagcacaatgggataaggtaatcactttcagtgaaaaactgttttcttgaaaacaggcttggacacaattgaaagctggcttcctgcaaacacaccaagagtctgtaatctagcctatccattatatgtcctttattattcatgatatcctattcttctaccttgttgcctggtaactttttctgaggactgagtttctgcagcgatgtggtgcactcttcctgtgatgaggaaacatctgggcccccttctgcaggctttggaagatgatgtgtcttgtcaaggggtaaagggcaaatggatttaatttctgcttaaaactatcatagacgttccaaatagaatatgtaaaatttctctgtattagaaaaagaaacgtgataccaattgtatattttcttttctttatttattctctgtaagtctgtcagatgataaattgtaaataacaatgattaaagagtcatgctactgatggatctccctttctgtataaacagtgccagttctgggctttgtaacctttgctctttatagtctttcattcctggggaagtgatggggcatgggcccagagctggggtgtatgtggtatggacacctgtttgtggggctttccagcaaaggattatttaaatagacctctaacatatgagttgactgtttattgggaagaaagcatcttggtctctgacatatccaaacatacgagacactgggattttacgtcctcacattaattagtccagttctggggaatccagtctagaattaactggtgatcccttatcgttatggttacagacttgtcttgtttgatacacagaaatcctttttaaatccaaatatagtctgtctcagactacctgcacatgcacaaaccaaaaaaaactatgaaaaccagaatttagactcagtcattatactagagattagaatgaaacgaccccaaacaacccatttcttacctggtctctgagaataagtttatacttttagttttctgagaatatttctcagaatatgtgagttttctgagcacatttttcagcatggggtatggtagataaatcacagggccaaggtttggcagggatagatgggatcattgtgtaccctattgttcttctgatttccaggagaacagaatgagcccatgcaaaacataaacttatgatgattaaaaaaaacacacctatccattcactcatcaataaaaacatattatgatggttatcaagctgtgtcctatgagtgataaaatatttgtaaaatataaaattaaatggcatctattttgaa

SEQ ID NO: 5398 - DNA, 3096 bp, Homo sapiens
  source 1..3096: mol_type = unassigned DNA
catcttgcatcagcctgtggatgtatgcctaccaccgggctccttcaccagcaaagtggaaaaagaagcgtttcacaacaaattcttctttttgggttggggaaacgcagtggattatagctctgttttcttctttccaaaactgtgcacccctggatgaaacctccatcaagggagacctgcaagttgcctggggttcagtgctctagaaagttccaaggtttgtggcttgaattattctaaagaagctgaaataattgaagagaagcagaggccagctgtttttgaggatcctgctccacagagaatgctctgcacccgttgatactccagttccaacaccatcttctgagatgatcctgattcccagaatgctcttggtgctgttcctgctgctgcctatcttgagttctgcaaaagctcaggttaatccagctatatgccgctatcctctgggcatgtcaggaggccagattccagatgaggacatcacagcttccagtcagtggtcagagtccacagctgccaaatatggaaggctggactcagaagaaggggatggagcctggtgccctgagattccagtggaacctgatgacctgaaggagtttctgcagattgacttgcacaccctccattttatcactctggtggggacccaggggcgccatgcaggaggtcatggcatcgagtttgcccccatgtacaagatcaattacagtcgggatggcactcgctggatctcttggcggaaccgtcatgggaaacaggtgctggatggaaatagtaacccctatgacattttcctaaaggacttggagccgcccattgtagccagatttgtccggttcattccagtcaccgaccactccatgaatgtgtgtatgagagtggagctttacggctgtgtctggctagatggcttggtgtcttacaatgctccagctgggcagcagtttgtactccctggaggttccatcatttatctgaatgattctgtctatgatggagctgttggatacagcatgacagaagggctaggccaattgaccgatggtgtgtctggcctggacgatttcacccagacccatgaataccacgtgtggcccggctatgactatgtgggctggcggaacgagagtgccaccaatggctacattgagatcatgtttgaatttgaccgcatcaggaatttcactaccatgaaggtccactgcaacaacatgtttgctaaaggtgtgaagatctttaaggaggtacagtgctacttccgctctgaagccagtgagtgggaacctaatgccatttccttcccccttgtcctggatgacgtcaaccccagtgctcggtttgtcacggtgcctctccaccaccgaatggccagtgccatcaagtgtcaataccattttgcagatacctggatgatgttcagtgagatcaccttccaatcagatgctgcaatgtacaacaactctgaagccctgcccacctctcctatggcacccacaacctatgatccaatgcttaaagttgatgacagcaacactcggatcctgattggctgcttggtggccatcatctttatcctcctggccatcattgtcatcatcctctggaggcagttctggcagaaaatgctggagaaggcttctcggaggatgctggatgatgaaatgacagtcagcctttccctgccaagtgattctagcatgttcaacaataaccgctcctcatcacctagtgaacaagggtccaactcgacttacgatcgcatctttccccttcgccctgactaccaggagccatccaggctgatacgaaaactcccagaatttgctccaggggaggaggagtcaggctgcagcggtgttgtgaagccagtccagcccagtggccctgagggggtgccccactatgcagaggctgacatagtgaacctccaaggagtgacaggaggcaacacatactcagtgcctgccgtcaccatggacctgctctcaggaaaagatgtggctgtggaggagttccccaggaaactcctaactttcaaagagaagctgggagaaggacagtttggggaggttcatctctgtgaagtggagggaatggaaaaattcaaagacaaagattttgccctagatgtcagtgccaaccagcctgtcctggtggctgtgaaaatgctccgagcagatgccaacaagaatgccaggaatgattttcttaaggagataaagatcatgtctcggctcaaggacccaaacatcatccatctattagctgtgtgtatcactgatgaccctctctgtatgatcactgaatacatggagaatggagatctcaatcagtttctttcccgccacgagccccctaattcttcctccagcgatgtacgcactgtcagttacaccaatctgaagtttatggctacccaaattgcctctggcatgaagtacctttcctctcttaattttgttcaccgagatctggccacacgaaactgtttagtgggtaagaactacacaatcaagatagctgactttggaatgagcaggaacctgtacagtggtgactattaccggatccagggccgggcagtgctccctatccgctggatgtcttgggagagtatcttgctgggcaagttcactacagcaagtgatgtgtgggcctttggggttactttgtgggagactttcaccttttgtcaagaacagccctattcccagctgtcagatgaacaggttattgagaatactggagagttcttccgagaccaagggaggcagacttacctccctcaaccagccatttgtcctgactctgtgtataagctgatgctcagctgctggagaagagatacgaagaaccgtccctcattccaagaaatccaccttctgctccttcaacaaggcgacgagtgatgctgtcagtgcctggccatgttcctacggctcaggtcctccctacaagacctaccactcacccatgcctatgccactccatctggacatttaatgaaactgagagacagaggcttgtttgctttgccctcttttcctggtcacccccactccctacccctgactcatatacact

SEQ ID NO: 5399 - DNA, 558 bp, Homo sapiens
  source 1..558: mol_type = unassigned DNA
cttaaagttgatgacagcaacactcggatcctgattggctgcttggtggccatcatctttatcctcctggccatcattgtcatcatcctctggaggcagttctggcagaaaatgctggagaaggcttctcggaggatgctggatgatgaaatgacagtcagcctttccctgccaagtgattctagcatgttcaacaataaccgctcctcatcacctagtgaacaagggtccaactcgacttacgatcgcatctttccccttcgccctgactaccaggagccatccaggctgatacgaaaactcccagaatttgctccaggggaggaggagtcaggtgaggatgatgtggtgggcagggtgtcaagggagaaacctcagcaagcatcaggtaggtatgacacgcctgctcccagttcattgcatctatttttagtctctgctaacctcctgagaagtccacattctctttctagatttggtctgccgctgctcctggcctaatttgagcaactctcctttgctactgaatataagatgtgtggagggacccacatacca

SEQ ID NO: 5400 - DNA, 693 bp, Homo sapiens
  source 1..693: mol_type = unassigned DNA
catctttatcctcctggccatcattgtcatcatcctctggaggcagttctggcagaaaatgctggagaaggcttctcggaggatgctggatgatgaaatgacagtcagcctttccctgccaagtgattctagcatgttcaacaataaccgctcctcatcacctagtgaacaagggtccaactcgacttacgatcgcatctttccccttcgccctgactaccaggagccatccaggctgatacgaaaactcccagaatttgctccaggggaggaggagtcaggctgcagcggtgttgtgaagccagtccagcccagtggccctgagggggtgccccactatgcagaggctgacatagtgaacctccaaggagtgacaggaggcaacacatactcagtgcctgccgtcaccatggacctgctctcaggaaaagatgtggctgtggaggagttccccaggaaactcctaactttcaaagagaagctgggagaaggacagtttggggaggtgagttgattctttgattcccttatagctcgaagaaggtggttggataaaaatgatcagtagaacaaagagtcccttccagaggtggattcacaacagaatgtctcttccatttgtctctccttgcattgtcctctggatttcagtattgggtcaacctaatctttgtcaaatagctgtggagttcc

SEQ ID NO: 5401 - DNA, 2709 bp, Homo sapiens
  source 1..2709: mol_type = unassigned DNA
agaggggtctggagttcctaggtgaaccccagcagcctaaccctgtcaagtctgtcgagcctctggctggtcacacgtgctgcggaatccactcagctttcctcaggtgcagtcaggtccatcctgcagagggaccttctgcggacctgttctttcacctccctaacctgaagattgtattcaaaccaccgtggatcgctcacgtaaaatggtcactgcgcctaacacctgggatcccgtaacccttatctatcttggcttcagagagttttttgactagttccaactttgctgaagcttgtcaaagggatgagtcatgtggtggtgaaaaatgaccctgaactggaccagcagcttgctaatctggacctgaactctgaaaaacagagtggaggagcaagtacagcgagcaaagggcgctatatacctcctcacttaaggaacagagaagcatctaaaggattccatgataaagacagttcaggttggagttgcagcaaagataaggatgcatatagcagttttgggtctcgagattctagaggaaagcctggttatttcagtgaacgtggaagtggatcaaggggaagatttgatgatcgtggacggagtgactatgatggtattggcaatcgtgaaagacctggctttggcagatttgaacggagtggacatagtcgttggtgtgacaagtcagttgaagatgattggtcaaaaccacttccaccaagtgaacgcttggagcaagaactgttttctggaggaaacacggggattaactttgagaaatatgatgatataccagtagaggcaaccggcagtaactgtcctccacatattgagaattttagcgatattgacatgggagaaattatcatggggaacattgaacttactcgctatactcgtcctactccagtgcaaaaacatgccattcctattattaagggaaaaagagacttaatggcttgtgcccaaacaggatctgggaaaactgcagcatttcttttacccatactgagtcagatatatacagatggtccaggagaagctttgaaggctgtgaaggaaaatggaaggtatgggcgccgcaaacaatatccaatatccttggttttagccccaacaagagaattggctgtacagatctatgaggaagccagaaaattttcctaccgatctagagttcgtccttgtgtagtttatggtggtgctgatattggtcagcagattcgggacttagaacgtggatgccacttgttagtagccactccaggacgtctagtggatatgatggaaagaggaaagattggattagacttctgcaagtacttagtgttggatgaagctgataggatgctggatatgggatttgaacctcagatacgtcgtatagttgaacaagatactatgccaccaaagggcgttcgtcacaccatgatgtttagtgctacttttcctaaggaaatacagatgcttgctcgtgactttttggatgaatatatctttttggctgtaggcagagtaggctctacctctgagaacatcacacagaaagtagtttgggtggaagacttagataaacggtcatttctactggacattttaggtgcaacagggagtgattcacttactttagtgtttgtggagaccaaaaagggagcagattccctggaggatttcttataccatgaaggatatgcttgtactagtattcatggagaccggtcacagagagatcgagaggaggcccttcaccagtttcgctcaggaaaaagcccaattctagtggctacagctgtggcagcacgaggactagacatttcaaatgtgagacatgttatcaattttgatttgccaagtgatattgaagaatatgtgcatcgtattggccgtacaggacgtgtaggaaacctgggccttgccacctcattctttaatgaaaaaaatatgaatattacaaaggatttgttggatcttcttgtagaagctaaacaagaagtgccttcttggttggaaaatatggcttatgaacaccactacaagggtggcagtcgtggacgatctaaaagtaatagattcagtggaggatttggtgccagagactatcgacaaagtagtggttccagcagttctggctttggtgctagtcgcggaagcagcagccgcagtggtggaggtggttacggcaacagcagaggatttggtggaggtggctatggaggcttctacaatagtgatggatatggaggaaattataactcccagggggttgactggtggggcaactgaatctgctttgcagcaaagtcacccttacaaagaagctaatatggaaaccacatgtaacttagccagactatattgtgtagcttcaagaacttgcagtacattaccagctgtgattctcctgataattcaagggagctcaaagtcacaagaagaaaaatgaaaggaaaaaacagcagccctattcagaaattggtttgaagatgtaattgctctagtttggattaaactcttcccctcctgctttagtgccaccccaaactgcatttataattttgtgactgaggatcgtttgtttgttaacgtactgtgactttaactttagacaacttactactttgatgtcctgttggctcagtaatgctcacgataccaattgttttgacaaaataaatttactaaacttggcctaaaatcaaa

SEQ ID NO: 5402 - DNA, 1049 bp, Homo sapiens
  source 1..1049: mol_type = unassigned DNA
ggagttcctaggtgaaccccagcagcctaaccctgtcaagtctgtcgagcctctggctggtcacacgtgctgcggaatccactcagctttcctcaggtgcagtcaggtccatcctgcagagggaccttctgcggacctgttctttcacctccctaacctgaagattgtattcaaaccaccgtggatcgctcacgtaaaatggtcactgcgcctaacacctgggatcccgtaacccttatctatcttggcttcagagagttttttgactagttccaactttgctgaagcttgtcaaagctgtaggtccagtgtaagagttccgctattcggtctcacacctacagtggactacccgatttttcgcttctcttcagggatgagtcatgtggtggtgaaaaatgaccctgaactggaccagcagcttgctaatctggacctgaactctgaaaaacagagtggaggagcaagtacagcgagcaaagggcgctatatacctcctcacttaaggaacagagaagcatctaaaggattccatgataaagacagttcaggttggagttgcagcaaagataaggatgcatatagcagttttgggtctcgagattctagaggaaagcctggttatttcagtgaacgtggaagtggatcaaggggaagatttgatgatcgtggacggagtgactatgatggtattggcaatcgtgaaagacctggctttggcagatttgaacggagtggacatagtcgttggtgtgacaagtcagttgaagatgattggtcaaaaccacttccaccaagtgaacgcttggagcaagaactgttttctggaggaaacacggggattaactttgagaaatatgatgatataccagtagaggcaaccggcagtaactgtcctccacatattgagaattttagcgatattgacatgggagaaattatcatggggaacattgaacttactcgctatactcgtcctactccagtgcaaaaacatgccattcctattattaagggaaaaagagacttaatggcttgtgcccaaacag

SEQ ID NO: 5403 - DNA, 4445 bp, Homo sapiens
  source 1..4445: mol_type = unassigned DNA
gcgtaggctaaccagtgcgcttaatagctgtaggtccagtgtaagagttccgctattcggtctcacacctacagtggactacccgatttttcgcttctcttcagggatgagtcatgtggtggtgaaaaatgaccctgaactggaccagcagcttgctaatctggacctgaactctgaaaaacagagtggaggagcaagtacagcgagcaaagggcgctatatacctcctcacttaaggaacagagaagcatctaaaggattccatgataaagacagttcaggttggagttgcagcaaagataaggatgcatatagcagttttgggtctcgagattctagaggaaagcctggttatttcagtgaacgtggaagtggatcaaggggaagatttgatgatcgtggacggagtgactatgatggtattggcaatcgtgaaagacctggctttggcagatttgaacggagtggacatagtcgttggtgtgacaagtcagttgaagatgattggtcaaaaccacttccaccaagtgaacgcttggagcaagaactgttttctggaggaaacacggggattaactttgagaaatatgatgatataccagtagaggcaaccggcagtaactgtcctccacatattgagaattttagcgatattgacatgggagaaattatcatggggaacattgaacttactcgctatactcgtcctactccagtgcaaaaacatgccattcctattattaagggaaaaagagacttaatggcttgtgcccaaacaggatctgggaaaactgcagcatttcttttacccatactgagtcagatatatacagatggtccaggagaagctttgaaggctgtgaaggaaaatggaaggtatgggcgccgcaaacaatatccaatatccttggttttagccccaacaagagaattggctgtacagatctatgaggaagccagaaaattttcctaccgatctagagttcgtccttgtgtagtttatggtggtgctgatattggtcagcagattcgggacttagaacgtggatgccacttgttagtagccactccaggacgtctagtggatatgatggaaagaggaaagattggattagacttctgcaagtacttagtgttggatgaagctgataggatgctggatatgggatttgaacctcagatacgtcgtatagttgaacaagatactatgccaccaaagggcgttcgtcacaccatgatgtttagtgctacttttcctaaggaaatacagatgcttgctcgtgactttttggatgaatatatctttttggctgtaggcagagtaggctctacctctgagaacatcacacagaaagtagtttgggtggaagacttagataaacggtcatttctactggacattttaggtgcaacagggagtgattcacttactttagtgtttgtggagaccaaaaagggagcagattccctggaggatttcttataccatgaaggatatgcttgtactagtattcatggagaccggtcacagagagatcgagaggaggcccttcaccagtttcgctcaggaaaaagcccaattctagtggctacagctgtggcagcacgaggactagacatttcaaatgtgagacatgttatcaattttgatttgccaagtgatattgaagaatatgtgcatcgtattggccgtacaggacgtgtaggaaacctgggccttgccacctcattctttaatgaaaaaaatatgaatattacaaaggatttgttggatcttcttgtagaagctaaacaagaagtgccttcttggttggaaaatatggcttatgaacaccactacaagggtggcagtcgtggacgatctaaaagtaatagattcagtggaggatttggtgccagagactatcgacaaagtagtggttccagcagttctggctttggtgctagtcgcggaagcagcagccgcagtggtggaggtggttacggcaacagcagaggatttggtggaggtggctatggaggcttctacaatagtgatggatatggaggaaattataactcccagggggttgactggtggggcaactgaatctgctttgcagcaaagtcacccttacaaagaagctaatatggaaaccacatgtaacttagccagactatattgtgtagcttcaagaacttgcagtacattaccagctgtgattctcctgataattcaagggagctcaaagtcacaagaagaaaaatgaaaggaaaaaacagcagccctattcagaaattggtttgaagatgtaattgctctagtttggattaaactcttcccctcctgctttagtgccaccccaaactgcatttataattttgtgactgaggatcgtttgtttgttaacgtactgtgactttaactttagacaacttactactttgatgtcctgttggctcagtaatgctcacgataccaattgttttgacaaaataaatttactaaacttggcctaaaatcaaaccttggcacagaggtatgatacaactttaacaggagtcatcaattcatccataaatataaaaagggaaaaaaacttaaggcagtagtctgcattaggactgtttgagttttgcagacttggggttgggagaacatcttaaagcattaaagcatagttttttgtatggccaaccttactaaattaagttctgacttgctcactctatcctggataggcacttgggaacttacactctttaagccattccagtcatgatgaggtggaatgtatcagtataccaattaatatttttgaaagagctcttttaggttaatttaagtacagcaatttctcatgtaatgtttagggagtttattctaacctaggcaaacggcatgctatcacaagaaaggtttaaagctttgataaaatgggggagatttaatcagtttttttaatgcctgctataaaaatttgaaatattagaatggccgaccatggcagtgaccaggcctcactacaggcctggttggattctggtctttaatgcatgctagtgttgatgttttttggtcaagaacggtttaaacaggaaggattgtgcagcaggctttaatttaatgtagattcatactgctctgttaaagctgcattgaaatgttaaaatggcttacacttgcagactttgcaaatcttaagactaacaaatccttgaaatcacacagcttgcaaatacgtactaaactgcacaaggtgtgtgttctatatgtgcagttttagcgtattttagttgcataggtttccatggtatttatagtctcttgtgctaaatttggccaaagatgattgtccaccactaaaaatgcctctcccacttggaattctgtactgattttgtggccagatgcaatgatctttaaaaacaaatcttttcaatggcataagaagttgacaaaaatttcttaaagtgcaatagattttcaagtgtattgtgccttgttctaaaacttttaagtaggtgcacttgacagtattgaggtcatttgttaaggtgctatttcaattagtgtaggtttagactcttgtacatttctcccataactttttacaaagtattttgttgcacattcagagaattttatatatatatgtcttgtgtgggtgtcctcgaccttccaatcttatttcgtctcttggagattgttgaatgcagccagtgaagaagtagattcctaaattttattggggaccatggaatggtagttgagaagaaaactatttgcacacaacagattttagatactttttgctgctagttgtgtaatatttattgaacattttgacaaatatttatttttgtaagcctaaaaatgattctttgaaagtttaaagaaacttgaccaaaagacagtacaaaaaacactggcacttgaatgttgaatgtcaccgtatgtgaaataatatattttggggtagtgtgagcttttaatgttaagtctgttaaacttgagtcaaattaagcagacccggcattggcaatgtagctgtaattttctgacaaaatttaagacaaaattgtcaacttgaaactaaaacatgccaaggttttgatatacttgtcttaagatattaatgaaacacttctgaacactgataggaagtgtccacatccacaaagtttctcttgagttttgttatgtgttttgttgtgtttgattttcagtgattgtctggtatatttacagtcctcaaacatggttatttctgtcagtgacttaacattcggttttatcagccagcagtattcttcagtaaataaagaatggaattgctgaatgtaatcattgaacctcgagtcactgtaaaagttcagtaattgcttattgtattagttttagatgctggcactgcatgtgctctgtttattctgattttactaaaataaaaagttcaaaagtc

SEQ ID NO: 5404 - DNA, 528 bp, Homo sapiens
  source 1..528: mol_type = unassigned DNA
gcttaatagctgtaggtccagtgtaagagttccgctattcggtctcacacctacagtggactacccgatttttcgcttctcttcagggatgagtcatgtggtggtgaaaaatgaccctgaactggaccagcagcttgctaatctggacctgaactctgaaaaacagagtggaggagcaagtacagcgagcaaagggcgctatatacctcctcacttaaggaacagagaagcatctaaaggtacgtctttaaggcaactttgtagacctaacctttagcagctaatcaaagcctagggaagaaagtaactttaggaggtctataaatgttttttgtcccctcctgtgcctctttcagactgtctttaagaactagcactttctgtttttggaacagtttgtataatgttgaatgatggatagttgtttcctttggcaaactgagcccaaagaatctgagttttgtatagtggtttatctgtttgtaaacatttatgttttgaaatttgaaaccagtgtatttgtggaaa

SEQ ID NO: 5405 - DNA, 792 bp, Homo sapiens
  source 1..792: mol_type = unassigned DNA
gaaggatggctgccgcgtgcttctcttgaccctgtagaaataatggaaattggacgcccgcggaaagacacctggaagcttgctaatctggacctgaactctgaaaaacagagtggaggagcaagtacagcgagcaaagggcgctatatacctcctcacttaaggaacagagaagcatctaaaggattccatgataaagacagttcaggttggagttgcagcaaagataaggatgcatatagcagttttgggtctcgagattctagaggaaagcctggttatttcagtgaacgtggaagtggatcaaggggaagatttgatgatcgtggacggagtgactatgatggtattggcaatcgtgaaagacctggctttggcagatttgaacggagtggacatagtcgttggtgtgacaagtcagttgaagatgattggtcaaaaccacttccaccaagtgaacgcttggagcaagaactgttttctggaggaaacacggggattaactttgagaaatatgatgatataccagtagaggcaaccggcagtaactgtcctccacatattgagaattttagcgatattgacatgggagaaattatcatggggaacattgaacttactcgctatactcgtcctactccagtgcaaaaacatgccattcctattattaagggaaaaagagacttaatggcttgtgcccaaacaggatctgggaaaactgcagcatttcttttacccatactgagtcagatatatacagatggtccaggagaagctttgaaggctgtgaag

SEQ ID NO: 5406 - DNA, 507 bp, Homo sapiens
  source 1..507: mol_type = unassigned DNA
attcaactgatacccaagtacgtttctagagcgatgataatctaacatgggctaaatcgtgtacttctgattgcttgtgctattcagatttgatgatcgtggacggagtgactatgatggtattggcaatcgtgaaagacctggctttggcagatttgaacggagtggacatagtcgttggtgtgacaagtcagttgaagatgattggtcaaaaccacttccaccaagtgaacgcttggagcagtaagtttttgaaatgtatgttaattgttatgaaatttattgcttagtataacatgtatgtaataattgtttgatttcagagaactgttttctggaggaaacacggggattaactttgagaaatatgatgatataccagtagaggcaaccggcagtaactgtcctccacatattgagaattttagcgatattgacatgggagaaattatcatggggaacattgaacttactcgctatactcgtcctactccagtgcaaaaacat

SEQ ID NO: 5407 - DNA, 572 bp, Homo sapiens
  source 1..572: mol_type = unassigned DNA
agaactgttttctggaggaaacacggggattaactttgagaaatatgatgatataccagtagaggcaaccggcagtaactgtcctccacatattgagaattttagcgatattgacatgggagaaattatcatggggaacattgaacttactcgctatactcgtcctactccagtgcaaaaacatgccattcctattattaagggaaaaagagacttaatggcttgtgcccaaacaggatctgggaaaactgcagcatttcttttacccatactgagtcagatatatacagatggtccaggagaagctttgaaggctgtgaaggtaaaggttttgttataaaatcagacatttttgttttaaaaagctttgcaaagccctgttgacttttctaacggatgccagatacaccttattttcatttttttttttttacccctttcacccactgaaaataagtttgtagatgtaatctgcaaattataaagagaaagtgatgaatttttaaaaacaattgaagttttgggttatgaatttaaaattatatttatgttttaggaaaatggaaggtatg

SEQ ID NO: 5408 - DNA, 621 bp, Homo sapiens
  source 1..621: mol_type = unassigned DNA
tgatgatataccagtagaggcaaccggcagtaactgtcctccacatattgagaattttagcgatattgacatgggagaaattatcatggggaacattgaacttactcgctatactcgtcctactccagtgcaaaaacatgccattcctattattaagggaaaaagagacttaatggcttgtgcccaaacaggatctgggaaaactgcagcatttcttttacccatactgagtcagatatatacagatggtccaggagaagctttgaaggctgtgaaggaaaatggaaggtatgggcgccgcaaacaatatccaatatccttggttttagccccaacaagagaattggctgtacagatctatgaggaagccagaaaagtaaaatattcattttagtgattattgcttttcttatttgtcaaatgatgttgttatagtcactgacatgttctttgcttaaagttttcctaccgatctagagttcgtccttgtgtagtttatggtggtgctgatattggtcagcagattcgggacttagaacgtggatgccacttgttagtagccactccaggacgtctagtggatatgatggaaagaggaaagattggattagacttctgcaa

SEQ ID NO: 5409 - DNA, 517 bp, Homo sapiens
  source 1..517: mol_type = unassigned DNA
gtatatgtcaaattgtgacactgcaatagttactacttgagttactatattagtgcaattaattacacaactatatatagtaattagtttctcagatctaataatccagtatcaactgagggttttcgtaataggtacttagtgttggatgaagctgataggatgctggatatgggatttgaacctcagatacgtcgtatagttgaacaagatactatgccaccaaagggcgttcgtcacaccatgatgtttagtgctacttttcctaaggaaatacagatgcttgctcgtgactttttggatgaatatatctttttggctgtaggcagagtaggctctacctctgagaacatcacacagaaagtagtttgggtggaagacttagataaacggtcatttctactggacattttaggtgcaacagggagtgattcacttactttagtgtttgtggagaccaaaaagggagcagattccctggaggatttcttataccatgaaggatatgcttgtacta

SEQ ID NO: 5410 - DNA, 1830 bp, Homo sapiens
  source 1..1830: mol_type = unassigned DNA
gtcggcgcgcgccggaagcgcggatcacacgggcccctacaaggggcccctacaagcggccacaaggatggcaggcttcgcggagctcgggctgtcatcgtggctcgtggaacaatgtcggcagctgggtttgaagcagcccacgcccgtgcagctcggctgcatccccgccatcctggagggtcgagactgcttgggctgtgctaagacaggcagtgggaagacagcagcgtttgtccttcccatcttgcagaagctgtctgaggatccctatggcatcttctgcctcgtcctgacacccaccagggagctggcctaccagatcgcagagcagttccgggtcctggggaagcctctagggctgaaagactgcatcatcgtcggtggcatggacatggtggcccaggcgctggagctctctcggaaaccacacgtggtcatcgccacgccggggcgcctggcagatcacctgcgcagctccaacacttttagtataaagaagatccgcttcctggtgatggatgaggcagaccggctgctggaacagggctgcactgacttcaccgtggacctggaggccatcctggcggctgtgccggcccgcaggcagacactgctgttcagcgccacgctgaccgacacactccgggagctgcagggtctggccaccaaccagcccttcttctgggaagcacaggccccggtgagcaccgtggagcagctggaccagcgctacctgctggtgcctgagaaggtcaaggacgcctacctggtccacctgatccagcgcttccaggatgagcacgaggactggtccattatcatcttcaccaacacgtgcaagacctgccagattctgtgcatgatgctgcgcaaattcagcttccccaccgtggctctgcactccatgatgaagcagaaagaacgctttgccgccctagccaagttcaagtccagcatctaccggatcctgatcgcaacagacgtggcctcccggggcctggacatccctacggtacaggtggtcatcaaccacaacacccccgggctccccaagatctacatccaccgagtcggccggacggcccgtgcagggcggcagggtcaggccatcacgctggtgacacagtacgacatccacctggtgcacgccatcgaggagcagatcaagaagaagctggaggagttctccgtggaagaggccgaggtgctacagatcctcacacaggtcaacgtggtgcgaagagagtgtgagatcaaactggaggcggcccactttgacgaaaagaaggagatcaacaaacggaagcagctgatcctggaggggaaggaccctgacctggaggccaagcgcaaggctgagctggccaagatcaagcagaagaaccggcgcttcaaggagaaggtggaggagacgctgaagcgacagaaggctggcagggctggccacaaggggcgtccacccaggacaccgtctgggtcccactcaggcccagtcccctcccagggcctggtctgagccccacacggccatctgcccagtccttgactcgtccatggagctgagggtcggaggaaccttccttgggggcagcagcccttcccgggggcctacccagtgccccacagcagaacccgtgggcgctcgtgttgtgcgggccctgctcctctgccccgaaaccactggctggtcccttccctgagccctggccaagattcaggctgcaggggaagaaagaacatgaccgggaggttgtgaccccaacccaaggtcaccccccaggggtgccgcatacaggaggtgcttaataaacgggtcttttgacttcc

SEQ ID NO: 5411 - DNA, 583 bp, Homo sapiens
  source 1..583: mol_type = unassigned DNA
aaggggcccctacaagcggccacaaggatggcaggcttcgcggagctcgggctgtcatcgtggctcgtggaacaatgtcggcagctgggtttgaagcagcccacgcccgtgcagctcggctgcatccccgccatcctggagggtcgagactgcttgggctgtgctaagacaggcagtgggaagacagcagcgtttgtccttcccatcttgcagaagctgtctgaggatccctatggcatcttctgcctcgtcctgacacccaccagggagctggcctaccagatcgcagagcagttccgggtcctggggaagcctctagggctgaaagactgcatcatcgtcggtggcatgggtacgggagctgggaggcgggggaagccccagcatgggaccctagcagctttggaccacctgcccagccctgcctctcatgctctgtcccccagacatggtggcccaggcgctggagctctctcggaaaccacacgtggtcatcgccacgccggggcgcctggcagatcacctgcgcagctccaacacttttagtataaagaagatccgcttcctggtgagttcgccccgc

SEQ ID NO: 5412 - DNA, 772 bp, Homo sapiens
  source 1..772: mol_type = unassigned DNA
aaggggcccctacaagcggccacaaggatggcaggcttcgcggagctcgggctgtcatcgtggctcgtggaacaatgtcggcagctgggtttgaagcagcccacgcccgtgcagctcggctgcatccccgccatcctggagggtcgagactgcttgggctgtgctaagacaggcagtgggaagacagcagcgtttgtccttcccatcttgcagaagctgtctgaggatccctatggcatcttctgcctcgtcctgacacccaccaggggtcctgcagaattaaacaagatggccccggtgcagtggctcacacctgtaatcccagcactttgggagctccagggagctggcctaccagatcgcagagcagttccgggtcctggggaagcctctagggctgaaagactgcatcatcgtcggtggcatgggtacgggagctgggaggcgggggaagccccagcatgggaccctagcagctttggaccacctgcccagccctgcctctcatgctctgtcccccagacatggtggcccaggcgctggagctctctcggaaaccacacgtggtcatcgccacgccggggcgcctggcagatcacctgcgcagctccaacacttttagtataaagaagatccgcttcctggtgagttcgccccgcccctgcagacctcaggagctgggctcggagcctccaggcccaatgtcagagcctggggcaccatctcatccatttaggaaacgtatgtccgttagactgtccagtaaaacgct

SEQ ID NO: 5413 - DNA, 721 bp, Homo sapiens
  source 1..721: mol_type = unassigned DNA
aaggggcccctacaagcggccacaaggatggcaggcttcgcggagctcgggctgtcatcgtggctcgtggaacaatgtcggcagctgggtttgaagcagcccacgcccgtgcagctcggctgcatccccgccatcctggagggtcgagactgcttgggctgtgctaagacaggcagtgggaagacagcagcgtttgtccttcccatcttgcagaagctgtctgaggatccctatggcatcttctgcctcgtcctgacacccaccagaattaaacaagatggccccggtgcagtggctcacacctgtaatcccagcactttgggagctccagggagctggcctaccagatcgcagagcagttccgggtcctggggaagcctctagggctgaaagactgcatcatcgtcggtggcatggacatggtggcccaggcgctggagctctctcggaaaccacacgtggtcatcgccacgccggggcgcctggcagatcacctgcgcagctccaacacttttagtataaagaagatccgcttcctggtgatggatgaggcagaccggctgctggaacagggctgcactgacttcaccgtggacctggaggccatcctggcggctgtgccggcccgcaggcagacactgctgttcagcgccacgctgaccgacacactccgggagctgcagggtctggccaccaaccagcccttcttctgggaagcaca

SEQ ID NO: 5414 - DNA, 1882 bp, Homo sapiens
  source 1..1882: mol_type = unassigned DNA
caagcggccacaaggatggcaggcttcgcggagctcgggctgtcatcgtggctcgtggaacaatgtcggcagctgggtttgaagcagcccacgcccgtgcagctcggctgcatccccgccatcctggagggtcgagactgcttgggctgtgctaagacaggcagtgggaagacagcagcgtttgtccttcccatcttgcagaagctgtctgaggatccctatggcatcttctgcctcgtcctgacacccaccaggggtcctgcagaattaaacaagatggccccggtgcagtggctcacacctgtaatcccagcactttgggagctccagggagctggcctaccagatcgcagagcagttccgggtcctggggaagcctctagggctgaaagactgcatcatcgtcggtggcatggacatggtggcccaggcgctggagctctctcggaaaccacacgtggtcatcgccacgccggggcgcctggcagatcacctgcgcagctccaacacttttagtataaagaagatccgcttcctggtgatggatgaggcagaccggctgctggaacagggctgcactgacttcaccgtggacctggaggccatcctggcggctgtgccggcccgcaggcagacactgctgttcagcgccacgctgaccgacacactccgggagctgcagggtctggccaccaaccagcccttcttctgggaagcacaggccccggtgagcaccgtggagcagctggaccagcgctacctgctggtgcctgagaaggtcaaggacgcctacctggtccacctgatccagcgcttccaggatgagcacgaggactggtccattatcatcttcaccaacacgtgcaagacctgccagattctgtgcatgatgctgcgcaaattcagcttccccaccgtggctctgcactccatgatgaagcagaaagaacgctttgccgccctagccaagttcaagtccagcatctaccggatcctgatcgcaacagacgtggcctcccgtggagctgaccagccacctctgcctccaggggcctggacatccctacggtacaggtggtcatcaaccacaacacccccgggctccccaagatctacatccaccgagtcggccggacggcccgtgcagggcggcagggtcaggccatcacgctggtgacacagtacgacatccacctggtgcacgccatcgaggagcagatcaagaagaagctggaggagttctccgtggaagaggccgaggtgctacagatcctcacacaggtcaacgtggtgcgaagagagtgtgagatcaaactggaggcggcccactttgacgaaaagaaggagatcaacaaacggaagcagctgatcctggaggggaaggaccctgacctggaggccaagcgcaaggctgagctggccaagatcaagcagaagaaccggcgcttcaaggagaaggtggaggagacgctgaagcgacagaaggctggcagggctggccacaaggggcgtccacccaggacaccgtctgggtcccactcaggcccagtcccctcccagggcctggtctgagccccacacggccatctgcccagtccttgactcgtccatggagctgagggtcggaggaaccttccttgggggcagcagcccttcccgggggcctacccagtgccccacagcagaacccgtgggcgctcgtgttgtgcgggccctgctcctctgccccgaaaccactggctggtcccttccctgagccctggccaagattcaggctgcaggggaagaaagaacatgaccgggaggttgtgaccccaacccaaggtcaccccccaggggtgccgcatacaggaggtgcttaataaacgggtcttttgacttc

SEQ ID NO: 5415 - DNA, 557 bp, Homo sapiens
  source 1..557: mol_type = unassigned DNA
aagcggccacaaggatggcaggcttcgcggagctcgggctgtcatcgtggctcgtggaacaatgtcggcagctgggtttgaagcagcccacgcccgtgcagctcggctgcatccccgccatcctggaggaagctgtctgaggatccctatggcatcttctgcctcgtcctgacacccaccaggggtcctgcagaattaaacaagatggccccggtgcagtggctcacacctgtaatcccagcactttgggagctccagggagctggcctaccagatcgcagagcagttccgggtcctggggaagcctctagggctgaaagactgcatcatcgtcggtggcatggacatggtggcccaggcgctggagctctctcggaaaccacacgtggtcatcgccacgccggggcgcctggcagatcacctgcgcagctccaacacttttagtataaagaagatccgcttcctggtgatggatgaggcagaccggctgctggaacagggctgcactgacttcaccgtggacctggaggccatcctggcggctgtgccggcccgca

SEQ ID NO: 5416 - DNA, 753 bp, Homo sapiens
  source 1..753: mol_type = unassigned DNA
agcggccacaaggatggcaggcttcgcggagctcgggctgtcatcgtggctcgtggaacaatgtcggcagctgggtttgaagcagcccacgcccgtgcagctcggctgcatccccgccatcctggagggtcgagactgcttgggctgtgctaagacaggcagtgggaagacagcagcgtttgtccttcccatcttgcagaagctgtctgaggatccctatggcatcttctgcctcgtcctgacacccaccagacatggtggcccaggcgctggagctctctcggaaaccacacgtggtcatcgccacgccggggcgcctggcagatcacctgcgcagctccaacacttttagtataaagaagatccgcttcctggtgatggatgaggcagaccggctgctggaacagggctgcactgacttcaccgtggacctggaggccatcctggcggctgtgccggcccgcaggcagacactgctgttcagcgccacgctgaccgacacactccgggagctgcagggtctggccaccaaccagcccttcttctgggaagcacaggccccggtgagcaccgtggagcagctggaccagcgctacctgctggtgcctgagaaggtcaaggacgcctacctggtccacctgatccagcgcttccaggatgagcacgaggactggtccattatcatcttcaccaacacgtgcaagacctgccagattctgtgcatgatgctgcgcaaattcagcttccccaccg

SEQ ID NO: 5417 - DNA, 1691 bp, Homo sapiens
  source 1..1691: mol_type = unassigned DNA
aaggatggcaggcttcgcggagctcgggctgtcatcgtggctcgtggaacaatgtcggcagctgggtttgaagcagcccacgcccgtgcagctcggctgcatccccgccatcctggaggaagctgtctgaggatccctatggcatcttctgcctcgtcctgacacccaccagggagctggcctaccagatcgcagagcagttccgggtcctggggaagcctctagggctgaaagactgcatcatcgtcggtggcatggacatggtggcccaggcgctggagctctctcggaaaccacacgtggtcatcgccacgccggggcgcctggcagatcacctgcgcagctccaacacttttagtataaagaagatccgcttcctggtgatggatgaggcagaccggctgctggaacagggctgcactgacttcaccgtggacctggaggccatcctggcggctgtgccggcccgcaggcagacactgctgttcagcgccacgctgaccgacacactccgggagctgcagggtctggccaccaaccagcccttcttctgggaagcacaggccccggtgagcaccgtggagcagctggaccagcgctacctgctggtgcctgagaaggtcaaggacgcctacctggtccacctgatccagcgcttccaggatgagcacgaggactggtccattatcatcttcaccaacacgtgcaagacctgccagattctgtgcatgatgctgcgcaaattcagcttccccaccgtggctctgcactccatgatgaagcagaaagaacgctttgccgccctagccaagttcaagtccagcatctaccggatcctgatcgcaacagacgtggcctcccggggcctggacatccctacggtacaggtggtcatcaaccacaacacccccgggctccccaagatctacatccaccgagtcggccggacggcccgtgcagggcggcagggtcaggccatcacgctggtgacacagtacgacatccacctggtgcacgccatcgaggagcagatcaagaagaagctggaggagttctccgtggaagaggccgaggtgctacagatcctcacacaggtcaacgtggtgcgaagagagtgtgagatcaaactggaggcggcccactttgacgaaaagaaggagatcaacaaacggaagcagctgatcctggaggggaaggaccctgacctggaggccaagcgcaaggctgagctggccaagatcaagcagaagaaccggcgcttcaaggagaaggtggaggagacgctgaagcgacagaaggctggcagggctggccacaaggggcgtccacccaggacaccgtctgggtcccactcaggcccagtcccctcccagggcctggtctgagccccacacggccatctgcccagtccttgactcgtccatggagctgagggtcggaggaaccttccttgggggcagcagcccttcccgggggcctacccagtgccccacagcagaacccgtgggcgctcgtgttgtgcgggccctgctcctctgccccgaaaccactggctggtcccttccctgagccctggccaagattcaggctgcaggggaagaaagaacatgaccgggaggttgtgaccccaacccaaggtcaccccccaggggtgccgcatacaggaggtgcttaataaacgggtcttttga

SEQ ID NO: 5418 - DNA, 1550 bp, Homo sapiens
  source 1..1550: mol_type = unassigned DNA
gggtacgggagctgggaggcgggggaagccccagcatgggaccctagcagctttggaccacctgcccagccctgcctctcatgctctgtcccccagacatggtggcccaggcgctggagctctctcggaaaccacacgtggtcatcgccacgccggggcgcctggcagatcacctgcgcagctccaacacttttagtataaagaagatccgcttcctggtgagttcgccccgcccctgcagacctcaggagctgggctcggagcctccaggcccaatgtcagagcctggggcaccatctcatccatttaggaaacgtatgtccgttagactgtccagtaaaacgctaggaacagtgacaaggaccgttcaaggaccaacaagagggggcccagtcctagcaatgttattcgggggtagggccttgctgagacttgggtgaggggcaggcctcccttggaaggagggtactccagggcctagggtccatgtccatgcctctcaaagaggcctgcttcaggggtggccaagacccggggccatggacggcaccctcacccctgcccccattggcacggcaggtgatggatgaggcagaccggctgctggaacagggctgcactgacttcaccgtggacctggaggccatcctggcggctgtgccggcccgcaggcagacactgctgttcagcgccacgctgaccgacacactccgggagctgcagggtctggccaccaaccagcccttcttctgggaagcacaggccccggtgagcaccgtggagcagctggaccagcgctacctgctggtgcctgagaaggtcaaggacgcctacctggtccacctgatccagcgcttccaggatgagcacgaggactggtccattatcatcttcaccaacacgtgcaagacctgccagattctgtgcatgatgctgcgcaaattcagcttccccaccgtggctctgcactccatgatgaagcagaaagaacgctttgccgccctagccaagttcaagtccagcatctaccggatcctgatcgcaacagacgtggcctcccggtgagcagcccccagtctcctgccaagggcactccctcttttactacaaggccccacagatgagaaggctggcctcaggcatgtcaggcagccctagcatccctgctgagtgaccctgggtgagtccttgcctcggtttccccacatggacagtggagctgaccagccacctctgcctccaggggcctggacatccctacggtacaggtggtcatcaaccacaacacccccgggctccccaagatctacatccaccgagtcggccggacggcccgtgcaggtgagcagtggagggggaggccgagccttgggcctctgtccctccagcctgcccagcaaattcaggtggtaggacgtgggtagggtgcagcccacagatgagagctactcagggccatgtttgcaagttggggagttgtcctttctaaagcaaaggtgaatcccagctactcgggaggctgaggcaagaagatcacttgaacccgggag

SEQ ID NO: 5419 - DNA, 633 bp, Homo sapiens
  source 1..633: mol_type = unassigned DNA
gatgaggcagaccggctgctggaacagggctgcactgacttcaccgtggacctggaggccatcctggcggctgtgccggcccgcaggcagacactgctgttcagcgccacgctgaccgacacactccgggagctgcagggtctggccaccaaccagcccttcttctgggaagcacaggccccgatgagcacgaggactggtccattatcatcttcaccaacacgtgcaagacctgccagattctgtgcatgatgctgcgcaaattcagcttccccaccgtggctctgcactccatgatgaagcagaaagaacgctttgccgccctagccaagttcaagtccagcatctaccggatcctgatcgcaacagacgtggcctcccggggcctggacatccctacggtacaggtggtcatcaaccacaacacccccgggctccccaagatctacatccaccgagtcggccggacggcccgtgcagggcggcagggtcaggccatcacgctggtgacacagtacgacatccacctggtgcacgccatcgaggagcagatcaagaagaagctggaggagttctccgtggaagaggccgaggtgctacagatcctcacacaggtcaacgtggtgcgaagag

SEQ ID NO: 5420 - DNA, 342 bp, Homo sapiens
  source 1..342: mol_type = unassigned DNA
gactggtccattatcatcttcaccaacacgtgcaagacctgccagattctgtgcatgatgctgcgcaaattcagcttccccaccgtggctctgcactccatgatgaagcagaaagaacgctttgccgccctagccaagttcaagtccagcatctaccggatcctgatcgcaacagacgtggcctcccggggcctggacatccctacggtacaggtggtcatcaaccacaacacccccgggctccccaagatctacatccaccgagtcggccggacggcccgtgcagcaaaggtgaatcccagctactcgggaggctgaggcaagaagatcacttgaacccgg

SEQ ID NO: 5421 - DNA, 771 bp, Homo sapiens
  source 1..771: mol_type = unassigned DNA
aagtccagcatctaccggatcctgatcgcaacagacgtggcctcccggtgagcagcccccagtctcctgccaagggcactccctcttttactacaaggccccacagatgagaaggctggcctcaggcatgtcaggcagccctagcatccctgctgagtgaccctgggtgagtccttgcctcggtttccccacatggacagtggagctgaccagccacctctgcctccaggggcctggacatccctacggtacaggtggtcatcaaccacaacacccccgggctccccaagatctacatccaccgagtcggccggacggcccgtgcagggcggcagggtcaggccatcacgctggtgacacagtacgacatccacctggtgcacgccatcgaggagcagatcaagaagaagctggaggagttctccgtggaagaggccgaggtgctacagatcctcacacaggtcaacgtggtgcgaagagagtgtgagatcaaactggaggcggcccactttgacgaaaagaaggagatcaacaaacggaagcagctgatcctggaggggaaggaccctgacctggaggccaagcgcaaggctgagctggccaagatcaagcagaagaaccggcgcttcaaggagaaggtggaggagacgctgaagcgacagaaggctggcagggctggccacaaggggcgtccacccaggacaccgtctgggtcccactcaggcccagtcccctcccagggcctggtctgagccccacacggccatctgc

SEQ ID NO: 5422 - DNA, 594 bp, Homo sapiens
  source 1..594: mol_type = unassigned DNA
cccggctttgctgtccccacagagaagaagctggaggagttctccgtggaagaggccgaggtgctacagatcctcacacaggtcaacgtggtgcgaagagagtgtgagatcaaactggaggcggcccactttgacgaaaagaaggagatcaacaaacggaagcagctgatcctggaggggaaggaccctgacctggaggccaagcgcaaggctgagctggccaagatcaagcagaagaaccggcgcttcaaggagaaggtggaggagacgctgaagcgacagaaggctggcagggctggccacaaggggcgtccacccaggacaccgtctgggtcccactcaggcccagtcccctcccagggcctggtctgagccccacacggccatctgcccagtccttgactcgtccatggagctgagggtcggaggaaccttccttgggggcagcagcccttcccgggggcctacccagtgccccacagcagaacccgtgggcgctcgtgttgtgcgggccctgctcctctgccccgaaaccactggctggtcccttccctgagccctggccaagattcaggctgcaggggaagaaagaac

SEQ ID NO: 5423 - DNA, 1912 bp, Homo sapiens
  source 1..1912: mol_type = unassigned DNA
gtcggcgcgcgccggaagcgcggatcacacgggcccctacaaggggcccctacaagcggccacaaggatggcaggcttcgcggagctcgggctgtcatcgtggctcgtggaacaatgtcggcagctgggtttgaagcagcccacgcccgtgcagctcggctgcatccccgccatcctggagggtcgagactgcttgggctgtgctaagacaggcagtgggaagacagcagcgtttgtccttcccatcttgcagaagctgtctgaggatccctatggcatcttctgcctcgtcctgacacccaccaggggtcctgcagaattaaacaagatggccccggtgcagtggctcacacctgtaatcccagcactttgggagctccagggagctggcctaccagatcgcagagcagttccgggtcctggggaagcctctagggctgaaagactgcatcatcgtcggtggcatggacatggtggcccaggcgctggagctctctcggaaaccacacgtggtcatcgccacgccggggcgcctggcagatcacctgcgcagctccaacacttttagtataaagaagatccgcttcctggtgatggatgaggcagaccggctgctggaacagggctgcactgacttcaccgtggacctggaggccatcctggcggctgtgccggcccgcaggcagacactgctgttcagcgccacgctgaccgacacactccgggagctgcagggtctggccaccaaccagcccttcttctgggaagcacaggccccggtgagcaccgtggagcagctggaccagcgctacctgctggtgcctgagaaggtcaaggacgcctacctggtccacctgatccagcgcttccaggatgagcacgaggactggtccattatcatcttcaccaacacgtgcaagacctgccagattctgtgcatgatgctgcgcaaattcagcttccccaccgtggctctgcactccatgatgaagcagaaagaacgctttgccgccctagccaagttcaagtccagcatctaccggatcctgatcgcaacagacgtggcctcccggggcctggacatccctacggtacaggtggtcatcaaccacaacacccccgggctccccaagatctacatccaccgagtcggccggacggcccgtgcagggcggcagggtcaggccatcacgctggtgacacagtacgacatccacctggtgcacgccatcgaggagcagatcaagaagaagctggaggagttctccgtggaagaggccgaggtgctacagatcctcacacaggtcaacgtggtgcgaagagagtgtgagatcaaactggaggcggcccactttgacgaaaagaaggagatcaacaaacggaagcagctgatcctggaggggaaggaccctgacctggaggccaagcgcaaggctgagctggccaagatcaagcagaagaaccggcgcttcaaggagaaggtggaggagacgctgaagcgacagaaggctggcagggctggccacaaggggcgtccacccaggacaccgtctgggtcccactcaggcccagtcccctcccagggcctggtctgagccccacacggccatctgcccagtccttgactcgtccatggagctgagggtcggaggaaccttccttgggggcagcagcccttcccgggggcctacccagtgccccacagcagaacccgtgggcgctcgtgttgtgcgggccctgctcctctgccccgaaaccactggctggtcccttccctgagccctggccaagattcaggctgcaggggaagaaagaacatgaccgggaggttgtgaccccaacccaaggtcaccccccaggggtgccgcatacaggaggtgcttaataaacgggtcttttgacttcctcagtc

SEQ ID NO: 5424 - DNA, 1882 bp, Homo sapiens
  source 1..1882: mol_type = unassigned DNA
gcggccgtcgcccaggagtcatcggacgccagaatctggccgggttctgagcttgttccgcctccctcccccgggaatggcgctatccgggtcgaccccggccccgtgctgggaggaggatgagtgcctggactactacgggatgctgtcgcttcaccgtatgttcgaggtggtgggcgggcaactgaccgagtgcgagctggagctcctggcctttctgctggatgaggctcctggcgccgccggaggcttagcccgggcccgcagcggcctagagctcctgctggagctggagcgccgcgggcagtgcgacgagagcaacctgcggctgctggggcaactcctgcgcgtgctggcccgccacgacctgctgccgcacctggcgcgcaagcggcgccggccagtgtctccagaacgctatagctatggcacctccagctcttcaaagaggacagagggtagctgccgtcgccgtcggcagtcaagcagttctgcaaattctcagcagggctcccccccaaccaagcggcagcggcggagtcggggccggcccagtggtggtgccagacggcggcggagaggggccccagccgcaccccagcagcagtcagagcccgccagaccttcctctgaaggcaaagtgacctgtgacatccggctccgggttcgagcagagtactgcgagcatgggccagccttggagcagggcgtggcatcccggcggccccaggcgctggcgcggcagctggacgtgtttgggcaggccaccgcagtgctgcgctcaagggacctgggctctgtggtttgtgacatcaagttctcagagctctcctatctggacgccttctggggcgactacctgagtggcgccctgctgcaggccctgcggggcgtgttcctgactgaggccctgcgagaggctgtgggccgggaggctgttcgcctgctggtcagtgtggatgaggctgactatgaggctggccggcgccgcctgttgctgatggaggaggaaggggggcggcgcccgacagaggcctcctgatccaggactggcaggattgatcccacctccaagtctccgggccaccttctcctgggaggacgaccatctctacccctagaggactgtcactctagcatctttgaggactgcgacaggaccgggacagcaggccccttgacagcccctcccacaggatgtgggctctgaggcctaaaccatttccagctgagtttccttcccagactcctcctacccccaggtgtgcccccttagcctccggaggcgggggctgggcctgtatctcagaagggaggggcacagctacacactcaccaaaggcccccctgcacattgtatctctgatcttgggctgtctgcactgtcacaggtgcacacactcgctcatgctcacactgcccctgctgagatcttccctgggcctctgccctggcctgcttcccagcacacacttctttggcctaagggcttctctctcaggacctctaatttgaccacaaccaacctgggcttcagccacatcagtgggcactggagctggggtgcacatggggcctgctcaccttgcccacacatctccagccagccagggccctgcccagcttcaatttacagacctgactctcctcaccttcccccctgctgtccagagctgaacatagacttgcacttggatgtcacctggagtgtcacatgggagtgttatggcagcatcataccaaggcctactgttgcacatggggccaaaaccagtaaacagccaccttcttggaaagggaatgcaaaggctttgggggtgatggaaaagaccttttacaaatgataccaattaaactgccctggaaagggcataggtgggca

SEQ ID NO: 5425 - DNA, 1894 bp, Homo sapiens
  source 1..1894: mol_type = unassigned DNA
tcccgggctaagcgtcggcaagttctgtagagaaactcgggcaacctttggccgggttctgagcttgttccgcctccctcccccgggaatggcgctatccgggtcgaccccggccccgtgctgggaggaggatgagtgcctggactactacgggatgctgtcgcttcaccgtatgttcgaggtggtgggcgggcaactgaccgagtgcgagctggagctcctggcctttctgctggatgaggctcctggcgccgccggaggcttagcccgggcccgcagcggcctagagctcctgctggagctggagcgccgcgggcagtgcgacgagagcaacctgcggctgctggggcaactcctgcgcgtgctggcccgccacgacctgctgccgcacctggcgcgcaagcggcgccggccagtgtctccagaacgctatagctatggcacctccagctcttcaaagaggacagagggtagctgccgtcgccgtcggcagtcaagcagttctgcaaattctcagcagggtcagtgggagacaggctcccccccaaccaagcggcagcggcggagtcggggccggcccagtggtggtgccagacggcggcggagaggggccccagccgcaccccagcagcagtcagagcccgccagaccttcctctgaaggcaaagtgacctgtgacatccggctccgggttcgagcagagtactgcgagcatgggccagccttggagcagggcgtggcatcccggcggccccaggcgctggcgcggcagctggacgtgtttgggcaggccaccgcagtgctgcgctcaagggacctgggctctgtggtttgtgacatcaagttctcagagctctcctatctggacgccttctggggcgactacctgagtggcgccctgctgcaggccctgcggggcgtgttcctgactgaggccctgcgagaggctgtgggccgggaggctgttcgcctgctggtcagtgtggatgaggctgactatgaggctggccggcgccgcctgttgctgatggaggaggaaggggggcggcgcccgacagaggcctcctgatccaggactggcaggattgatcccacctccaagtctccgggccaccttctcctgggaggacgaccatctctacccctagaggactgtcactctagcatctttgaggactgcgacaggaccgggacagcaggccccttgacagcccctcccacaggatgtgggctctgaggcctaaaccatttccagctgagtttccttcccagactcctcctacccccaggtgtgcccccttagcctccggaggcgggggctgggcctgtatctcagaagggaggggcacagctacacactcaccaaaggcccccctgcacattgtatctctgatcttgggctgtctgcactgtcacaggtgcacacactcgctcatgctcacactgcccctgctgagatcttccctgggcctctgccctggcctgcttcccagcacacacttctttggcctaagggcttctctctcaggacctctaatttgaccacaaccaacctgggcttcagccacatcagtgggcactggagctggggtgcacatggggcctgctcaccttgcccacacatctccagccagccagggccctgcccagcttcaatttacagacctgactctcctcaccttcccccctgctgtccagagctgaacatagacttgcacttggatgtcacctggagtgtcacatgggagtgttatggcagcatcataccaaggcctactgttgcacatggggccaaaaccagtaaacagccaccttcttggaaagggaatgcaaaggctttgggggtgatggaaaagaccttttacaaatgataccaattaaactgccctggaaa

SEQ ID NO: 5426 - DNA, 1586 bp, Homo sapiens
  source 1..1586: mol_type = unassigned DNA
gggaaggaggaggggcgaggtgacgcaggcgtaataatagagaaggtgccagaaagatccaaaacaagtggctgcggccgtcgcccaggagtcatcggacgccagaatctgtgtctccagaacgctatagctatggcacctccagctcttcaaagaggacagagggtagctgccgtcgccgtcggcagtcaagcagttctgcaaattctcagcagggtcagtgggagacaggctcccccccaaccaagcggcagcggcggagtcggggccggcccagtggtggtgccagacggcggcggagaggggccccagccgcaccccagcagcagtcagagcccgccagaccttcctctgaaggcaaagtgacctgtgacatccggctccgggttcgagcagagtactgcgagcatgggccagccttggagcagggcgtggcatcccggcggccccaggcgctggcgcggcagctggacgtgtttgggcaggccaccgcagtgctgcgctcaagggacctgggctctgtggtttgtgacatcaagttctcagagctctcctatctggacgccttctggggcgactacctgagtggcgccctgctgcaggccctgcggggcgtgttcctgactgaggccctgcgagaggctgtgggccgggaggctgttcgcctgctggtcagtgtggatgaggctgactatgaggctggccggcgccgcctgttgctgatggaggaggaaggggggcggcgcccgacagaggcctcctgatccaggactggcaggattgatcccacctccaagtctccgggccaccttctcctgggaggacgaccatctctacccctagaggactgtcactctagcatctttgaggactgcgacaggaccgggacagcaggccccttgacagcccctcccacaggatgtgggctctgaggcctaaaccatttccagctgagtttccttcccagactcctcctacccccaggtgtgcccccttagcctccggaggcgggggctgggcctgtatctcagaagggaggggcacagctacacactcaccaaaggcccccctgcacattgtatctctgatcttgggctgtctgcactgtcacaggtgcacacactcgctcatgctcacactgcccctgctgagatcttccctgggcctctgccctggcctgcttcccagcacacacttctttggcctaagggcttctctctcaggacctctaatttgaccacaaccaacctgggcttcagccacatcagtgggcactggagctggggtgcacatggggcctgctcaccttgcccacacatctccagccagccagggccctgcccagcttcaatttacagacctgactctcctcaccttcccccctgctgtccagagctgaacatagacttgcacttggatgtcacctggagtgtcacatgggagtgttatggcagcatcataccaaggcctactgttgcacatggggccaaaaccagtaaacagccaccttcttggaaagggaatgcaaaggctttgggggtgatggaaaagaccttttacaaatgataccaattaaactgccctgg

SEQ ID NO: 5427 - DNA, 1183 bp, Homo sapiens
  source 1..1183: mol_type = unassigned DNA
aggcgtaataatagagaaggtgccagaaagatccaaaacaagtggctgcggccgtcgcccaggagtcatcggacgccagaatctggccgggttctgagcttgttccgcctccctcccccgggaatggcgctatccgggtcgaccccggccccgtgctgggaggaggatgagtgcctggactactacgggatgctgtcgcttcaccgtatgttcgaggtggtgggcgggcaactgaccgagtgcgagctggagctcctggcctttctgctggatgaggctcctggcgccgccggaggcttagcccgggcccgcagcggcctagagctcctgctggagctggagcgccgcgggcagtgcgacgagagcaacctgcggctgctggggcaactcctgcgcgtgctggcccgccacgacctgctgccgcacctggcgcgcaagcggcgccggccagtgtctccagaacgctatagctatggcacctccagctcttcaaagaggacagagggtagctgccgtcgccgtcggcagtcaagcagttctgcaaattctcagcagggtcagtgggagacaggctcccccccaaccaagcggcagcggcggagtcggggccggcccagtggtggtgccagacggcggcggagaggggccccagccgcaccccagcagcagtcagagcccgccagaccttcctctgaaggcaaagtgacctgtgacatccggctccgggttcgagcagagtactgcgagcatgggccagccttggagcagggcgtggcatcccggcggccccaggcgctggcgcggcagctggacgtgtttgggcaggccaccgcagtgctgcgctcaagggacctgggctctgtggtttgtgacatcaagttctcagagctctcctatctggacgccttctggggcgactacctgagtggcgccctgctgcaggccctgcggggcgtgttcctgactgaggccctgcgagaggctgtgggccgggaggctgttcgcctgctggtcagtgtggatgaggctgactatgaggctggccggcgccgcctgttgctgatggaggaggaaggggggcggcgcccgacagaggcctcctgatccaggactggcaggattgatcccacctccaagtctccgggccaccttctcctgggaggacgaccatctctacccctag

SEQ ID NO: 5428 - DNA, 723 bp, Homo sapiens
  source 1..723: mol_type = unassigned DNA
atagagaaggtgccagaaagatccaaaacaagtggctgcggccgtcgcccaggagtcatcggacgccagaatctgtgtctccagaacgctatagctatggcacctccagctcttcaaagaggacagagggtagctgccgtcgccgtcggcagtcaagcagttctgcaaattctcagcagggtcagtgggagacaggctcccccccaaccaagcggcagcggcggagtcggggccggcccagtggtggtgccagacggcggcggagaggggccccagccgcaccccagcagcagtcagagcccgccagaccttcctctgaaggcaaagtgacctgtgatggggaaacaggctcagagagacatccggctccgggttcgagcagagtactgcgagcatgggccagccttggagcagggcgtggcatcccggcggccccaggcgctggcgcggcagctggacgtgtttgggcaggccaccgcagtgctgcgctcaagggacctgggctctgtggtttgtgacatcaagttctcagagctctcctatctggacgccttctggggcgactacctgagtggcgccctgctgcaggccctgcggggcgtgttcctgactgaggccctgcgagaggctgtgggccgggaggctgttcgcctgctggtcagtgtggatgaggctgactatgaggctggccggcgccgcctgttgctgatggaggaggaaggg

SEQ ID NO: 5429 - DNA, 715 bp, Homo sapiens
  source 1..715: mol_type = unassigned DNA
ggtgacgcaggcgtaataatagagaaggtgccagaaagatccaaaacaagtggctgcggccgtcgcccaggagtcatcggacgccagaatctgtgtctccagaacgctatagctatggcacctccagctcttcaaagaggacagagggtagctgccgtcgccgtcggcagtcaagcagttctgcaaattctcagcagggtcagtgggagacaggctcccccccaaccaagcggcagcggcggagtcggggccggcccagtggtggtgccagacggcggcggagaggggccccagccgcaccccagcagcagtcagagcccgccagaccttcctctgaaggcaaagtgacctgtggctgtacaagaagcagggtgccagcatctgcttctgttgaggacctccggaagcttccattcatggtggaaggccaaggggagcaggcttgtcacatgacatccggctccgggttcgagcagagtactgcgagcatgggccagccttggagcagggcgtggcatcccggcggccccaggcgctggcgcggcagctggacgtgtttgggcaggccaccgcagtgctgcgctcaagggacctgggctctgtggtttgtgacatcaagttctcagagctctcctatctggacgccttctggggcgactacctgagtggcgccctgctgcaggccctgcggggcgtgttcctgactgaggccctg

SEQ ID NO: 5430 - DNA, 763 bp, Homo sapiens
  source 1..763: mol_type = unassigned DNA
gaaggtgccagaaagatccaaaacaagtggctgcggccgtcgcccaggagtcatcggacgccagaatctgtgtctccagaacgctatagctatggcacctccagctcttcaaagaggacagagggtagctgccgtcgccgtcggcagtcaagcagttctgcaaattctcagcagggtcagtgggagacaggctggagtgcaatggcacaatctcggctcaccgcaacctccgcctcccgggttcaagcgattctcctgcctcagcctcctgagtagctgggattacaggctcccccccaaccaagcggcagcggcggagtcggggccggcccagtggtggtgccagacggcggcggagaggggccccagccgcaccccagcagcagtcagagcccgccagaccttcctctgaaggcaaagtgacctgtggctgtacaagaagcagggtgccagcatctgcttctgttgaggacctccggaagcttccattcatggtggaaggccaaggggagcaggcttgtcacatgacatccggctccgggttcgagcagagtactgcgagcatgggccagccttggagcagggcgtggcatcccggcggccccaggcgctggcgcggcagctggacgtgtttgggcaggccaccgcagtgctgcgctcaagggacctgggctctgtggtttgtgacatcaagttctcagagctctcctatctggacgccttctggggcgactacctgagtggcgccctgctgcaggccctg

SEQ ID NO: 5431 - DNA, 550 bp, Homo sapiens
  source 1..550: mol_type = unassigned DNA
taatagagaaggtgccagaaagatccaaaacaagtggctgcggccgtcgcccaggagtcatcggacgccagaatctgtgtctccagaacgctatagctatggcacctccagctcttcaaagaggacagagggtagctgccgtcgccgtcggcagtcaagcagttctgcaaattctcagcagggctcccccccaaccaagcggcagcggcggagtcggggccggcccagtggtggtgccagacggcggcggagaggggccccagccgcaccccagcagcagtcagagcccgccagaccttcctctgaaggcaaagtgacctgtgacatccggctccgggttcgagcagagtactgcgagcatgggccagccttggagcagggcgtggcatcccggcggccccaggcgctggcgcggcagctggacgtgtttgggcaggccaccgcagtgctgcgctcaagggacctgggctctgtggtttgtgacatcaagttctcagagctctcctatctggacgccttctggggcgactacctgagtggcgccctgctg

SEQ ID NO: 5432 - DNA, 463 bp, Homo sapiens
  source 1..463: mol_type = unassigned DNA
gtaataatagagaaggtgccagaaagatccaaaacaagtggctgcggccgtcgcccaggagtcatcggacgccagaatctgtgtctccagaacgctatagctatggcacctccagctcttcaaagaggacagagggtagctgccgtcgccgtcggcagtcaagcagttctgcaaattctcagcagggtcagtgggagacaggctcccccccaaccaagcggcagcggcggagtcggggccggcccagtggtggtgccagacggcggcggagaggggccccagccgcaccccagcagcagtcagagcccgccagaccttcctctgaaggcaaagtgacctgtgatggggaaacaggctcagagaggtaaggtcacatgcccaaggccccacagcttagagagtggcagagctgggactcacctcaagacatccggctccgggttcgagcagagtactgcgagca

SEQ ID NO: 5433 - DNA, 1037 bp, Homo sapiens
  source 1..1037: mol_type = unassigned DNA
aaaacaagtggctgcggccgtcgcccaggagtcatcggacgccagaatctggccgggttctgagcttgttccgcctccctcccccgggaatggcgctatccgggtcgaccccggccccgtgctgggaggaggatgagtgcctggactactacgggatgctgtcgcttcaccgtatgttcgaggtggtgggcgggcaactgaccgagtgcgagctggagctcctggcctttctgctggatgaggctcctggcgccgccggaggcttagcccgggcccgcagcggcctagagctcctgctggagctggagcgccgcgggcagtgcgacgagagcaacctgcggctgctggggcaactcctgcgcgtgctggcccgccacgacctgctgccgcacctggcgcgcaagcggcgccggccagtgtctccagaacgctatagctatggcacctccagctcttcaaagaggacagagggtagctgccgtcgccgtcggcagtcaagcagttctgcaaattctcagcagggtcagtgggagacaggctcccccccaaccaagcggcagcggcggagtcggggccggcccagtggtggtgccagacggcggcggagaggggccccagccgcaccccagcagcagtcagagcccgccagaccttcctctgaaggcaaagtgacctgtgatggggaaacaggctcagagaggtaaggtcacatgcccaaggccccacagcttagagagtggcagagctgggactcacctcaaggtctgttggactccgccacctggccctgcctctgtggccaaccactcctgggtggcctggaagaggtgctgctcctcccagccccctgctctcccacccacattgattgaggtcatggccagttgcttactggagtcaaggatgcagtcaaggatctggtcgtctgggtagagacagctgggtctgaatgccatgggagggcctgggggctgaggctgggcaggcttccctgggcgttgggtggagaggatggggttcccctagagccagaaaga

SEQ ID NO: 5434 - DNA, 546 bp, Homo sapiens
  source 1..546: mol_type = unassigned DNA; mol_type = unassigned DNA
gcatttctctgggtcgctcccgggctaagcgtcggcaagttctgtagagaaactcgggcaacctttgtgtctccagaacgctatagctatggcacctccagctcttcaaagaggacagagggtagctgccgtcgccgtcggcagtcaagcagttctgcaaattctcagcagggtcagtgggagacaggctcccccccaaccaagcggcagcggcggagtcggggccggcccagtggtggtgccagacggcggcggagaggggccccagccgcaccccagcagcagtcagagcccgccagaccttcctctgaaggcaaagtgacctgtgatggggaaacaggctcagagaggtaaggtcacatgcccaaggccccacagcttagagagtggcagagctgggactcacctcaaggtctgttggactccgccacctggccctgcctctgtggccaaccactcctgggtggcctggaagaggtgctgctcctcccagccccctgctctcccacccacattgattgaggtcatggccagttgcttactgga

SEQ ID NO: 5435 - DNA, 556 bp, Homo sapiens
  source 1..556: mol_type = unassigned DNA; mol_type = unassigned DNA
acctgcgcgagttgggggaaggaggaggggcgaggtgacgcaggcgtaataatagagaaggtgccagaaagatccaaaacaagtggctgcggccgtcgcccaggagtcatcggacgccagaatctgtgtctccagaacgctatagctatggcacctccagctcttcaaagaggacagagggtagctgccgtcgccgtcggcagtcaagcagttctgcaaattctcagcagggtcagtgggagacaggctcccccccaaccaagcggcagcggcggagtcggggccggcccagtggtggtgccagacggcggcggagaggggccccagccgcaccccagcagcagtcagagcccgccagaccttcctctgaaggcaaagtgacctgtgatggggaaacaggctcagagaggtaaggtcacatgcccaaggccccacagcttagagagtggcagagctgggactcacctcaaggtctgttggactccgccacctggccctgcctctgtggccaaccactcctgggtggcctggaagaggtgctgctcctcccagcccc

SEQ ID NO: 5436 - DNA, 465 bp, Homo sapiens
  source 1..465: mol_type = unassigned DNA
aaacaagtggctgcggccgtcgcccaggagtcatcggacgccagaatctggtgaggatccagagaggcctaatggccgggttctgagcttgttccgcctccctcccccgggaatggcgctatccgggtcgaccccggccccgtgctgggaggaggatgagtgcctggactactacgggatgctgtcgcttcaccgtatgttcgaggtggtgggcgggcaactgaccgagtgcgagctggagctcctggcctttctgctggatgaggctcctggcgccgccggaggcttagcccgggcccgcagcggcctagagctcctgctggagctggagcgccgcgggcagtgcgacgagagcaacctgcggctgctggggcaactcctgcgcgtgctggcccgccacgacctgctgccgcacctggcgcgcaagcggcgccggccagtgtctccagaacgctatagctatgg

SEQ ID NO: 5437 - DNA, 2499 bp, Homo sapiens
  source 1..2499: mol_type = unassigned DNA
aaactgctgctcctccggctggcggggatcagcgctggcgcggctgcggccgctgctgcctacgcgccatggagcatcgcatcgtggggcccgggccgtaccgagctaccaggctgtggaatgagaccgtggagctttttcgtgctaagatgccgttacggaaacatcgctgtcgtttcaagagctatgagcattgtttcacagcggccgaagctgtggattggctgcatgagctgctgaggtgcagtcaaaacttcggccctgaagtgacccgcaaacaaacggtccagctgctaaaaaaattcctgaagaatcacgttattgaagacatcaagggaaaatggggtgaggaagattttgaagacaatcgtcacttatacagatttcctccttcttcacccctgaaaccatatccaaagaagcccccaaaccaaaaggatgttattaaatttccagaatggaatgatctcccaccaggcacttcacaagagaacatcccagtgaggccagttgtgatgaattctgagatgtggtacaagcgtcacagtattgcaattggagaggtgccagcttgccgtcttgtccaccgcagacagctgacagaggccaatgtagaagagatatggaagtctatgacattatcatacttacagaaaattcttggcctggattccttagaagaagttttagacgtcaaacttgtcaattcgaagttcatcatccataatgtatatagtgttagcaagcagggagttgttattcttgatgacaagtcaaaagaacttcctcattgggtgctgtcagctatgaagtgtttggcaaattggcccaactgttctgatttgaagcagcctatgtacttgggatttgaaaaagatgtctttaaaaccatagctgattactatggtcacttgaaagagcctctacttacatttcatctttttgatgcttttgtcagtgtactgggtttgttacagaaggagaaagtggcagttgaagcatttcagatttgctgccttctcctacctcctgaaaataggagaaagttacagctattgatgaggatgatggcaaggatttgcttaaacaaagagatgccacccctgtgtgatggctttggtacccgaacactgatggttcagacattttcccgttgcatcttgtgttccaaggatgaagtggacttggatgagttattagctgctagattggtaacgtttctgatggacaattaccaggaaattctgaaagtccctttggccttgcagacctctatagaggagcgtgtggctcatctacgaagagtccagataaaatacccaggagctgatatggatatcactttatctgctccatcattttgccgtcaaattagtccagaggaatttgaatatcaaagatcatatggctctcaggaacctctggcagccttgttggaggaagtcataacagatgccaaactctccaacaaagagaaaaagaagaaactgaagcagtttcagaaatcctatcctgaagtctatcaagaacgatttcctacaccagaaagtgcagcacttctgtttcctgaaaaacccaaaccgaaaccacagctgctaatgtgggcactaaagaagcctttccaaccatttcaaagaactagaagttttcgaatgtaataatacttccacagcaacaggtgctagagaccactgttgttgttttgagtgaatggtggttaggagaaagactttggtggtggaagaaagaaaagcataaaacaaagactactgaaatatagataaagattgccttagtttttaaaaatgtttggccattagtatttttataaaactcaatgctagttttaaagtgtataaattggttaaaatttatgagtcaaatatatagtgataatgttaacatgtttgtaattgctacagaatttaagggtatttttatctctgtgctttctttttcatggtgtttattaaataattgtgtatatacatcctagctactgatatctttattatagccttaagacttaattttaagtcttaaaaatagcgtgtatacttgaataagaaagacactgggtactgttactgtgatgctattgacttagtagccaattatcatttctcctgtataaattccagtttttattgctgcacataaattttttaatgtcttatattgtgatagctatgtcttttattgcagatttattggatgttatgacagattttactaaagctagtgtttttataacatatatattagttgatgtttacctataagtggagtagattttcatctgcctgcaatggtataatttcagtcttagctaaaaatggaaagttgaactggataaattctttgggtacccttagacctctgattctaagtcaaatgcaaatgggttaaataaaatgagactacttcctttataaatatattttcatccttttgaaagtaagtgaaatgtaaataaacttattttttttaaaaatgcca

SEQ ID NO: 5438 - DNA, 1569 bp, Homo sapiens
  source 1..1569: mol_type = unassigned DNA; mol_type = unassigned DNA
atcagcgctggcgcggctgcggccgctgctgcctacgcgccatggagcatcgcatcgtggggcccgggccgtaccgagctaccaggctgtggaatgagaccgtggagctttttcgtgctaagatgccgttacggaaacatcgctgtcgtttcaagagctatgagcattgtttcacagcggccgaagctgtggattggctgcatgagctgctgaggtgcagtcaaaacttcggccctgaagtgacccgcaaacaaacggtccagctgctaaaaaaattcctgaagaatcacgttattgaagacatcaagggaaaatggggtgaggaagattttgaagacaatcgtcacttatacagatttcctccttcttcacccctgaaaccatatccaaagaagcccccaaaccaaaaggatgttattaaatttccagaatggaatgatctcccaccaggcacttcacaagagaacatcccagtgaggccagttgtgatgaattctgagatgtggtacaagcgtcacagtattgcaattggagaggtgccagcttgccgtcttgtccaccgcagacagctgacagaggccaatgtagaagagatatggaagtctatgacattatcatacttacagaaaattcttggcctggattccttagaagaagttttagacgtcaaacttgtcaattcgaagttcatcatccataatgtatatagtgttagcaagcagggagttgttattcttgatgacaagtcaaaagaacttcctcattgggtgctgtcagctatgaagtgtttggcaaattggcccaactgttctgatttgaagcagcctatgtacttgggatttgaaaaagatgtctttaaaaccatagctgattactatggtcacttgaaagagcctctacttacatttcatctttttgatgcttttgtcagtgtactgggtttgttacagaaggagaaagtggcagttgaagcatttcagatttgctgccttctcctacctcctgaaaataggagaaagttacagctattgatgaggatgatggcaaggatttgcttaaacaaagagatgccacccctgtgtgatggctttggtacccgaacactgatggttcagacattttcccgttgcatcttgtgttccaaggatgaagtggacttggatgagttattagctgctagattggtaacgtttctgatggacaattaccaggaaattctgaaagtccctttggccttgcagacctctatagaggagcgtgtggctcatctacgaagagtccagtttcagaaatcctatcctgaagtctatcaagaacgatttcctacaccagaaagtgcagcacttctgtttcctgaaaaacccaaaccgaaaccacagctgctaatgtgggcactaaagaagcctttccaaccatttcaaagaactagaagttttcgaatgtaataatacttccacagcaacaggtgctagagaccactgttgttgttttgagtgaatggtggttaggagaaagactttggtggtggaagaaagaaaagcataaaacaaagactactgaaatatagat

SEQ ID NO: 5439 - DNA, 1596 bp, Homo sapiens
  source 1..1596: mol_type = unassigned DNA; mol_type = unassigned DNA
atcagcgctggcgcggctgcggccgctgctgcctacgcgccatggagcatcgcatcgtggggcccgggccgtaccgagctaccaggctgggattgattctgttatcctgaagtggtccagtgtttcttatacttgaagattaggatcattgtgtgtggaatgagaccgtggagctttttcgtgctaagatgccgttacggaaacatcgctgtcgtttcaagagctatgagcattgtttcacagcggccgaagctgtggattggctgcatgagctgctgaggtgcagtcaaaacttcggccctgaagtgacccgcaaacaaacggtccagctgctaaaaaaattcctgaagaatcacgttattgaagacatcaagggaaaatggggtgaggaagattttgaagacaatcgtcacttatacagatttcctccttcttcacccctgaaaccatatccaaagaagcccccaaaccaaaaggatgttattaaatttccagaatggaatgatctcccaccaggcacttcacaagagaacatcccagtgaggccagttgtgatgaattctgagatgtggtacaagcgtcacagtattgcaattggagaggtgccagcttgccgtcttgtccaccgcagacagctgacagaggccaatgtagaagagatatggaagtctatgacattatcatacttacagaaaattcttggcctggattccttagaagaagttttagacgtcaaacttgtcaattcgaagttcatcatccataatgtatatagtgttagcaagcagggagttgttattcttgatgacaagtcaaaagaacttcctcattgggtgctgtcagctatgaagtgtttggcaaattggcccaactgttctgatttgaagcagcctatgtacttgggatttgaaaaagatgtctttaaaaccatagctgattactatggtcacttgaaagagcctctacttacatttcatctttttgatgcttttgtcagtgtactgggtttgttacagaaggagaaagtggcagttgaagcatttcagatttgctgccttctcctacctcctgaaaataggagaaagttacagctattgatgaggatgatggcaaggatttgcttaaacaaagagatgccacccctgtgtgatggctttggtacccgaacactgatggttcagacattttcccgttgcatcttgtgttccaaggatgaagtggacttggatgagttattagctgctagattggtaacgtttctgatggacaattaccaggaaattctgaaagtccctttggccttgcagacctctatagaggagcgtgtggctcatctacgaagagtccagtttcagaaatcctatcctgaagtctatcaagaacgatttcctacaccagaaagtgcagcacttctgtttcctgaaaaacccaaaccgaaaccacagctgctaatgtgggcactaaagaagcctttccaaccatttcaaagaactagaagttttcgaatgtaataatacttccacagcaacaggtgctagagaccactgttgttgttttgagtgaatggtggttaggagaaagactttggtggtggaa

SEQ ID NO: 5440 - DNA, 651 bp, Homo sapiens
  source 1..651: mol_type = unassigned DNA; mol_type = unassigned DNA
atctaattttaaacaatttccaatggtgcctgtttccttttctttgaaaatctctggagaaatagttcctcttgctgtgtctttctttaggcaagaatttttactaattgatgtgtagtctgaatcctggctaagtataaaccttttattttttatacctgttcttagtgaaaatgaaactgtgactttttttttaattccttttgttggtcaaaaactacaattaactcttctgagtttcttctctggctgaacaaacaatggtcccattggcctttcagggaactccaggccgtctcaaaaaccttcatgtttcatttcttttcagagctcccaaaaagaatagcttgctcttgacgttgtacatgttagtggaatgatcaggactactttgcaaagatgaaaaatttgtgtttctagtgatttgaaaatagaaatctgatgtaactattagatattgggaaagaaggtgacgaaggtttgttacagaaggagaaagtggcagttgaagcatttcagatttgctgccttctcctacctcctgaaaataggagaaagttacagctattgatgaggatgatggcaaggatttgcttaaacaaagagatgccacccctgtgtgatggctttggtacccgaacactggtaggt

SEQ ID NO: 5441 - DNA, 854 bp, Homo sapiens
  source 1..854: mol_type = unassigned DNA; mol_type = unassigned DNA
aagcacttttccatatttgcttcaaatggcctttagccccaaaaaattatgtcaaagaggaatgttttgaggtgacacattctgtttccttcagtactctcgttggtgagtctccagattcaccttcatataaacttcccttgaacactatagacattttataattctttatttctgcatttgctttgagataaggtctttagttatttgtatgatttttttctgtggataacatgggtaagatttttaagctgtttttttggcttaagtaaataaaaagtcaaaataaaagtcaacaacccgctgccttttatgtcaacattaagaactagagttcttacattgcttttgcagtgcaatgtaatgcattgtatccttttctaacaagactgcagaaaaatattatctgataaaaaatatgtattcaatcacctttcttttctttatcaggtatggtatagagcagtttaaaaaattaaaatttatgtaattattgtataaatattgtacaaattattgtataaattttcagatacaccaaagtggagactattgttaaaatatctgtgtctcccactgactgcagtaatagagaatttcttcttgggttttagatttcctccttcttcacccctgaaaccatatccaaagaagcccccaaaccaaaaggatgttattaaatttccagaatggaatgatctcccaccaggcacttcacaagagaacatcccagtgaggccagttgtgatgaattctgagatgtggtacaagcgtcacagtattgcaattggagaggtgccagcttgccgtcttgtccaccgcagacagctgacagaggccaatgtagaagagat

SEQ ID NO: 5442 - DNA, 661 bp, Homo sapiens
  source 1..661: mol_type = unassigned DNA; mol_type = unassigned DNA
agcgcccgcagcccgcgggcttgggattcaaactgctgctcctccggctggcggggatcagcgctggcgcggctgcggccgctgctgcctacgcgccatggagcatcgcatcgtggggcccgggccgtaccgagctaccaggctgtttctatttttgaggccgggtgcagtggctcactcctgtaattccagcactttgggaggctgaggcggctggatcacttgagatcaagagttcgagaccaccctgaccaacatgtggaatgagaccgtggagctttttcgtgctaagatgccgttacggaaacatcgctgtcgtttcaagagctatgagcattgtttcacagcggccgaagctgtggattggctgcatgagctgctgaggtgcagtcaaaacttcggccctgaagtgacccgcaaacaaacggtccagctgctaaaaaaattcctgaagaatcacgttattgaagacatcaagggaaaatggggtgaggaagattttgaagacaatcgtcacttatacagatttcctccttcttcacccctgaaaccatatccaaagaagcccccaaaccaaaaggatgttattaaatttccagaatggaatgatctcccaccaggcacttcacaagagaacatcccagtgaggccagttgtgatg

SEQ ID NO: 5443 - DNA, 1755 bp, Homo sapiens
  source 1..1755: mol_type = unassigned DNA; mol_type = unassigned DNA
gagccacgccccgcacagttaacagacgggcgctcagggagctagggagctgtgaagctgctggaggagttggcgtccggggagcaagggccatggccaccgtgcaggagaaggctgctgcgctgaacctctcggctctccacagccccgcgcacaggcctccgggtttcagtgtagctcagaagccatttggagccacgtatgtatggagcagcatcataaacactcttcaaacacaagtggaagtgaaaaaacgaaggcaccgtttaaaacgacataatgactgctttgttggttcagaagctgtggatgtcattttttctcacctaattcagaataagtattttggtgatgtagatattcctcgagccaaagtggtgagagtgtgtcaagcgcttatggactacaaagtatttgaagcagttccaaccaaagtctttggaaaagacaaaaaacctacatttgaagatagtagttgcagcctttatagattcaccacaatacctaaccaagacagtcagttaggcaaagagaacaaactatattcacctgccaggtatgcagatgcattatttaagtcatccgatatcagatcagccagtttagaggacctgtgggaaaatctgagtttaaagcctgccaactcccctcatgtaaatatctctgcaaccttgtctccacaagttattaatgaagtgtggcaagaagaaacaattgggcgtctactacaacttgtagaccttccacttcttgactccttactgaaacagcaagaggctgtacctaaaattcctcaacctaagaggcagtccaccatggtcaacagcagtaactatctggatcgagggattctcaaggcttatagtgactctcaggaagatgagtggctctcggcagcaattgactgtttagaataccttccagaccaaatggtggtggaaataagcagaagctttcctgagcaaccagaccgaacagacttagtgaaagaacttctgtttgatgccattggcagatattacagtagtagggaacctctgttaaatcacttatctgacgttcataatggaattgcagaactcttagtgaatgggaagacggaaatagctttagaagctacccagctccttctaaagcttttagatttccaaaatagagaagaatttagaagactactgtatttcatggctgttgcagcaaatccttctgagtttaaattacagaaagaaagtgacaaccgaatggttgtgaaaaggatattctcaaaagctattgttgacaataaaaatttatccaaaggcaaaacagatcttctggtactctttttaatggatcatcagaaagatgtttttaagattcctggaactctacataaaattgtaagtgttaagcttatggccatacagaacggaagagatccaaatagagatgcaggatatatttattgccagagaattgatcaacgtgactattccaacaatacagagaagacaaccaaagatgagctgttgaatttactaaaaactcttgatgaggattcaaaactttctgccaaagagaagaaaaaattgctaggtcaattctataagtgtcacccagacatctttattgagcattttggagactgagtttttaatatctgtatataagttgtgtattttaagaataaattatgtatcctaaatatccaatcacatttgtaagcgtggaagctctaaatttgaaactgtacttaataaaaatttttttgtataa

SEQ ID NO: 5444 - DNA, 1212 bp, Homo sapiens
  source 1..1212: mol_type = unassigned DNA; mol_type = unassigned DNA
gcacagttaacagacgggcgctcagggagctagggagctgtgaagctgctggaggagttggcgtccggggagcaagggccatggccaccgtgcaggagaaggctgctgcgctgaacctctcggctctccacagccccgcgcacaggcctccgggtttcagtgtagctcagaagccatttggagccacgtatgtatggagcagcatcataaacactcttcaaacacaagtggaagtgaaaaaacgaaggcaccgtttaaaacgacataatgactgctttgttggttcagaagctgtggatgtcattttttctcacctaattcagaataagtattttggtgatgtagatattcctcgagccaaagtggtgagagtgtgtcaagcgcttatggactacaaagtatttgaagcagttccaaccaaagtctttggaaaagacaaaaaacctacatttgaagatagtagttgcagcctttatagattcaccacaatacctaaccaagacagtcagttaggcaaagagaacaaactatattcacctgccaggttggtatataatgttagattatcacgggaatattggcaggattttgtctacctttttatgagatgcctactggctttatattacatttttagcagtaaatgtggctaaaatatgggtctgtgggtaaatttgataaagtgcgatgaaattttgttagctttattgggtgtctcctagtcatattttatatttagcagaagcagtcaacacactttgattttcctgcttcaggttatagttgcagtgtaaaaagtgttctcataccacttggtatgagaacatagcgaaggcaggcagagagaaacccagattgcggtgggagagaagaaggaattatttaaagggaaactggggagacagaattgtggaatccagtgattgaaatggatgtgggtgataatgcataatgaacttacagctatttgtcatgaagtaaaccaactttaccctttcccctttgttaccctcagctaaactgtgcagtggtgacacagaggtataattgaagctcttatatcagatctgacctaaagtcagagttttagtgtattcattttcgtgtgtgtgtacttttttgaggcagggtcttaccctctcacccagactggagtgcagtggtgtgatctcagctcactgcattgtctgccttttgggctcaagcgatcat

SEQ ID NO: 5445 - DNA, 1118 bp, Homo sapiens
  source 1..1118: mol_type = unassigned DNA; mol_type = unassigned DNA
agctgtgaagctgctggaggagttggcgtccggggagcaagggccatggccaccgtgcaggagaaggctgctgcgctgaacctctcggctctccacagccccgcgcacaggcctccgggtttcagtgtagctcagaagccatttggagccacgtatgtatggagcagcatcataaacactcttcaaacacaagtggaagtgaaaaaacgaaggcaccgtttaaaacgacataatgactgctttgttggttcagaagctgtggatgtcattttttctcacctaattcagaataagtattttggtgatgtagatattcctcgagccaaagtggtgagagtgtgtcaagcgcttatggactacaaagtatttgaagcagttccaaccaaagtctttggaaaagacaaaaaacctacatttgaagatagtagttgcagcctttatagattcaccacaatacctaaccaagacagtcagttaggcaaagagaacaaactatattcacctgccaggtatgcagatgcattatttaagtcatccgatatcagatcagccagtttagaggacctgtgggaaaatctgagtttaaagcctgccaactcccctcatgtaaatatctctgcaaccttgtctccacaaggtaagctaaggatgaagcaaagtaagaagtagaagacaaacttcaaagttatttaaaattttttaatcttaatctttattagattttaaatattcaaagtacagagaaagagtgcactatgtattaaagctgtttatgttcaattttaacagaagtctattatctttaacaaatagatcagtgttagaactcttgaacactgacttttgtccgatcagctggcaaaggttcagatctgagatgttttgcatgcagatttgtattgaaaatatgctctccgatgtttcttttcctaagattttattaggtcaagtaaaatttgaaaattacattaaaacattaacagaattcttcggttcttccttgtctgtagcaatggaatatagtttaatgactttaatttccaccctttcccccattccagttgtggaaaccctgagtggaataatctgcaaccaatagtttcaaacaagtttttagc

SEQ ID NO: 5446 - DNA, 2012 bp, Homo sapiens
  source 1..2012: mol_type = unassigned DNA; mol_type = unassigned DNA
agctgcgaccacttggccaacgcccccgccgagcgggcggatcgagttcctctctggctggtgggctgcaagcggcagagcccgcccgcacagcccagcttttttctttctacccagactctcaacttgaccgcgcgttggtctgtgcgcccgctaacgtgccaggcacgcgccggggagctccgggatatgctccgcggtgctaccggtgacaagtgtggtatctggaatttgtgtagttctttgccccctgtctcaaccacaaaccttgacgacacagtatggccaggggccgagctcctcccttgcccactttgttctccagactgctaggagtcaagagtcagcttgtctccccagactcttcctgggagggatgagaggtttatgtgagttctactggcaggaatttggcataaaaggtttcagtgtagctcagaagccatttggagccacgtatgtatggagcagcatcataaacactcttcaaacacaagtggaagtgaaaaaacgaaggcaccgtttaaaacgacataatgactgctttgttggttcagaagctgtggatgtcattttttctcacctaattcagaataagtattttggtgatgtagatattcctcgagccaaagtggtgagagtgtgtcaagcgcttatggactacaaagtatttgaagcagttccaaccaaagtctttggaaaagacaaaaaacctacatttgaagatagtagttgcagcctttatagattcaccacaatacctaaccaagacagtcagttaggcaaagagaacaaactatattcacctgccaggtatgcagatgcattatttaagtcatccgatatcagatcagccagtttagaggacctgtgggaaaatctgagtttaaagcctgccaactcccctcatgtaaatatctctgcaaccttgtctccacaagttattaatgaagtgtggcaagaagaaacaattgggcgtctactacaacttgtagaccttccacttcttgactccttactgaaacagcaagaggctgtacctaaaattcctcaacctaagaggcagtccaccatggtcaacagcagtaactatctggatcgagggattctcaaggcttatagtgactctcaggaagatgagtggctctcggcagcaattgactgtttagaataccttccagaccaaatggtggtggaaataagcagaagctttcctgagcaaccagaccgaacagacttagtgaaagaacttctgtttgatgccattggcagatattacagtagtagggaacctctgttaaatcacttatctgacgttcataatggaattgcagaactcttagtgaatgggaagacggaaatagctttagaagctacccagctccttctaaagcttttagatttccaaaatagagaagaatttagaagactactgtatttcatggctgttgcagcaaatccttctgagtttaaattacagaaagaaagtgacaaccgaatggttgtgaaaaggatattctcaaaagctattgttgacaataaaaatttatccaaaggcaaaacagatcttctggtactctttttaatggatcatcagaaagatgtttttaagattcctggaactctacataaaattgtaagtgttaagcttatggccatacagaacggaagagatccaaatagagatgcaggatatatttattgccagagaattgatcaacgtgactattccaacaatacagagaagacaaccaaagatgagctgttgaatttactaaaaactcttgatgaggattcaaaactttctgccaaagagaagaaaaaattgctaggtcaattctataagtgtcacccagacatctttattgagcattttggagactgagtttttaatatctgtatataagttgtgtattttaagaataaattatgtatcctaaatatccaatcacatttgtaagcgtggaagctctaaatttgaaactgtacttaataaaaatttttttgtataa

SEQ ID NO: 5447 - DNA, 2248 bp, Homo sapiens
  source 1..2248: mol_type = unassigned DNA; mol_type = unassigned DNA
gtctcccctcgccgcatccactctccggccggccgcctgcccgccgcctcctccgtgcgcccgccagcctcgcccgcgccgtcaccatgagccaggcctactcgtccagccagcgcgtgtcctcctaccgccgcaccttcggcggggccccgggcttcccactcggctccccgctgagttcgcccgtgttcccgcgggcgggtttcggctctaagggctcctccagctcggtgacgtcccgcgtgtaccaggtgtcgcgcacgtcgggcggggccgggggcctggggtcgctgcgggccagccggctggggaccacccgcacgccctcctcctacggcgcaggcgagctgctggacttctcactggccgacgcggtgaaccaggagtttctgaccacgcgcaccaacgagaaggtggagctgcaggagctcaatgaccgcttcgccaactacatcgagaaggtgcgcttcctggagcagcagaacgcggcgctcgccgccgaagtgaaccggctcaagggccgcgagccgacgcgagtggccgagctctacgaggaggagctgcgggagctgcggcgccaggtggaggtgctcactaaccagcgcgcgcgcgtcgacgtcgagcgcgacaacctgctcgacgacctgcagcggctcaaggccaagctgcaggaggagattcagttgaaggaagaagcagagaacaatttggctgccttccgagcggacgtggatgcagctactctagctcgcattgacctggagcgcagaattgaatctctcaacgaggagatcgcgttccttaagaaagtgcatgaagaggagatccgtgagttgcaggctcagcttcaggaacagcaggtccaggtggagatggacatgtctaagccagacctcactgccgccctcagggacatccgggctcagtatgagaccatcgcggctaagaacatttctgaagctgaggagtggtacaagtcgaaggtgtcagacctgacccaggcagccaacaagaacaacgacgccctgcgccaggccaagcaggagatgatggaataccgacaccagatccagtcctacacctgcgagattgacgccctgaagggcactaacgattccctgatgaggcagatgcgggaattggaggaccgatttgccagtgaggccagtggctaccaggacaacattgcgcgcctggaggaggaaatccggcacctcaaggatgagatggcccgccatctgcgcgagtaccaggacctgctcaacgtgaagatggccctggatgtggagattgccacctaccggaagctgctggagggagaggagagccggatcaatctccccatccagacctactctgccctcaacttccgagaaaccagccctgagcaaaggggttctgaggtccataccaagaagacggtgatgatcaagaccatcgagacacgggatggggaggtcgtcagtgaggccacacagcagcagcatgaagtgctctaaagacagagaccctctgccaccagagaccgtcctcacccctgtcctcactgctccctgaagccagccttcttccatcccaggacaccacacccagcctcagtcctcccctcacagcctctgacccctcctcactggccatccctcgtggtccccaacagcgacatagcccatccctgcctggtcacagggcatgccccggccacctctgcggaccccagctgtgagccttggctgttggcagtgagtgagcctggctcttgtgctggatggagcccaggcgggagcggtggccctgtccctcccacctctgtgacctcaggcactagcctttggctctggagacagccccagagcagggtgttgggatactgcagggccaggactgagccccgcagacctccccagcccctagcccaggagagagaaagccaggcaggtagccagggggactagcccctgtggagactggggggcttgaaattgtccccgtggtctcttactttcctttccccagcccagggtggacttagaaagcaggggctacaagagggaatccccgaaggtgctggaggtgggagcaggagattgagaaggagagaaagtgggtgagatgctggagaagagaggagaggagagaggcagagagcggtctcaggctggtgggaggggcgcccacctccccacgccctcccctcccctgctgcaggggctctggagagaaacaataaagagattcacacacaagccaa

SEQ ID NO: 5448 - DNA, 760 bp, Homo sapiens
  source 1..760: mol_type = unassigned DNA; mol_type = unassigned DNA
tgccagctttatcacccgcaactgtctgtctttctgtctgtcccacccaggctgcaggaggagattcagttgaaggaagaagcagagaacaatttggctgccttccgagcggacgtggatgcagctactctagctcgcattgacctggagcgcagaattgaatctctcaacgaggagatcgcgttccttaagaaagtgcatgaagaggagatccgtgagttgcaggctcagcttcaggaacagcaggtccaggtggagatggacatgtctaagccagacctcactgccgccctcagggacatccgggctcagtatgagaccatcgcggctaagaacatttctgaagctgaggagtggtacaagtcgaaggtgtcagacctgacccaggcagccaacaagaacaacgacgccctgcgccaggccaagcaggagatgatggaataccgacaccagatccagtcctacacctgcgagattgacgccctgaagggcactaacgattccctgatgaggcagatgcgggaattggaggaccgatttgccagtgaggccagtggctaccaggacaacattgcgcgcctggaggaggaaatccggcacctcaaggatgagatggcccgccatctgcgcgagtaccaggacctgctcaacgtgaagatggccctggatgtggagattgccacctaccggaagctgctggagggagaggagagccggatcaatctccccatccagacctactctgccctcaacttccgag

SEQ ID NO: 5449 - DNA, 706 bp, Homo sapiens
  source 1..706: mol_type = unassigned DNA; mol_type = unassigned DNA
agaagcagagaacaatttggctgccttccgagcggacgtggatgcagctactctagctcgcattgacctggagcgcagaattgaatctctcaacgaggagatcgcgttccttaagaaagtgcatgaagaggagatccgtgagttgcaggctcagcttcaggaacagcaggtccaggtggagatggacatgtctaagccagacctcactgccgccctcagggacatccgggctcagtatgagaccatcgcggctaagaacatttctgaagctgaggagtggtacaagtcgaaggtgtcagacctgacccaggcagccaacaagaacaacgacgccctgcgccaggccaagcaggagatgatggaataccgacaccagatccagtcctacacctgcgagattgacgccctgaagggcactaacgattccctgatgaggcagatgcgggaattggaggaccgatttgccagtgaggccagtggctaccaggacaacattgcgcgcctggaggaggaaatccggcacctcaaggatgagatggcccgccatctgcgcgagtaccaggacctgctcaacgtgaagatggccctggatgtggagattgccacctaccggaagctgctggagggagaggagagccggatcaatctccccatccagacctactctgccctcaacttccgaggtgagtgtctgctggcaggcgga

SEQ ID NO: 5450 - DNA, 462 bp, Homo sapiens
  source 1..462: mol_type = unassigned DNA; mol_type = unassigned DNA
tcttgaagaagtaacaagcctgtcttgaggggggttggggtctgctagggctctgcccaatgtggccccagatggactcccagcccctggtatagcccagcctggacttggtcaggctgagtgtgcgatggaccctgttacagaaaccagccctgagcaaaggggttctgaggtccataccaagaagacggtgatgatcaagaccatcgagacacgggatggggaggtcgtcagtgaggccacacagcagcagcatgaagtgctctaaagacagagaccctctgccaccagagaccgtcctcacccctgtcctcactgctccctgaagccagccttcttccatcccaggacaccacacccagcctcagtcctcccctcacagcctctgacccctcctcactggccatccctcgtggtccccaacagcgacatagcccatccctgcctggtcacagggcatgc

SEQ ID NO: 5451 - DNA, 2590 bp, Homo sapiens
  source 1..2590: mol_type = unassigned DNA; mol_type = unassigned DNA
agaaagcaatgtttgagcaccagctatgctgagattccctcgttcagtattcgttgagcacccagtgtgtgagagcgcctggttttgccctcaaggagcttagagtggagtttacaggaatgaatcactgattagcggcaggcctaagtgtgggcactgtcgcaccacacacccagatactactccaggcacgggcattaggggctcccacaggctggacaggccttggactttcctggttgaaccgtgaggccgcggtgtcagtccacactccactgtgggtggcgggttcggccccgcgaggaggcgccgctctcaaaccccacggtcccgcgcagcgaagaggcgaggcggccgcggaaggcaggcgcagcccactcttcccgagaggccccgacatctcccggataatctggagctttcaaaatgtttgccaaagcaaccaggaattttcttagagaagttgatgctgatggtgacctgattgcagtatcaaatctgaatgactctgataagttacagcttctaagtctggtgacaaaaaagaagagattctggtgctggcagagacccaagtaccagtttttatccctcacccttggcgatgtactcatagaagaccaatttccgagtccagtggtcgtggagtcggactttgtgaaatacgagggcaagtttgcaaaccacgtgagtggaaccctggagactgcactggggaaggtcaagctgaacctggggggcagcagccgcgtagagagccagtcttcatttggaaccctgaggaagcaggaggtggatttgcagcagctcatcagagactctgccgagagaacaataaatctgagaaaccctgtgctccagcaggtgctggaaggaaggaatgaggtcctgtgcgttttgacacagaagatcacgacgatgcagaagtgtgtgatctctgagcacatgcaggtcgaggagaagtgtggtggcatcgtgggcatccagaccaagacggtgcaggtgtcagcgacggaggatgggaatgtcaccaaggactccaacgtggtgctggagatcccagctgccaccaccattgcctacggtgtcattgagttatacgtgaaactggacggccagttcgagttctgccttctccgagggaagcaaggtggcttcgagaacaagaagagaattgactctgtctacctggaccccctggtctttcgagagtttgcattcatagacatgccagatgctgcgcatgggatatcttcccaggatggaccattaagtgttttaaagcaagcgaccctgctcctggagaggaatttccatccatttgcggagctgcctgagccacaacagacagctttgagtgacatcttccaggcggtcctatttgatgatgaactactcatggtcctggaaccagtgtgcgatgacctggtcagcggcctctcgcccacagtggcggtgctgggggagctgaagccccggcagcagcaggaccttgtggccttcctgcagctggtggggtgcagcttacagggtgggtgtccgggccccgaggatgcaggcagcaagcagctgtttatgacagcctacttcttggtcagtgccctcgcagaaatgccagatagcgcagcagctctgctgggcacttgctgcaaactccagatcattcccacactgtgccacttgcttcgtgctctgtctgatgatggagtatctgatcttgaagacccaaccttgactcccctgaaagatacagaaaggtttgggattgtgcagcgcttgtttgcctcagctgacattagtctggagagactgaagtcatctgtgaaagctgtcattctgaaggactctaaagtcttcccactgcttctttgtataaccctgaatggactctgtgctttaggcagagaacattcatgatgtcatatgtgaactagaagtacgtgttactggccaaggctatttttcagaactgttaaaggtcatatgcacgttaaaagttgaccaatgaaatgaatttacagaacagtttaagaagtggtgacattttgcatgatgaatgacctgacttttagccaccaggtactctttaaacagttttccttatcagaggccctcctgtgctggtgacccagcatctgagttaggttccagcatgtaaagagctgggagggcggagaattcttagcatacattcagacgttttttctgcacaataataagtccatctgtcacttgcattccactttttgttacatagaaagagtctgaccctttaatccaaaaggtctttttacattgtgaatgctgtgggaaggcaatttctctgcacacaagaggctacgttttggaagtgatgtatgttatttgatgactgaaaatgaactgtaaatgctcctagagtatattcctctgctgaacaaaattaaacttcaaaaaaatctaacagtaacacacccctgcttgggaccctagctatatgcattttatgtgaccttgccatgcttcagtgaacatactaattctatgtctagcacatgttgatttcctatgtattctgggtattctattaaaggaaactttgaactatgtc

SEQ ID NO: 5452 - DNA, 4182 bp, Homo sapiens
  source 1..4182: mol_type = unassigned DNA; mol_type = unassigned DNA
gtgggaggctgatgggaaaccccccttcggtctcgagtctgtgcctttccatccagcacaagcctccctactctcccggagggcccttctccctcctcccccagggaaggccacagtgggtgcccctttgcctacaaaagcaagcatctccctgacaggctgtggttcactccggagtcccagcagagctgagtggcagcaactttcatttgccaactgctctcctccagcatttcagtccttctgatctttgcaaacttgttattccccaccctgcgtgctcctgtctggggcaagggggctgtggagagcattcaaccatccaatgtactaggctgggaggcagagctgtggctgggcccagatgcacagcttctgcactggtcctgaaatggcctcccaggggagcagccatccagttactgtggaacaatctctgccacctctgtacccctcccatccggaactcgccatgccacagtgcctgtcacgaggaagctgggcttcctattccctctcagaaaagccagttgtggcaaaccagtccccacagcttcccttcatggtgacactagtcaggacacatagtttctgatacattcagggttcctccctagcaccacacagaaacagacccagtaatcttcagtttttaaagaattaatctgagagaatgcctgtcccaactctatgtgctgataaatatatgctctgtcttgttccaactcatggataaatatagttttgactggtaaactgaaacaggacataagacagagccctgcggaactccactagagactttctcccaatgttaacatccgggtattagagtctttcagaacaggcattctgtcaggagctaatacacaggccagagttctccgacttgtgagaggtcttttcttcatataccccattacttattgcagcatttctatcaatagcctggatcagtgatgccaagtaggtaacacagggccagcatcatgaaagcaccacagtccccttctacttgagcctagacacagcatcaaattctctgcaactggctgggtgtggtggcccccatctgtaatcctagcgttttgggagggtaaggtggaaggatcacttgagcccaggagttcaagaccagcctagggaacatggcaagacctcatctgtacaaaaaataaattagccaggcatggtggtgtgtacctctgtagtcccagctacttgaggggctgtggaggattgcttgagcccaggaattcaaggatgcagtgaactatggacgccattgcagtccagcttggaaaaaaaaaaaaatctctgcaagcttgcacgcaggcagcaggccacgcagttgacacataatgtgagactgacttgctgtttctgaattggaaactcagaggtagtgaaatctttaggtgcagctggcaatgtctaaatttttcaaccaatcctgccctttatttttctgaactgtgatctcatttatatgtcagtcccagtggaggccaggctggcatacagcccttccatttgtgctcttgctaatcctccgcccttctgagttcattttttttcctcttaatataatcttctctccttaaaaactgaggaaagtgctggaatagaaaatggggtcttcgtaggtcctcacaccagtttctggctaatagctgttttcagcacttcagtcccacatgtgacctgtctcctgggaagcttcctccactattttgtaaccttaagcaactccaaaggtctcaactccttggactctatttgtaaaatagaattggtacatggaagagcaatcaaaataatttcagttcaagaaacatttaacaagcttatactatgttttaggcagtgctaggtaaatatcaagtcttggccctccaggaaatcagagtcaagtagtaaaattagtgggtaagctcggtaatgcagatgctgttctttcatttctgtgcccctagcacctagtgtaccacactcaagatagcagctaaatgggtaatatgggactcaggtatttccaagaataagagatgaggatgatggttacctgggtcccaggagccaccctggaaagtgaaggcagggcagtaatggcagatgagatggctggggacagaggctcagctggatacgctaggccacataggctttccgtcttcaccttcctgctttggggtaagagactacttgagaaactgtggatcttctcttcagacaaatgcatacacatttgaataccacattaggttctctgaaagaagcatccccctggctgctgccccacccccttaatagcctacactctctcttgagaacgagccatgtactctctgggtcacacctcaacaacacactgtctttacaaataaggctgctaacacatggcaggaacaactgagttcctaaccagtccctcggctacctgattcagcacgtgactcattcttttttgccttttcagctcaaagcttgtacccccaagggactatggtccttttaagaactgtatctgtgttttccctgggaggtgtttaatatccactttgaataacactgatctggcattcccttccctggggcttggcaagggcccttctggtgcagcccctagcctggcacagctctgctccaactttctgctgttgctgctcctggcctcaggccacgctgcactgataaagctacactgcattttcctccccaaaatgattggtgatggggtagagccctttatagtttacacagtattctgacatatgcaaaaacaaaacaactatggtaaatgaggaaactgaggctgagagaggtgtacctgaggctgcagcctgaatgtgtggagggtctcaaacatcactcttctgtcaccagatggcagggtctgcttttccatgctgtttcctttccttcccccagagtctgggcagttctttccatttggtaaattgaatgtcaaggagtatcctctgtggaatgcagagctggcagctgggttcctacatctgttttctacaaggtctttgctgcccatttagcaccattcattcactaactcagcaactgctgagtacctcccctgcctggctggcgggaaagtactaaaatataagttaggtgccatccaggggctggctctgttcccatggacttgtttttttggactgtgactgtgatttttctctcctgcagaaatgccagatagcgcagcagctctgctgggcacttgctgcaaactccagatcattcccacactgtgccacttgcttcgtgctctgtctgatgatggagtatctgatcttgaagacccaaccttgactcccctgaaagatacagaaaggtttgggattgtgcagcgcttgtttgcctcagctgacattagtctggagagactgaagtcatctgtgaaagctgtcattctgaaggactctaaagtcttcccactgcttctttgtataaccctgaatggactctgtgctttaggcagagaacattcatgatgtcatatgtgaactagaagtacgtgttactggccaaggctatttttcagaactgttaaaggtcatatgcacgttaaaagttgaccaatgaaatgaatttacagaacagtttaagaagtggtgacattttgcatgatgaatgacctgacttttagccaccaggtactctttaaacagttttccttatcagaggccctcctgtgctggtgacccagcatctgagttaggttccagcatgtaaagagctgggagggcggagaattcttagcatacattcagacgttttttctgcacaataataagtccatctgtcacttgcattccactttttgttacatagaaagagtctgaccctttaatccaaaaggtctttttacattgtgaatgctgtgggaaggcaatttctctgcacacaagaggctacgttttggaagtgatgtatgttatttgatgactgaaaatgaactgtaaatgctcctagagtatattcctctgctgaacaaaattaaacttcaaaaaaatctaacagtaacacacccctgcttgggaccctagctatatgcattttatgtgaccttgccatgcttcagtgaacatactaattctatgtctagcacatgttgatttcctatgtattctgggtattctattaaaggaaactttgaactat

SEQ ID NO: 5453 - DNA, 2005 bp, Homo sapiens
  source 1..2005: mol_type = unassigned DNA; mol_type = unassigned DNA
cccgccggcccagcgcaggctcctccgactccgccagcgcagggggcgcggctgccggggacccagcagcgggcgcgcggtggtcgtggagtcggactttgtgaaatacgagggcaagtttgcaaaccacgtgagtggaaccctggagactgcactggggaaggtcaagctgaacctggggggcagcagccgcgtagagagccagtcttcatttggaaccctgaggaagcaggaggtggatttgcagcagctcatcagagactctgccgagagaacaataaatctgagaaaccctgtgctccagcaggtgctggaaggaaggaatgaggtcctgtgcgttttgacacagaagatcacgacgatgcagaagtgtgtgatctctgagcacatgcaggtcgaggagaagtgtggtggcatcgtgggcatccagaccaagacggtgcaggtgtcagcgacggaggatgggaatgtcaccaaggactccaacgtggtgctggagatcccagctgccaccaccattgcctacggtgtcattgagttatacgtgaaactggacggccagttcgagttctgccttctccgagggaagcaaggtggcttcgagaacaagaagagaattgactctgtctacctggaccccctggtctttcgagagtttgcattcatagacatgccagatgctgcgcatgggatatcttcccaggatggaccattaagtgttttaaagcaagcgaccctgctcctggagaggaatttccatccatttgcggagctgcctgagccacaacagacagctttgagtgacatcttccaggcggtcctatttgatgatgaactactcatggtcctggaaccagtgtgcgatgacctggtcagcggcctctcgcccacagtggcggtgctgggggagctgaagccccggcagcagcaggaccttgtggccttcctgcagctggtggggtgcagcttacagggtgggtgtccgggccccgaggatgcaggcagcaagcagctgtttatgacagcctacttcttggtcagtgccctcgcagaaatgccagatagcgcagcagctctgctgggcacttgctgcaaactccagatcattcccacactgtgccacttgcttcgtgctctgtctgatgatggagtatctgatcttgaagacccaaccttgactcccctgaaagatacagaaaggtttgggattgtgcagcgcttgtttgcctcagctgacattagtctggagagactgaagtcatctgtgaaagctgtcattctgaaggactctaaagtcttcccactgcttctttgtataaccctgaatggactctgtgctttaggcagagaacattcatgatgtcatatgtgaactagaagtacgtgttactggccaaggctatttttcagaactgttaaaggtcatatgcacgttaaaagttgaccaatgaaatgaatttacagaacagtttaagaagtggtgacattttgcatgatgaatgacctgacttttagccaccaggtactctttaaacagttttccttatcagaggccctcctgtgctggtgacccagcatctgagttaggttccagcatgtaaagagctgggagggcggagaattcttagcatacattcagacgttttttctgcacaataataagtccatctgtcacttgcattccactttttgttacatagaaagagtctgaccctttaatccaaaaggtctttttacattgtgaatgctgtgggaaggcaatttctctgcacacaagaggctacgttttggaagtgatgtatgttatttgatgactgaaaatgaactgtaaatgctcctagagtatattcctctgctgaacaaaattaaacttcaaaaaaatctaacagtaacacacccctgcttgggaccctagctatatgcattttatgtgaccttgccatgcttcagtgaacatactaattctatgtctagcacatgttgatttcctatgtattctgggtat

SEQ ID NO: 5454 - DNA, 1689 bp, Homo sapiens
  source 1..1689: mol_type = unassigned DNA; mol_type = unassigned DNA
ggggcgcccggaccgagcaaaggtcccggcgggcgggccctctctccgccctccccaagcgcccgccccccgccggcccagcgcaggctcctccgactccgccagcgcagggggcgcggctgccggggacccagcagcgggcgcgcggataatctggagctttcaaaatgtttgccaaagcaaccaggaattttcttagagaagttgatgctgatggtgacctgattgcagtatcaaatctgaatgactctgataagttacagcttctaagtctggtgacaaaaaagaagagattctggtgctggcagagacccaagtaccagtttttatccctcacccttggcgatgtactcatagaagaccaatttccgagtccagtggtcgtggagtcggactttgtgaaatacgagggcaagtttgcaaaccacgtgagtggaaccctggagactgcactggggaaggtcaagctgaacctggggggcagcagccgcgtagagagccagtcttcatttggaaccctgaggaagcaggaggtggatttgcagcagctcatcagagactctgccgagagaacaataaatctgagaaaccctgtgctccagcaggtgctggaaggaaggaatgaggtcctgtgcgttttgacacagaagatcacgacgatgcagaagtgtgtgatctctgagcacatgcaggtcgaggagaagtgtggtggcatcgtgggcatccagaccaagacggtgcaggtgtcagcgacggaggatgggaatgtcaccaaggactccaacgtggtgctggagatcccagctgccaccaccattgcctacggtgtcattgagttatacgtgaaactggacggccagttcgagttctgccttctccgagggaagcaaggtggcttcgagaacaagaagagaattgactctgtctacctggaccccctggtctttcgagagtttgcattcatagacatgccagatgctgcgcatgggatatcttcccaggatggaccattaagtgttttaaagcaagcgaccctgctcctggagaggaatttccatccatttgcggagctgcctgagccacaacagacagctttgagtgacatcttccaggcggtcctatttgatgatgaactactcatggtcctggaaccagtgtgcgatgacctggtcagcggcctctcgcccacagtggcggtgctgggggagctgaagccccggcagcagcaggaccttgtggccttcctgcagctggtggggtgcagcttacagggtgggtgtccgggccccgaggatgcaggcagcaagcagctgtttatgacagcctacttcttggtcagtgccctcgcagaaatgccagatagcgcagcagctctgctgggcacttgctgcaaactccagatcattcccacactgtgccacttgcttcgtgctctgtctgatgatggagtatctgatcttgaagacccaaccttgactcccctgaaagatacagaaaggtttgggattgtgcagcgcttgtttgcctcagctgacattagtctggagagactgaagtcatctgtgaaagctgtcattctgaaggactctaaagtcttcccactgcttctttgtataaccctgaatggactctgtgctttaggcagagaacattcatgatgtcatatgtgaactagaagtacgtgttact

SEQ ID NO: 5455 - DNA, 450 bp, Homo sapiens
  source 1..450: mol_type = unassigned DNA; mol_type = unassigned DNA
cagctgtttatgacagcctacttcttggtcagtgccctcgcagaaatgccagatagcgcagcagctctgctgggcacttgctgcaaactccagatcattcccacactgtgccacttggtaagcaacctcccaggtgggaccttagaatggataggaatggggaaatgatgagggggtagacatccagcagccggtaaaacacctctaggacttaccacaacagctcttcaagacacattaagtaagtattgttattaaccccacttttatacacatcccaccccatgggaagactgagacccagaggaaaatgatttgtccaaataacttgttagcaggtccaggacttcatccttgtctttcgactccaactcttatacttttcccattgtttggagagaattttggccaaggtttggtgttacattacaataaaggggcctgacacca

SEQ ID NO: 5456 - DNA, 500 bp, Homo sapiens
  source 1..500: mol_type = unassigned DNA; mol_type = unassigned DNA
cagctgccaccaccattgcctacggtgtcattgagttatacgtgaaactggacggccagttcgagttctgccttctccgagggaagcaaggtggcttcgagaacaagaagagaattgactctgtctacctggaccccctggtctttcgagagtttgcattcatagacatgccagatgctgcgcatgggatatcttcccaggatggaccattaagtgttttaaagcaagcgaccctgctcctggagaggaatttccatccatttgcggagctgcctgagccacaacagacagctttgagtgacatcttccaggcggtcctatttgatgatgaactactcatggtcctggaaccagtgaaggatatcctggggaggtcaagttccttaactcttagttgtacaaatggtgagagccacacaagctgccaaccctccagccacccagattctgtgtcctccctttcttaaggctgaggctttataaacctgattttgactaca

SEQ ID NO: 5457 - DNA, 610 bp, Homo sapiens
  source 1..610: mol_type = unassigned DNA; mol_type = unassigned DNA
tcgaggagaagtgtggtggcatcgtgggcatccagaccaagacggtgcaggtgtcagcgacggaggatgggaatgtcaccaaggactccaacgtggtgctggagatcccagctgccaccaccattgcctacggtgtcattgagttatacgtgaaactggacggccagttcgagttctgccttctccgagggaagcaaggtggcttcgagaacaagaagagaattgactctgtctacctggaccccctggtctttcgagagtttgcattcatagacatgccagatgctgcgcatgggatatcttcccaggatggaccattaagtgttttaaagcaagcgaccctgctcctggagaggaatttccatccatttgcggagctgcctgagccacaacagacagctttgagtgacatcttccaggcggtcctatttgatgatgaactactcatggtcctggaaccagtgcagaaggatatcctggggaggtcaagttccttaactcttagttgtacaaatggtgagagccacacaagctgccaaccctccagccacccagattctgtgtcctccctttcttaaggctgaggctttataaacctgattttgactac

SEQ ID NO: 5458 - DNA, 583 bp, Homo sapiens
  source 1..583: mol_type = unassigned DNA; mol_type = unassigned DNA
tttgttggaagtggctgggcttttggtcaagcaacataatgtgtgtagggatcgaattttatggggaagatggatgggtcttctgctccactgagttacgtctaagatgtgccatcaaggctgggctgaccctgtccagacttgttggcacaccttagactcaactttacctaacttgtccttttctcctgcactacagagttctgccttctccgagggaagcaaggtggcttcgagaacaagaagagaattgactctgtctacctggaccccctggtctttcgagagtttgcattcatagacatgccagatgctgcgcatgggatatcttcccaggatggaccattaagtgttttaaagcaagcgaccctgctcctggagaggaatttccatccatttgcggagctgcctgagccacaacagacagctttgagtgacatcttccaggcggtcctatttgatgatgaactactcatggtcctggaaccagtggtgagccctgagacatctcaaggcagtgttttcactggggttttctggaacaggggaggaggcaggatggaattgtgttaaaggttccccc

SEQ ID NO: 5459 - DNA, 734 bp, Homo sapiens
  source 1..734: mol_type = unassigned DNA; mol_type = unassigned DNA
gtgaaatacgagggcaagtttgcaaaccacgtgagtggaaccctggagactgcactggggaaggtcaagctgaacctggggggcagcagccgcgtagagagccagtcttcatttggaaccctgaggaagcaggaggtggatttgcagcagctcatcagagactctgccgagagaacaataaatctgagaaaccctgtgctccagcaggtgctggaaggaaggaatgaggtcctgtgcgttttgacacagaagatcacgacgatgcagaagtgtgtgatctctgagcacatgcaggtcgaggagaagtgtggtggcatcgtgggcatccagaccaagacggtgcaggtgtcagcgacggaggatgggaatgtcaccaaggactccaacgtggtgctggagatcccagctgccaccaccattgcctacggtgtcattgagttatacgtgaaactggacggccagttcgcccccctatgtctgccttggtggtcctgtccagtcttactgatggccagtggtgaatgtgtcactcccccgcagcttactgagagttctgccttctccgagggaagcaaggtggcttcgagaacaagaagagaattgactctgtctacctggaccccctggtctttcgagagtttgcattcatagacatgccagatgctgcgcatgggatatcttcccaggatggaccattaagtgttttaaagcaagcgaccctgctcctggagagg

SEQ ID NO: 5460 - DNA, 557 bp, Homo sapiens
  source 1..557: mol_type = unassigned DNA; mol_type = unassigned DNA
ttcaacatgaaacttagaagggacaaacattaaaccacattggagcagggaaccgattccgggatgactccaggtctttgtgttatatcgacctgccagaacaataaatctgagaaaccctgtgctccagcaggtgctggaaggaaggaatgaggtcctgtgcgttttgacacagaagatcacgacgatgcagaagtgtgtgatctctgagcacatgcaggtcgaggagaagtgtggtggcatcgtgggcatccagaccaagacggtgcaggtgtcagcgacggaggatgggaatgtcaccaaggactccaacgtggtgctggagatcccagctgccaccaccattgcctacggtgtcattgagttatacgtgaaactggacggccagttcgagttctgccttctccgagggaagcaaggtggcttcgagaacaagaagagaattgactctgtctacctggaccccctggtctttcgagagtttgcattcatagacatgccagatgctgcgcatgggatatcttcccaggatggaccattaagtgttttaaagcaag

SEQ ID NO: 5461 - DNA, 1501 bp, Homo sapiens
  source 1..1501: mol_type = unassigned DNA; mol_type = unassigned DNA
ataatctggagctttcaaaatgtttgccaaagcaaccaggaattttcttagagaagttgatgctgatggtgacctgattgcagtatcaaatctgaatgactctgataagttacagcttctaagtctggtgacaaaaaagaagagattctggtgctggcagagacccaagtaccagtttttatccctcacccttggcgatgtactcatagaagaccaatttccgagtccagtggtcgtggagtcggactttgtgaaatacgagggcaagtttgcaaaccacgtgagtggaaccctggagactgcactggggaaggtcaagctgaacctggggggcagcagccgcgtagagagccagtcttcatttggaaccctgaggaagcaggaggtggatttgcagcagctcatcagagactctgccgagagaacaataaatctgagaaaccctgtgctccagcaggtgctggaaggaaggaatgaggtcctgtgcgttttgacacagaagatcacgacgatgcagaagtgtgtgatctctgagcacatgcaggtcgaggagaagtgtggtggcatcgtgggcatccagaccaagacggtgcaggtgtcagcgacggaggatgggaatgtcaccaaggactccaacgtggtgctggagatcccagctgccaccaccattgcctacggtgtcattgagttatacgtgaaactggacggccagttcggtgagtgccacctcctatgggtgctgagggatccccagcagaggatccctcagcagagggacttgactgctttccagaggactcgactgctttggagactgtgggaagagagggaaagaggtctgaagagcgtagattgtcccaagacatggtccctggacacatgggctgcactgggggaggggtgtggtgagggatgcctggagcaatgccaccctctcctccaacattggtgtggggcaaagttccaccagcacagtagagggctgggctgtgtcctctgggcatcaacctgggctctgcatcagacacactgggcatcaaccccggtgccatgatgtcctatgaggtctcaggcaagttgctgaatcttgctgagtcttggcttccctgtctctggaaggtgaagggcatttcttcacagggctgtgtgaagatttaatgagatgaggcctatgaagcgcctggcacagtggtcatttattaattcctccacctttgctattaatagcattatcatcattattgttaccccacctcctctccacaagtatgaagccagacatgctgaacttgactttcctctgctgatcacgagtgtgttcaaagcgcagagacccagctgttgtcacggaagaaaatccaagctttggttcagcgtgtctgctcactttaggtgttcacagccccttccctcctcatgttcccaatgagaagaggttgtgttcactcatgaaagctgtgtgaccgctccttagggacatgagtgggtaaatgtaacataa

SEQ ID NO: 5462 - DNA, 571 bp, Homo sapiens
  source 1..571: mol_type = unassigned DNA; mol_type = unassigned DNA
cagatactactccaggcacgggcattaggggctcccacaggctggacaggccttggactttcctggttgaaccgtgaggccgcggtgtcagtccacactccactgtgggtggcgggttcggccccgcgaggaggcgccgctctcaaaccccacggtcccgcgcagcgaagaggcgaggcggccgcggaaggcaggcgcagcccactcttcccgagaggccccgacatctcccggtggtcgtggagtcggactttgtgaaatacgagggcaagtttgcaaaccacgtgagtggaaccctggagactgcactggggaaggtcaagctgaacctggggggcagcagccgcgtagagagccagtcttcatttggaaccctgaggaagcaggaggtggatttgcagcagctcatcagagactctgccgagagaacaataaatctgagaaaccctgtgctccagcaggtgctggaaggaaggaatgaggtcctgtgcgttttgacacagaagatcacgacgatgcagaagtgtgtgatctctgagcacatgcaggtcgaggagaagtgtggtggcat

SEQ ID NO: 5463 - DNA, 1641 bp, Homo sapiens
  source 1..1641: mol_type = unassigned DNA; mol_type = unassigned DNA
gataatctggagctttcaaaatgtttgccaaagcaaccaggaattttcttagagaagttgatgctgatggtgacctgattgcagtatcaaatctgaatgactctgataagttacagcttctaagtctggtgacaaaaaagaagagattctggtgctggcagagacccaagtaccagtttttatccctcacccttggcgatgtactcatagaagaccaatttccgagtccagtggtcgtggagtcggactttgtgaaatacgagggcaagtttgcaaaccacgtgagtggaaccctggagactgcactggggaaggtcaagctgaacctggggggcagcagccgcgtagagagccagtcttcatttggaaccctgaggaagcaggaggtggatttgcagcagctcatcagagactctgccgagaggtaaggagacttgtttggcattttggattttgacacatctcacatttaaaggtcattcagttggacctttgttaaaagggcgacagatttgatctctgccgatcaataaacatgtattgaatgcgcttgtgttgaaatttcatgaggagcacattctttagtctggaattgcttgactgttcttagcctgagtggggggagacttgggaagcactttcaaaggatgttacttcaggcaaatatgtacttccttcaatcacatgatttataaaatgcgaacggtaaaaatgctctgtcctgcatttttgaatattaactttagaagccaggaagtcatgacccccctctggctctataattttctgatgaaaaaaagaagaaagcaagtgagaggcgcgtaaaaaagttcaaaaataagagctcttttcagtctttgaagtcttgaagaaaaccccacatttattcattgtttggctttcggtaaatacatcttaccacactatagctcatcattattcttacctcatatttattcaacattcaaaaaataattgtattgagtgcgtcctatgtgccatgtactgttctacattctggggaggctgcagagagcaaaatgcccaaatgtctgccttgcattctagtgaggagagataccaaacgtacaactaaagtaaaatgtgcagtaggttgatgggaatcggcagcagtgagaggggctaggatgtgctaggaatgggggctacgaacttagaaagtgtggccagagaaggtgttatggagaagctggcattagggcaaagctctgcaggagggcagggaaggcacaggggcatctgggcaggacgctgtgggcagtggccagagtggcctgtgcccagtgagcaaggggagggcaggaaaggagagtcggaggggctgaaaggggtggggcgccaagtcccacaggaccttgaaggccactggaaaggctcacacttactgagagccagtggagggttttgggcagggaaggggcgtaatctgatgtattttttagaaggatcattctggctgctgagttaagagactggatgggcagcagcagggagttcagttgagaagttattgcagtaattcagcggggatgatatttcagtttgtacagtaacatgtgcattttcctgtgtaattttgttgccctttagtcttttaaagcaaaaattcaaatccaaata

SEQ ID NO: 5464 - DNA, 2265 bp, Homo sapiens
  source 1..2265: mol_type = unassigned DNA; mol_type = unassigned DNA
aggagcttagagtggagtttacaggaatgaatcactgattagcggcaggcctaagtgtgggcactgtcgcaccacacacccagatactactccaggcacgggcattaggggctcccacaggctggacaggccttggactttcctggttgaaccgtgaggccgcggtgtcagtccacactccactgtgggtggcgggttcggccccgcgaggaggcgccgctctcaaaccccacggtcccgcgcagcgaagaggcgaggcggccgcggaaggcaggcgcagcccactcttcccgagaggccccgacatctcccggtggtcgtggagtcggactttgtgaaatacgagggcaagtttgcaaaccacgtgagtggaaccctggagactgcactggggaaggtcaagctgaacctggggggcagcagccgcgtagagagccagtcttcatttggaaccctgaggaagcaggaggtggatttgcagcagctcatcagagactctgccgagagaacaataaatctgagaaaccctgtgctccagcaggtgctggaaggaaggaatgaggtcctgtgcgttttgacacagaagatcacgacgatgcagaagtgtgtgatctctgagcacatgcaggtcgaggagaagtgtggtggcatcgtgggcatccagaccaagacggtgcaggtgtcagcgacggaggatgggaatgtcaccaaggactccaacgtggtgctggagatcccagctgccaccaccattgcctacggtgtcattgagttatacgtgaaactggacggccagttcgagttctgccttctccgagggaagcaaggtggcttcgagaacaagaagagaattgactctgtctacctggaccccctggtctttcgagagtttgcattcatagacatgccagatgctgcgcatgggatatcttcccaggatggaccattaagtgttttaaagcaagcgaccctgctcctggagaggaatttccatccatttgcggagctgcctgagccacaacagacagctttgagtgacatcttccaggcggtcctatttgatgatgaactactcatggtcctggaaccagtgtgcgatgacctggtcagcggcctctcgcccacagtggcggtgctgggggagctgaagccccggcagcagcaggaccttgtggccttcctgcagctggtggggtgcagcttacagggtgggtgtccgggccccgaggatgcaggcagcaagcagctgtttatgacagcctacttcttggtcagtgccctcgcagaaatgccagatagcgcagcagctctgctgggcacttgctgcaaactccagatcattcccacactgtgccacttgcttcgtgctctgtctgatgatggagtatctgatcttgaagacccaaccttgactcccctgaaagatacagaaaggtttgggattgtgcagcgcttgtttgcctcagctgacattagtctggagagactgaagtcatctgtgaaagctgtcattctgaaggactctaaagtcttcccactgcttctttgtataaccctgaatggactctgtgctttaggcagagaacattcatgatgtcatatgtgaactagaagtacgtgttactggccaaggctatttttcagaactgttaaaggtcatatgcacgttaaaagttgaccaatgaaatgaatttacagaacagtttaagaagtggtgacattttgcatgatgaatgacctgacttttagccaccaggtactctttaaacagttttccttatcagaggccctcctgtgctggtgacccagcatctgagttaggttccagcatgtaaagagctgggagggcggagaattcttagcatacattcagacgttttttctgcacaataataagtccatctgtcacttgcattccactttttgttacatagaaagagtctgaccctttaatccaaaaggtctttttacattgtgaatgctgtgggaaggcaatttctctgcacacaagaggctacgttttggaagtgatgtatgttatttgatgactgaaaatgaactgtaaatgctcctagagtatattcctctgctgaacaaaattaaacttcaaaaaaatctaacagtaacacacccctgcttgggaccctagctatatgcattttatgtgaccttgccatgcttcagtgaacatactaattctatgtctagcacatgttgatttcctatgtattctgggtattctattaaaggaaactttgaactatg

SEQ ID NO: 5465 - DNA, 1299 bp, Homo sapiens
  source 1..1299: mol_type = unassigned DNA; mol_type = unassigned DNA
cggggctgggccggagcggcggcgcctggatgccggcccggggctgggccggagactggcgcccgccccgaagcgactttcggtccccgacccgctccgcctgacccctatgatgaagagggcgtccactggagttcttgctgtcgacatctttgacaagttcaacttcacgggagccagagtcccatggttcgacgccattcatgaagaattccccagggagctggagtcctccatctccttcccagccaacttcttcaaaccacctgaagaaaaagaaggccccctggtaaggccagccagccggaggaccaccccgcagaccacacgcccagggcctggcaccgagggggaggccccgatcagcaggtgaaagcgacaccctgatgacactggctagttcaccttcactctggtcatcgtttactgtaccccggggcagctcccgcctgagccctatgaccccaaccgccgcagcctctggctgcctcactggcccatcattaatacgtcgatggtgagcgcactggtgtacagcgagggggctccacttccgagacccctggagaggcccgtcctggtggagttcaccctgctggagatggagaagcgaaccaagcctgtctgtgtgttctggaaccattccctggcgtaaatgtgatgccgggagttctgcatcttcataccaagagcagtgatgaccttttagctggaatggccagaggggtaacggtgactaatggtgttaaagggaaggaaagctcctgcccatctgcagcaccttcggcatctgcccctgccatgaccactgtggagaacaaatccaagattagcacagggcaccaactggacagaggcctccggtcagcctcactctgactgcaaccccctctcactggacagcatcacctggacacagagcctcacctagtctgtgtcccatggacacaactttgctttggacagtgacaccaagaatactcacccctttacttagccagaccacaggcagccacctggacacaaacatctctccagagtcagcctccacacagactccacagcagaactcccagggaggcactggggcatggcttcagagcaccaggcagcgctccgcggtgcctagcacccgctcagccagggcagcctgcagcggagcttggagccagcagcttctcatctcttggcctcgggaaatgtagctggagtcatcatttagcagagcacggtgtccctgggttggccacccagcttagttttaaaataaaataatgtaatcttggcctaatggtggaa

SEQ ID NO: 5466 - DNA, 5492 bp, Homo sapiens
  source 1..5492: mol_type = unassigned DNA; mol_type = unassigned DNA
cgctgccgggccggggctgggccggagcggcggcgcctggatgccggcccggggctgggccggagactggcgcccgccccgaagcgactttcggtccccgacccgctccgcctgacccctatgatgaagagggcgtccactggagttcttgctgtcgacatctttgacaagttcaacttcacgggagccagagtcccatggttcgacgccattcatgaagaattccccagggagctggagtcctccatctccttcccagccaacttcttcaaaccacctgaagaaaaagtgcttaggtagaggttgagcatcctaatcctgaaatctgaaatgctccagaatctgaaccttcttgagcaccaacctgacacttaaaggaagtgctcattggaggatctgtgacaattactaaaaacttccccaaataaaaaggacatgaaaagaatctcacgctatcgcccaggctggagtacagtggcgcgatctccgctcactgcaagctccgcctcccgggttcacgccattctcctgcctcagcctcccgagagtagctgggactacaggcgcccgccaccacgcccagctaattttttgtatttttagtagagacggggtttcaccgtgttagccagaatggtttcgatctcctcacctcgcgatccatccgcctcagcctcccaaagtgctgggattacaggcgtgagccaccgtgcctggccctcatgtgtcttaaaaagaggggtgactctgatgtggggtcatgcttgaaactgagaggacgaggtccccgaccctccattgcagccagctctctctggaactaacagagtgagaactcgctcattaccaaggggaggacaccaagccattcatgggggacccacccccatgacccaaacaaccccgaccacgcccacctccaaccctgatcacatttcaacatgagatttggaggggccagacctcaaaactgcatcagatacattcatgtttaagcagtccatctccagaactcttttcatcctgcagatctgaaactctagcccacaaaacaccaactccactccccagccactggtgcccaccgttgtttctgtctctgaatttgactcctctagggacctcccataagtggaatcatacaatatttgtccttttgtgcttggcttatttcactgagcgtaatgttctctaggttcacctgtgttgtagcaaacgtcagactttccctccttttgaaggctgagtaatattctgttgtgtggatggagcacgcattgtttatccactcacctgttgacgcatgcctgggtcgtttccacctttcggcctgtgtgaatggtgctgctctgaacaggggtgaagacgtatctgggcgtctgctttcagttcttttgggtgtatacccagaagtgggcttgctgggtcacgtggtaaatcctgtggttgattttttgaggacgcaccatactgttttcggtgggacatctgttgggttttgagaagcacctgctggcactgagagctgtcttggggaacacaggtgctcctgccggagtcctcacgctctgctcacgttgcagaaggccccctggtaaggccagccagccggaggaccaccccgcagaccacacgcccagggcctggcaccgagggggaggccccgatcagcaggtgaaagcgacaccctgatgacactggctagttcaccttcactctggtcatcgtttactgtaccccggggcagctcccgcctgagccctatgaccccaaccgccgcagcctctggtaaggcctgggtatggggcacatggagagggcccattccagaggctcctaagtcaaaagagattccacaagtcaaaatcctgatcctgatcaagcacaggccttcacagtgacatttcactgtgaccctggcccagagacagagaccactgtcctgcagtgtccctgggagggaggttctgggtctgccacaggacaccacaccctggaacattgcacaccctttgcctggccttttcccagtgtttctgtcagaaatgccccctcccaagcatacaccccatcttgtgccccgagggactcgattctctccccacacacccgacccgaggctgtcatgggtagtgcctgctgctggccccagggttagggctgctcagccagtcctggctggaaaggatgaatgtcccacaagcagctttggggcctgcttggtgggagcagcccgaggatccgcccttcgtcctcctgccatttcccacttccctggctctggggtcctcatgttcacgtggttctcagtgactgggtgattgacccccatgagctgtcattattttggtgtcttttgctggacatttaagccattccttgtgtttctgccattagctattatgggctgtaacatctttgcacctgtgccttctttctttttaaatttctgaagtcctaatttgacccaaaggtgacacatctccctgtgtgccctgtcagtgatgaaacctgctctggggatgaagatgccgtggggcccacagatccaagctctcggagtgtgattctgtctcccctagaaacacatccatggcatgtcctcagggcatttgtgcatgggattaagcaaatgtttcctaatcatgtttgtccctgtgctctggcttcttgacctcaggctgcctcactggcccatcattaatacgtcgatggtgagcgcactggtgtacagcgagggggctccacttccgagacccctggagaggcccgtcctggtggagttcaccctgctggagatggagaagcgaaccaagcctgtctgtgtgttctggaaccattccctggcgtaaatgtgatgccgggagttctgcatcttcatgtgagggctttgccaagacacagagaacccgcagggttgttggctcagcggcagatcgtcccacggggacagtctcttgtggtctgtgtctcccccttcagccccctgtggggcagtgagcctcctgctctgcttctgtgggtgcatcagagcccccccagatgcccacacgcagacgcgcacaggcctgcacgtggaaacacagacatgcgcacacgcaggcccacacacagacgcacacagagctgcacgtggagacacgtgcgcacacgcaggcccacacgcaggcccacacacaggtgcacgcggacctgcacgtggagacacagatgtgtgcacatgcaggcccacacacaggtgagcgtggacctgtgtgaacagatgcgcgcagacctgcacgtggagacacagacatgcaggcgcacaaagagatccctcaaggctgacacccaggaaggggcctctcacttgtgggactcccgagatgcagtggccaacacgagtgtagtgcccagttcactgctggataagacagaggcctgttctggtcacacatgggaggcagaacccagagactgggcccaggagcccttctgctgacagtgggaactcccagctacgtgtgggggtccccataccagacaaaggtccctgaccttagtcttgcccgagaggccgacacagcccagctttggggtctggctttacccacaagaggccacaccttgccacagcactgtttatctggcctgtttcagaagcaccgtcagagtggcgaaggcaggaggtggtgcacgagagtctacgttctagcatccattcaagtgagggaaaggcgtttcgtacttagaaaaatgcaaaattaatgattctcacccacacatgagactgtggattcacccatgtatgagatagtggattcagagccatgctgtggctctcatctgctgggagccagtagtgtttgtgctttggttttgcttttttagctacatggtttatgtgaggtgcggacttacttgagttgctctgtctttacagggagcttgctttttctctgctggtttgttttcacttttgctgtctctgtttagaagaaaacattagaactggggtgtggtggaaggatgggagcacaatctgggaggggaagacctgctctctctccacataccaggagggagtggcaggaaggggagacactgtgccggactcagggagtcaagagcgtgagcacccccaggcttcaatctgctgaacgttgtgcatctgggggcgcccgtgcagcaggaacactctccccatcacaattcctctgggcacagtggagagccatgagtgggggctgtcctgggggctgcgctatggtgagtgagcccacgccaggagccagttcagcccagcctcattcttctcctgcttctttgctttccaagttctagttcataagcaaccagcacagtacctggaatgtaagaggcgcttggcttataaaagagagaagaaaggaacccctttcaccacgagggacgtcaggcccagctctctgtcccgggcattcatcttttttccggcaattagcttcagctctaatgacctgctgtctgctttatgttgcacctatgatttccagattgtaaagtttgtggcaaatgtattaacgttcacatcccatttacagattagcaaactaaggatctgagaggttatgtgattttcccagtctggcggagggcagggccctgtcagaagccgagacacacctcgtaacagcttgttatttggggcttcccatcagtgaggcaggagtcataatggggccctggcttctgggcaattcccataaaacattgtgccacctgaagatggaagtgtcagaggaaggcgagatgttatttctgaaagcatctaccctcagaaagagacagaggagtgcatcgcagctgtgtgaacccggggtggtggtggttccagcagcggggcacgtggtggacgcaagacggccccgtttgagttttgctgctaggtgacatgtagaacttgaacttcagagggtgctccttggaggccctgatgagagagacacagaagggaagggagactgttcccatggtcctgcctctgcggcagcgagcctgctgctcttgcagctgggtggctgttcggtgcagggggccggtgaggaacacggtggggagcagcctgcgagggcgccgggctttcagcactcactatacctgctgtttggtttggccaggatggcctgggagtccccagggccgggcaaagactgcccccaacagacatgggcggagggaaccgtctcacccctgcctcttctcccttctctacgcagtgtcagtgggacgggagggtggtctgcccggggcttcaagctcctgtccaggaaccggacccatgtcgtacgccagtgcagccacacggccagcttcgaggtgctcatggacgtctccaggtgtgagatgggcatcttcttgtggccactatgcccgctgagcctacccccaaacctgcccctcctcaaactaaatcttccattctaagcgctttgaacgaagcaaatcaaccaattaaaaaaatatattccagg

SEQ ID NO: 5467 - DNA, 568 bp, Homo sapiens
  source 1..568: mol_type = unassigned DNA; mol_type = unassigned DNA
gcgcccgccccgaagcgactttcggtccccgacccgctccgcctgacccctatgatgaagagggcgtccactggagaacatcatccactcgggcagtgccctcctggccccggccaccagggcagcgtgggagcagatccagcggagcgagggtggcacggcacagctgctccggcgcctcgagggctacttcagcaatgtggcacgcaacgtgcagtggacgtacctgcagccctttgtcatcgtcaccaccaacatgattcttgctgtcgacatctttgacaagttcaacttcacgggagccagagtcccatggttcgacgccattcatgaagaattccccagggagctggagtcctccatctccttcccagccaacttcttcaaaccacctgaagaaaaagaaggccccctggtaaggccagccagccggaggaccaccccgcagaccacacgcccagggcctggcaccgagggggaggccccgatcagcaggtgaaagcgacaccctgatgacactggctagttcaccttcactctggtcatcgtttactgtaccccggggcag

SEQ ID NO: 5468 - DNA, 862 bp, Homo sapiens
  source 1..862: mol_type = unassigned DNA; mol_type = unassigned DNA
aacatcatccactcgggcagtgccctcctggccccggccaccagggcagcgtgggagcagatccagcggagcgagggtggcacggcacagctgctccggcgcctcgagggctacttcagcaatgtggcacgcaacgtgcagtggacgtacctgcagccctttgtcatcgtcaccaccaacatgattcttgctgtcgacatctttgacaagttcaacttcacgggagccagagtcccatggttcgacgccattcatgaagaattccccagggagctggagtcctccatctccttcccagccaacttcttcaaaccacctgaagaaaaagaaggccccctggtaaggccagccagccggaggaccaccccgcagaccacacgcccagggcctggcaccgagggggaggccccgatcagcaggtgaaagcgacaccctgatgacactggctagttcaccttcactctggtcatcgtttactgtaccccggggcagctcccgcctgagccctatgaccccaaccgccgcagcctctggctgcctcactggcccatcattaatacgtcgatggtgagcgcactggtgtacagcgagggggctccacttccgagacccctggagaggcccgtcctggtggagttcaccctgctggagatggagaagcgaaccaagcctgtctgtgtgttctggaaccattccctggcgtaaatgtgatgccgggagttctgcatcttcattgtcagtgggacgggagggtggtctgcccggggcttcaagctcctgtccaggaaccggacccatgtcgtacgccagtgcagccacacggccagcttcgaggtgctcatggacgtctccaggtgtgaga

SEQ ID NO: 5469 - DNA, 556 bp, Homo sapiens
  source 1..556: mol_type = unassigned DNA; mol_type = unassigned DNA
attactgagcgcttgctgcctgtaaaacagtcctcagggagccaagagaagttccgaggcacagtccctctcatccccaggaactcctcgtacgtccaggacctgcgagggaaaagggcgcaaggcccacctgcacccaaaaagggggccttataaatgaagaaaggaagaatatccaggctctggcctgcacccagatctcagagcggcttggtgacgtggagcagacaaactccaggaacgcactggggcgcacaagtgtttctagggacggttggagaccctatctaaccctaagaaggcctaccctctgaagaggtccaagcaacggaagtactactacgaagctgcctttctggccatccttgagaaaaatagacagatggccaaggagaggggcctaataagccccagtgattttgcccagctgcaaaaatacatggaatactccaccaaaaaggtcagtgatgtcctaaagctcttcgaggatggcgagatggctaaatatgtccaaggagatgccattgggtacgagggattccagcaattcctgaaa

SEQ ID NO: 5470 - DNA, 592 bp, Homo sapiens
  source 1..592: mol_type = unassigned DNA; mol_type = unassigned DNA
ttttaccttcctgcttatatccccactttggcttagtttaatgtccagcagtacccctggaaccagggaggaggcaggaggcctaccctctgaagaggtccaagcaacggaagtactactacgaagctgcctttctggccatccttgagaaaaatagacagatggccaaggagaggggcctaataagccccagtgattttgcccagctgcaaaaatacatggaatactccaccaaaaaggtcagtgatgtcctaaagctcttcgaggatggcgagatggctaaatatgtccaaggagatgccattgggtacgagggattccagcaattcctgaaaatctatctcgaagtggataatgttcccagacacctaagcctggcactgtttcaatcctttgagactggtcactgcttaaatgagacaaatgtgacaaaagatgtggtgtgtctcaatgatgtttcctgctacttttcccttctggagggtggtcggccagaagacaagttagaattcaccttcaagctgtacgacacggacagaaatgggatcctggacagctcagtgagttggggaccctgtatgctgggcaaggg

SEQ ID NO: 5471 - DNA, 542 bp, Homo sapiens
  source 1..542: mol_type = unassigned DNA; mol_type = unassigned DNA
atgatctcggctcactgcaacctctgcctcccaggttcaagcgattctcctgcctcagcctcgcgagtaactgggactacaggcatgtgccaccacgcccggctaattttttgtatttttagtagagacaggttttcaccgtgttagccaggatggtctcaatctcctgatctcgtgatccgcctgcctcagcctgccaaagtgctgggattacagttcctgccagtgagtccctaggcctccatctctctcccttgctgtaccaccttcaccaccatccatgcgaccccaagagccttaatgactctagaagagactccaggcaggggaagctgaaaggacctttcactccctacttttggccagggccttctgtgccacctgccaagaccagcaggcctaccctctgaagaggtccaagcaacggaagtactactacgaagctgcctttctggccatccttgagaaaaatagacagatggccaaggagaggggcctaataagccccagtgattttgcccagctgcaaaaatacatggaat

SEQ ID NO: 5472 - DNA, 2909 bp, Homo sapiens
  source 1..2909: mol_type = unassigned DNA; mol_type = unassigned DNA
acacaatacccacacatgcatatacccttctagtcagaggtctcccctcccccttcttcccacccccaggtgtaagaaggacgattccaggaacctaaggctttgttactctgccccattttcaatgaagggtaggagggagttagacaggggttggggcggggccagtgagcaggatgcctgggtctccagttcctgccagtgagtccctaggcctccatctctctcccttgctgtaccaccttcaccaccatccatgcgaccccaagagccttaatgactctagaagagactccaggcaggggaagctgaaaggacctttcactccctacttttggccagggccttctgtgccacctgccaagaccagcaggcctaccctctgaagaggtccaagcaacggaagtactactacgaagctgcctttctggccatccttgagaaaaatagacagatggccaaggagaggggcctaataagccccagtgattttgcccagctgcaaaaatacatggaatactccaccaaaaaggtcagtgatgtcctaaagctcttcgaggatggcgagatggctaaatatgtccaaggagatgccattgggtacgagggattccagcaattcctgaaaatctatctcgaagtggataatgttcccagacacctaagcctggcactgtttcaatcctttgagactggtcactgcttaaatgagacaaatgtgacaaaagatgtggtgtgtctcaatgatgtttcctgctacttttcccttctggagggtggtcggccagaagacaagttagaattcaccttcaagctgtacgacacggacagaaatgggatcctggacagctcagaagtggacaaaattatcctacagatgatgcgagtggctgaatacctggattgggatgtgtctgagctgaggccgattcttcaggagatgatgaaagagattgactatgatggcagtggctctgtctctcaagctgagtgggtccgggctggggccaccaccgtgccactgctagtgctgctgggtctggagatgactctgaaggacgacggacagcacatgtggaggcccaagaggttccccagaccagtctactgcaatctgtgcgagtcaagcattggtcttggcaaacagggactgagctgtaacctctgtaagtacactgttcacgaccagtgtgccatgaaagccctgccttgtgaagtcagcacctatgccaagtctcggaaggacattggtgtccaatcacatgtgtgggtgcgaggaggctgtgagtccgggcgctgcgaccgctgtcagaaaaagatccggatctaccacagtctgaccgggctgcattgtgtatggtgccacctagagatccacgatgactgcctgcaagcggtgggccatgagtgtgactgtgggctgctccgggatcacatcctgcctccatcttccatctatcccagtgtcctggcctctggaccggatcgtaaaaatagcaaaacaagccagaagaccatggatgatttaaatttgagcacctctgaggctctgcggattgaccctgttcctaacacccacccacttctcgtctttgtcaatcctaagagtggcgggaagcaggggcaaagggtgctctggaagttccagtatatattaaaccctcgacaggtgttcaacctcctaaaggatggtcctgagatagggctccgattattcaaggatgttcctgatagccggattttggtgtgtggtggagacggcacagtaggctggattctagagaccattgacaaagctaacttgccagttttgcctcctgttgctgtgttgcccctgggtactggaaatgatctggctcgatgcctaagatggggaggaggttatgaaggacagaatctggcaaagatcctcaaggatttagagatgagtaaagtggtacatatggatcgatggtctgtggaggtgatacctcaacaaactgaagaaaaaagtgacccagtcccctttcaaatcatcaataactacttctctattggcgtggatgcctctattgctcatcgattccacatcatgcgagagaaatatccggagaagttcaacagcagaatgaagaacaagctatggtacttcgaatttgccacatctgaatccatcttctcaacatgcaaaaagctggaggagtctttgacagttgagatctgtgggaaaccgctggatctgagcaacctgtccctagaaggcatcgcagtgctaaacatccctagcatgcatggtggctccaacctctggggtgataccaggagaccccatggggatatctatgggatcaaccaggccttaggtgctacagctaaagtcatcaccgaccctgatatcctgaaaacctgtgtaccagacctaagtgacaagagactggaagtggttgggctggagggtgcaattgagatgggccaaatctataccaagctcaagaatgctggacgtcggctggccaagtgctctgagatcaccttccacaccacaaaaacccttcccatgcaaattgacggagaaccctggatgcagacgccctgtacaatcaagatcacccacaagaaccagatgcccatgctcatgggcccacccccccgctccaccaatttctttggcttcttgagctaagggggacacccttggcctccaagccagccttgaacccacctccctgtccctggactctactcccgaggctctgtacattgctgccacatactcctgccagcttgggggagtgttccttcaccctcacagtatttattatcctgcaccacctcactgttccccatgcgcacacacatacacacaccccaaaacacatacattgaaagtgcctcatctgaataaaatgacttgtgtttcccctttggga

SEQ ID NO: 5473 - DNA, 569 bp, Homo sapiens
  source 1..569: mol_type = unassigned DNA; mol_type = unassigned DNA
attttcaatgaagggtaggagggagttagacaggggttggggcggggccagtgagcaggatgcctgggtctccagttcctgccagtgagtccctaggcctccatctctctcccttgctgtaccaccttcaccaccatccatgcgaccccaagagccttaatgactctagaagagactccaggcaggggaagctgaaaggacctttcactccctacttttggccagggccttctgtgccacctgccaagaccagcagatataacttccccaagtcacacagtggtatcagagctaagaatgggacccagatatgactgatctagttctgttccaaaaccgtgctgtattatattaacgcctaccctctgaagaggtccaagcaacggaagtactactacgaagctgcctttctggccatccttgagaaaaatagacagatggccaaggagaggggcctaataagccccagtgattttgcccagctgcaaaaatacatggaatactccaccaaaaaggtcagtgatgtcctaaagctcttcgaggatggcgagatggctaaatatgtccaa

SEQ ID NO: 5474 - DNA, 548 bp, Homo sapiens
  source 1..548: mol_type = unassigned DNA; mol_type = unassigned DNA
agttcctgccagtgagtccctaggcctccatctctctcccttgctgtaccaccttcaccaccatccatgcgaccccaagagccttaatgactctagaagagactccaggcaggggaagctgaaaggacctttcactccctacttttggccagggccttctgtgccacctgccaagaccagcaggcctaccctctgaagaggtccaagcaacggaagtactactacgaagctgcctttctggccatccttgagaaaaatagacagatggccaaggagaggggcctaataagccccagtgattttgcccagctgcaaaaatacatggaatcttcctcagtggctttgagcagtgtgctgctcagatgtgcccatgactggaaatgggaggagtgggagatggggagatgtcagaaaaagatccggatctaccacagtctaactgggctgcattgtgcaaggtctcggctctctacccaccttcgctatacctggactgcttgctccagctctcagagaagaggagtaaagagtgactccaccaaaaaggt

SEQ ID NO: 5475 - DNA, 1900 bp, Homo sapiens
  source 1..1900: mol_type = unassigned DNA; mol_type = unassigned DNA
agttcctgccagtgagtccctaggcctccatctctctcccttgctgtaccaccttcaccaccatccatgcgaccccaagagccttaatgactctagaagagactccaggcaggggaagctgaaaggacctttcactccctacttttggccagggccttctgtgccacctgccaagaccagcaggcctaccctctgaagaggtccaagcaacggaagtactactacgaagctgcctttctggccatccttgagaaaaatagacagatggccaaggagaggggcctaataagccccagtgattttgcccagctgcaaaaatacatggaatactccaccaaaaagggtggtcggccagaagacaagttagaattcaccttcaagctgtacgacacggacagaaatgggatcctggacagctcagaagtggacaaaattatcctacagatgatgcgagtggctgaatacctggattgggatgtgtctgagctgaggccgattcttcaggagatgatgaaagagattgactatgatggcagtggctctgtctctcaagctgagtgggtccgggctggggccaccaccgtgccactgctagtgctgctgggtctggagatgactctgaaggacgacggacagcacatgtggaggcccaagaggttccccagaccagtctactgcaatctgtgcgagtcaagcattggtcttggcaaacagggactgagctgtaacctctgtaagtacactgttcacgaccagtgtgccatgaaagccctgccttgtgaagtcagcacctatgccaagtctcggaaggacattggtgtccaatcacatgtgtgggtgcgaggaggctgtgagtccgggcgctgcgaccgctgtcagaaaaagatccggatctaccacagtctgaccgggctgcattgtgtatggtgccacctagagatccacgatgactgcctgcaagcggtgggccatgagtgtgactgtgggctgctccgggatcacatcctgcctccatcttccatctatcccagtgtcctggcctctggaccggatcgtaaaaatagcaaaacaagccagaagaccatggatgatttaaatttgagcacctctgaggctctgcggattgaccctgttcctaacacccacccacttctcgtctttgtcaatcctaagagtggcgggaagcaggggcaaagggtgctctggaagttccagtatatattaaaccctcgacaggtgttcaacctcctaaaggatggtcctgagatagggctccgattattcaaggatgttcctgatagccggattttggtgtgtggtggagacggcacagtaggctggattctagagaccattgacaaagctaacttgccagttttgcctcctgttgctgtgttgcccctgggtactggaaatgatctggctcgatgcctaagatggggaggaggttatgaaggacagaatctggcaaagatcctcaaggatttagagatgagtaaagtggtacatatggatcgatggtctgtggaggtgatacctcaacaaactgaagaaaaaagtgacccagtcccctttcaaatcatcaataactacttctctattggcgtggatgcctctattgctcatcgattccacatcatgcgagagaaatatccggagaagttcaacagcagaatgaagaacaagctatggtacttcgaatttgccacatctgaatccatcttctcaacatgcaaaaagctggaggagtctttgacagttgagatctgtgggaaaccgctggatctgagcaacctgtccctagaaggcatcgcagtgctaaacatccctagcatgcatggtggctccaacctctggggtgataccaggagaccccatggggatatctatgggatcaacc

SEQ ID NO: 5476 - DNA, 613 bp, Homo sapiens
  source 1..613: mol_type = unassigned DNA; mol_type = unassigned DNA
agtgagtccctaggcctccatctctctcccttgctgtaccaccttcaccaccatccatgcgaccccaagagccttaatgactctagaagagactccaggcaggggaagctgaaaggacctttcactccctacttttggccagggccttctgtgccacctgccaagaccagcaggcctaccctctgaagaggtccaagcaacggaagtactactacgaagctgcctttctggccatccttgagaaaaatagacagatggccaaggagaggggcctaataagccccagtgattttgcccagctgcaaaaatacatggaatgtgagtcttcctgtcaggccttcagttctggagaccctgccccagagaatccctcctcctcctcattacaccccctgccccccagcttcctcagtggctttgagcagtgtgctgctcagatgtgcccatgactggaaatgggaggagtgggagatggggagatgtcagaaaaagatccggatctaccacagtctaactgggctgcattgtgcaaggtctcggctctctacccaccttcgctatacctggactgcttgctccagctctcagagaagaggagtaaagagtggtactg

SEQ ID NO: 5477 - DNA, 599 bp, Homo sapiens
  source 1..599: mol_type = unassigned DNA; mol_type = unassigned DNA
tctctctcccttgctgtaccaccttcaccaccatccatgcgaccccaagagccttaatgactctagaagagactccaggcaggggaagctgaaaggacctttcactccctacttttggccagggccttctgtgccacctgccaagaccagcaggcctaccctctgaagaggtccaagcaacggaagtactactacgaagctgcctttctggccatccttgagaaaaatagacagatggccaaggagaggggcctaataagccccagtgattttgcccagctgcaaaaatacatggaatactccaccaaaaaggtcagtgatgtcctaaagctcttcgaggatggcgagatggctaaatatgtccaaggagatgccattgggtacgagggattccagcaattcctgaaaatctatctcgaagtggataatgttcccagacacctaagcctggcactgtttcaatcctttgagactggtcactgcttaaatgagacaaatgtgacaaaagatgtggtgtgtctcaatgatgtttcctgctacttttcccttctggagggtggtcggccagaagacaagttagaatgtgagttgcccttctg

SEQ ID NO: 5478 - DNA, 1734 bp, Homo sapiens
  source 1..1734: mol_type = unassigned DNA; mol_type = unassigned DNA
ttcaccaccatccatgcgaccccaagagccttaatgactctagaagagactccaggcaggggaagctgaaaggacctttcactccctacttttggccagggccttctgtgccacctgccaagaccagcaggcctaccctctgaagaggtccaagcaacggaagtactactacgaagctgcctttctggccatccttgagaaaaatagacagatggccaaggagaggggcctaataagccccagtgattttgcccagctgcaaaaatacatggaatactccaccaaaaaggtcagtgatgtcctaaagctcttcgaggatggcgagatggctaaatatgtccaaggagatgccattgggtacgagggattccagcaattcctgaaaatctatctcgaagtggataatgttcccagacacctaagcctggcactgtttcaatcctttgagactggtcactgcttaaatgagacaaatgtgacaaaagatgtggtgtgtctcaatgatgtttcctgctacttttcccttctggagggtggtcggccagaagacaagttagaatggtcttaagaaacagaagaggatggggggagaggttgagtcctctaggactaaatttgaaagaagtggacaaaattatcctacagatgatgcgagtggctgaatacctggattgggatgtgtctgagctgaggccgattcttcaggagatgatgaaagagattgactatgatggcagtggctctgtctctcaagctgagtgggtccgggctggggccaccaccgtgccactgctagtgctgctgggtctggagatgactctgaaggacgacggacagcacatgtggaggcccaagaggttccccagaccagtctactgcaatctgtgcgagtcaagcattggtcttggcaaacagggactgagctgtaacctctgtaagtacactgttcacgaccagtgtgccatgaaagccctgccttgtgaagtcagcacctatgccaagtctcggaaggacattggtgtccaatcacatgtgtgggtgcgaggaggctgtgagtccgggcgctgcgaccgctgtcagaaaaagatccggatctaccacagtctgaccgggctgcattgtgtatggtgccacctagagatccacgatgactgcctgcaagcggtgggccatgagtgtgactgtgggctgctccgggatcacatcctgcctccatcttccatctatcccagtgtcctggcctctggaccggatcgtaaaaatagcaaaacaagccagaagaccatggatgatttaaatttgagcacctctgaggctctgcggattgaccctgttcctaacacccacccacttctcgtctttgtcaatcctaagagtggcgggaagcaggggcaaagggtgctctggaagttccagtatatattaaaccctcgacaggtgttcaacctcctaaaggatggtcctgagatagggctccgattattcaaggatgttcctgatagccggattttggtgtgtggtggagacggcacagtaggctggattctagagaccattgacaaagctaacttgccagttttgcctcctgttgctgtgttgcccctgggtactggaaatgatctggctcgatgcctaagatggggaggaggttatgaaggacagaatctggcaaagatcctcaaggatttagagatgagtaaagtggtacatatggatcgatggtctgtggaggtg

SEQ ID NO: 5479 - DNA, 1320 bp, Homo sapiens
  source 1..1320: mol_type = unassigned DNA; mol_type = unassigned DNA
cctacttttggccagggccttctgtgccacctgccaagaccagcaggcctaccctctgaagaggtccaagcaacggaagtactactacgaagctgcctttctggccatccttgagaaaaatagacagatggccaaggagaggggcctaataagccccagtgattttgcccagctgcaaaaatacatggaatactccaccaaaaaggtcagtgatgtcctaaagctcttcgaggatggcgagatggctaaatatgtccaaggagatgccattgggtacgagggattccagcaattcctgaaaatctatctcgaagtggataatgttcccagacacctaagcctggcactgtttcaatcctttgagactggtcactgcttaaatgagacaaatgtgacaaaagatgtggtgtgtctcaatgatgtttcctgctacttttcccttctggagggtggtcggccagaagacaagttagaattcaccttcaagctgtacgacacggacagaaatgggatcctggacagctcagaagtggacaaaattatcctacagatgatgcgagtggctgaatacctggattgggatgtgtctgagctgaggccgattcttcaggagatgatgaaagagattgactatgatggcagtggctctgtctctcaagctgagtgggtccgggctggggccaccaccgtgccactgctagtgctgctgggtctggagatgactctgaaggacgacggacagcacatgtggaggcccaagaggttccccagaccagtctactgcaatctgtgcgagtcaagcattggtcttggcaaacagggactgagctgtaacctctgtaagtacactgttcacgaccagtgtgccatgaaagccctgccttgtgaagtcagcacctatgccaagtctcggaaggacattggtgtccaatcacatgtgtgggtgcgaggaggctgtgagtccgggcgctgcgaccgctgtcagaaaaagatccggatctaccacagtctgaccgggctgcattgtgtatggtgccacctagagatccacgatgactgcctgcaagcggtgggccatgagtgtgactgtgggctgctccgggatcacatcctgcctccatcttccatctatcccagtgtcctggtgagaccctcggcagcagcggggaggggacaggagtgcctccccgatttcccacacgcacagagtggcatttagaatagagagctcatacttttaggattcaagtcagacccctctatttagggattcatgcacaatacagcttttcttccctctactttcttcccctcccaggc

SEQ ID NO: 5480 - DNA, 563 bp, Homo sapiens
  source 1..563: mol_type = unassigned DNA; mol_type = unassigned DNA
gactggggaaaataggtctaaaaggaaagaggaacgtgaagaaggcctaccctctgaagaggtccaagcaacggaagtactactacgaagctgcctttctggccatccttgagaaaaatagacagatggccaaggagaggggcctaataagccccagtgattttgcccagctgcaaaaatacatggaatactccaccaaaaaggtcagtgatgtcctaaagctcttcgaggatggcgagatggctaaatatgtccaaggagatgccattgggtacgagggattccagcaattcctgaaaatctatctcgaagtggataatgttcccagacacctaagcctggcactgtttcaatcctttgagactggtcactgcttaaatgagacaaatgtgacaaaagatgtggtgtgtctcaatgatgtttcctgctacttttcccttctggagggtggtcggccagaagacaagttagaatggtcttaagaaacagaagaggatggggggagaggttgagtcctctaggactaaatttgaaagaagtggacaaaattatcctacagatga

SEQ ID NO: 5481 - DNA, 567 bp, Homo sapiens
  source 1..567: mol_type = unassigned DNA; mol_type = unassigned DNA
gactggggaaaataggtctaaaaggaaagaggaacgtgaagaaggcctaccctctgaagaggtccaagcaacggaagtactactacgaagctgcctttctggccatccttgagaaaaatagacagatggccaaggagaggggcctaataagccccagtgattttgcccagctgcaaaaatacatggaatactccaccaaaaaggtcagtgatgtcctaaagctcttcgaggatggcgagatggctaaatatgtccaaggagatgccattgggtacgagggattccagcaattcctgaaaatctatctcgaagtggataatgttcccagacacctaagcctggcactgtttcaatcctttgagactggtcactgcttaaatgagacaaatgtgacaaaagatgtggtgtgtctcaatgatgtttcctgctacttttcccttctggagggtggtcggccagaagacaagttagaattcaccttcaagctgtacgacacggacagaaatgggatcctggacagctcagaagtggacaaaattatcctacagatgatgcgagtggctgaat

SEQ ID NO: 5482 - DNA, 825 bp, Homo sapiens
  source 1..825: mol_type = unassigned DNA; mol_type = unassigned DNA
aaaaggaaagaggaacgtgaagaaggcctaccctctgaagaggtccaagcaacggaagtactactacgaagctgcctttctggccatccttgagaaaaatagacagatggccaaggagaggggcctaataagccccagtgattttgcccagctgcaaaaatacatggaatactccaccaaaaaggtcagtgatgtcctaaagctcttcgaggatggcgagatggctaaatatgtccaaggagatgccattgggtacgagggattccagcaattcctgaaaatctatctcgaagtggataatgttcccagacacctaagcctggcactgtttcaatcctttgagactggtcactgcttaaatgagacaaatgtgacaaaagatgtggtgtgtctcaatgatgtttcctgctacttttcccttctggagggtggtcggccagaagacaagttagaattcaccttcaagctgtacgacacggacagaaatgggatcctggacagctcagtgagttggggaccctgtatgctgggcaagggaatatgtgttaatttgtctgcaccctcctgccccaactcttccagggtcttaagaaacagaagaggatggggggagaggttgagtcctctaggactaaatttgaaagtaagtcccaagctcttgacccctcaaagagaatgctggatacatgaattgggtctgccttacaaacatacaaacacatttatttacttggcagacatacctgagaatgagaggtgtgaatctggggtggaacccaggaacactgatttctggaaaagagtttggatggtggtagtaaaggg

SEQ ID NO: 5483 - DNA, 548 bp, Homo sapiens
  source 1..548: mol_type = unassigned DNA; mol_type = unassigned DNA
agaagcagagctgccgccggcgcgggaagaagatgaggagcgcagcaaatggagaaaatgtgtccaaagccccggacatattcgagggagggtggagcaggttatggtgaactggaaacctagaaacgggcctctccaacttcgaagttcccagagtcgggggcgccgggcgcgggcgcggcgggcaggctggggtggggggcgggcagctatgtcgtcaggaacggggcggccccgctgcggccgcgtctgcctggcccgtcccctccagcccagctcgggctccagctccagcgccggcgcttcagctgcgaccgcgagccctctcaagcaaggcctaccctctgaagaggtccaagcaacggaagtactactacgaagctgcctttctggccatccttgagaaaaatagacagatggccaaggagaggggcctaataagccccagtgattttgcccagctgcaaaaatacatggaatactccaccaaaaaggtcagtgatgtcctaaagctcttcgaggatggcgagatggctaaatatgtccaa

SEQ ID NO: 5484 - DNA, 541 bp, Homo sapiens
  source 1..541: mol_type = unassigned DNA; mol_type = unassigned DNA
cccctccagcccagctcgggctccagctccagcgccggcgcttcagctgcgaccgcgagccctctcaagcaaggcctaccctctgaagaggtccaagcaacggaagtactactacgaagctgcctttctggccatccttgagaaaaatagacagatggccaaggagaggggcctaataagccccagtgattttgcccagctgcaaaaatacatggaatactccaccaaaaaggtcagtgatgtcctaaagctcttcgaggatggcgagatggctaaatatgtccaaggagatgccattgggtacgagggattccagcaattcctgaaaatctatctcgaagtggataatgttcccagacacctaagcctggcactgtttcaatcctttgagactggtcactgcttaaatgagacaaatgtgacaaaagatgtggtgtgtctcaatgatgtttcctgctacttttcccttctggagggtggtcggccagaagacaagttagaatgtgagttgcccttctgaagtgaggtggcagggcagtga

SEQ ID NO: 5485 - DNA, 565 bp, Homo sapiens
  source 1..565: mol_type = unassigned DNA; mol_type = unassigned DNA
cccctccagcccagctcgggctccagctccagcgccggcgcttcagctgcgaccgcgagccctctcaagcaaggcctaccctctgaagaggtccaagcaacggaagtactactacgaagctgcctttctggccatccttgagaaaaatagacagatggccaaggagaggggcctaataagccccagtgattttgcccagctgcaaaaatacatggaatactccaccaaaaaggtcagtgatgtcctaaagctcttcgaggatggcgagatggctaaatatgtccaaggagatgccattgggtacgagggattccagcaattcctgaaaatctatctcgaagtggataatgttcccagacacctaagcctggcactgtttcaatcctttgagactggtcactgcttaaatgagacaaatgtgacaaaaggtatggtcaagcagatgtggtgtgtctcaatgatgtttcctgctacttttcccttctggagggtggtcggccagaagacaagttagaattcaccttcaagctgtacgacacggacagaaatgggatcctggacagct

SEQ ID NO: 5486 - DNA, 594 bp, Homo sapiens
  source 1..594: mol_type = unassigned DNA; mol_type = unassigned DNA
cccctccagcccagctcgggctccagctccagcgccggcgcttcagctgcgaccgcgagccctctcaagcaaggcctaccctctgaagaggtccaagcaacggaagtactactacgaagctgcctttctggccatccttgagaaaaatagacagatggccaaggagaggggcctaataagccccagtgattttgcccagctgcaaaaatacatggaatactccaccaaaaaggtcagtgatgtcctaaagctcttcgaggatggcgagatggctaaatatgtccaaggagatgccattgggtacgagggattccagcaattcctgaaaatctatctcgaagtggataatgttcccagacacctaagcctggcactgtttcaatcctttgagactggtcactgcttaaatgagacaaatgtgacaaaagatgtggtgtgtctcaatgatgtttcctgctacttttcccttctggagggtggtcggccagaagacaagttagaatggtcttaagaaacagaagaggatggggggagaggttgagtcctctaggactaaatttgaaagtaagtcccaagctcttgacccctcaaaga

SEQ ID NO: 5487 - DNA, 1444 bp, Homo sapiens
  source 1..1444: mol_type = unassigned DNA; mol_type = unassigned DNA
ccctccagcccagctcgggctccagctccagcgccggcgcttcagctgcgaccgcgagccctctcaagcaaggcctaccctctgaagaggtccaagcaacggaagtactactacgaagctgcctttctggccatccttgagaaaaatagacagatggccaaggagaggggcctaataagccccagtgattttgcccagctgcaaaaatacatggaatactccaccaaaaaggtcagtgatgtcctaaagctcttcgaggatggcgagatggctaaatatgtccaaggagatgccattgggtacgagggattccagcaattcctgaaaatctatctcgaagtggataatgttcccagacacctaagcctggcactgtttcaatcctttgagactggtcactgcttaaatgagacaaatgtgacaaaagatgtggtgtgtctcaatgatgtttcctgctacttttcccttctggagggtggtcggccagaagacaagttagaattcaccttcaagctgtacgacacggacagaaatgggatcctggacagctcagaagtggacaaaattatcctacagatgatgcgagtggctgaatacctggattgggatgtgtctgagctgaggccgattcttcaggagatgatgaaagagattgactatgatggcagtggctctgtctctcaagctgagtgggtccgggctggggccaccaccgtgccactgctagtgctgctgggtctggagatgactctgaaggacgacggacagcacatgtggaggcccaagaggttccccagaccagtctactgcaatctgtgcgagtcaagcattggtcttggcaaacagggactgagctgtaaccgtgagtaatgggagctgggaggtaggggaagagggtcagcccagctatctgtgggagcttgatgctgtaaacttagaaaagacctaggtttgaatcctgggctctgccactgactagttatgtgaccttgggaaagccacatcacttctttaagccttagtttcctcaactgaaaatgaggtaattgtgagcattaaaaaagttggtgcaagaaaagtgcttcagatggtgcatgcacatactataaaatgcaataaaaaatatctattatgattactgttgctgttagacctgggcctcccaagcattatccagctcagttcctgcctggcacatggatggtgtggggcaggcatgcagtagcagctgatcttttaggaggaagagtaaggaaaaggcgtgggttttggaggtgggcacttcaccccgaacttttattctgctacaccctcaagcaagggatcacatatctgatcctgcctcaccctcaggtaagaaggaaatagggggagaggctcagctaagcctcccaacttcttccttctccctcagtctgtaagtacactgttcacgaccagtgtg

SEQ ID NO: 5488 - DNA, 2671 bp, Homo sapiens
  source 1..2671: mol_type = unassigned DNA; mol_type = unassigned DNA
agcccagctcgggctccagctccagcgccggcgcttcagctgcgaccgcgagccctctcaagcaaggtagagaccccgcgagccccccagcgccccaccctcccccatcggaaaaggacaggggcctaccctctgaagaggtccaagcaacggaagtactactacgaagctgcctttctggccatccttgagaaaaatagacagatggccaaggagaggggcctaataagccccagtgattttgcccagctgcaaaaatacatggaatactccaccaaaaaggtcagtgatgtcctaaagctcttcgaggatggcgagatggctaaatatgtccaaggagatgccattgggtacgagggattccagcaattcctgaaaatctatctcgaagtggataatgttcccagacacctaagcctggcactgtttcaatcctttgagactggtcactgcttaaatgagacaaatgtgacaaaagatgtggtgtgtctcaatgatgtttcctgctacttttcccttctggagggtggtcggccagaagacaagttagaattcaccttcaagctgtacgacacggacagaaatgggatcctggacagctcagaagtggacaaaattatcctacagatgatgcgagtggctgaatacctggattgggatgtgtctgagctgaggccgattcttcaggagatgatgaaagagattgactatgatggcagtggctctgtctctcaagctgagtgggtccgggctggggccaccaccgtgccactgctagtgctgctgggtctggagatgactctgaaggacgacggacagcacatgtggaggcccaagaggttccccagaccagtctactgcaatctgtgcgagtcaagcattggtcttggcaaacagggactgagctgtaacctctgtaagtacactgttcacgaccagtgtgccatgaaagccctgccttgtgaagtcagcacctatgccaagtctcggaaggacattggtgtccaatcacatgtgtgggtgcgaggaggctgtgagtccgggcgctgcgaccgctgtcagaaaaagatccggatctaccacagtctgaccgggctgcattgtgtatggtgccacctagagatccacgatgactgcctgcaagcggtgggccatgagtgtgactgtgggctgctccgggatcacatcctgcctccatcttccatctatcccagtgtcctggcctctggaccggatcgtaaaaatagcaaaacaagccagaagaccatggatgatttaaatttgagcacctctgaggctctgcggattgaccctgttcctaacacccacccacttctcgtctttgtcaatcctaagagtggcgggaagcaggggcaaagggtgctctggaagttccagtatatattaaaccctcgacaggtgttcaacctcctaaaggatggtcctgagatagggctccgattattcaaggatgttcctgatagccggattttggtgtgtggtggagacggcacagtaggctggattctagagaccattgacaaagctaacttgccagttttgcctcctgttgctgtgttgcccctgggtactggaaatgatctggctcgatgcctaagatggggaggaggttatgaaggacagaatctggcaaagatcctcaaggatttagagatgagtaaagtggtacatatggatcgatggtctgtggaggtgatacctcaacaaactgaagaaaaaagtgacccagtcccctttcaaatcatcaataactacttctctattggcgtggatgcctctattgctcatcgattccacatcatgcgagagaaatatccggagaagttcaacagcagaatgaagaacaagctatggtacttcgaatttgccacatctgaatccatcttctcaacatgcaaaaagctggaggagtctttgacagttgagatctgtgggaaaccgctggatctgagcaacctgtccctagaaggcatcgcagtgctaaacatccctagcatgcatggtggctccaacctctggggtgataccaggagaccccatggggatatctatgggatcaaccaggccttaggtgctacagctaaagtcatcaccgaccctgatatcctgaaaacctgtgtaccagacctaagtgacaagagactggaagtggttgggctggagggtgcaattgagatgggccaaatctataccaagctcaagaatgctggacgtcggctggccaagtgctctgagatcaccttccacaccacaaaaacccttcccatgcaaattgacggagaaccctggatgcagacgccctgtacaatcaagatcacccacaagaaccagatgcccatgctcatgggcccacccccccgctccaccaatttctttggcttcttgagctaagggggacacccttggcctccaagccagccttgaacccacctccctgtccctggactctactcccgaggctctgtacattgctgccacatactcctgccagcttgggggagtgttccttcaccctcacagtatttattatcctgcaccacctcactgttccccatgcgcacacacatacacacaccccaaaacacatacattgaaagtgcctcatctgaataaaatgacttgtgtttcccctttgggatctgctaagtaa

SEQ ID NO: 5489 - DNA, 2582 bp, Homo sapiens
  source 1..2582: mol_type = unassigned DNA; mol_type = unassigned DNA
agcccagctcgggctccagctccagcgccggcgcttcagctgcgaccgcgagccctctcaagcaaggtagagaccccgcgagccccccagcgccccaccctcccccatcggaaaaggacaggggcctaccctctgaagaggtccaagcaacggaagtactactacgaagctgcctttctggccatccttgagaaaaatagacagatggccaaggagaggggcctaataagccccagtgattttgcccagctgcaaaaatacatggaatactccaccaaaaaggtcagtgatgtcctaaagctcttcgaggatggcgagatggctaaatatgtccaaggagatgccattgggtacgagggattccagcaattcctgaaaatctatctcgaagtggataatgttcccagacacctaagcctggcactgtttcaatcctttgagactggtcactgcttaaatgagacaaatgtgacaaaagatgtggtgtgtctcaatgatgtttcctgctacttttcccttctggagggtggtcggccagaagacaagttagaattcaccttcaagctgtacgacacggacagaaatgggatcctggacagctcagaagtggacaaaattatcctacagatgatgcgagtggctgaatacctggattgggatgtgtctgagctgaggccgattcttcaggagatgatgaaagagattgactatgatggcagtggctctgtctctcaagctgagtgggtccgggctggggccaccaccgtgccactgctagtgctgctgggtctggagatgactctgaaggacgacggacagcacatgtggaggcccaagaggttccccagaccagtctactgcaatctgtgcgagtcaagcattggtcttggcaaacagggactgagctgtaaccgtccaatcacatgtgtgggtgcgaggaggctgtgagtccgggcgctgcgaccgctgtcagaaaaagatccggatctaccacagtctgaccgggctgcattgtgtatggtgccacctagagatccacgatgactgcctgcaagcggtgggccatgagtgtgactgtgggctgctccgggatcacatcctgcctccatcttccatctatcccagtgtcctggcctctggaccggatcgtaaaaatagcaaaacaagccagaagaccatggatgatttaaatttgagcacctctgaggctctgcggattgaccctgttcctaacacccacccacttctcgtctttgtcaatcctaagagtggcgggaagcaggggcaaagggtgctctggaagttccagtatatattaaaccctcgacaggtgttcaacctcctaaaggatggtcctgagatagggctccgattattcaaggatgttcctgatagccggattttggtgtgtggtggagacggcacagtaggctggattctagagaccattgacaaagctaacttgccagttttgcctcctgttgctgtgttgcccctgggtactggaaatgatctggctcgatgcctaagatggggaggaggttatgaaggacagaatctggcaaagatcctcaaggatttagagatgagtaaagtggtacatatggatcgatggtctgtggaggtgatacctcaacaaactgaagaaaaaagtgacccagtcccctttcaaatcatcaataactacttctctattggcgtggatgcctctattgctcatcgattccacatcatgcgagagaaatatccggagaagttcaacagcagaatgaagaacaagctatggtacttcgaatttgccacatctgaatccatcttctcaacatgcaaaaagctggaggagtctttgacagttgagatctgtgggaaaccgctggatctgagcaacctgtccctagaaggcatcgcagtgctaaacatccctagcatgcatggtggctccaacctctggggtgataccaggagaccccatggggatatctatgggatcaaccaggccttaggtgctacagctaaagtcatcaccgaccctgatatcctgaaaacctgtgtaccagacctaagtgacaagagactggaagtggttgggctggagggtgcaattgagatgggccaaatctataccaagctcaagaatgctggacgtcggctggccaagtgctctgagatcaccttccacaccacaaaaacccttcccatgcaaattgacggagaaccctggatgcagacgccctgtacaatcaagatcacccacaagaaccagatgcccatgctcatgggcccacccccccgctccaccaatttctttggcttcttgagctaagggggacacccttggcctccaagccagccttgaacccacctccctgtccctggactctactcccgaggctctgtacattgctgccacatactcctgccagcttgggggagtgttccttcaccctcacagtatttattatcctgcaccacctcactgttccccatgcgcacacacatacacacaccccaaaacacatacattgaaagtgcctcatctgaataaaatgacttgtgtttcccctttgggatctgctaagtaa

SEQ ID NO: 5490 - DNA, 564 bp, Homo sapiens
  source 1..564: mol_type = unassigned DNA; mol_type = unassigned DNA
agctcgggctccagctccagcgccggcgcttcagctgcgaccgcgagccctctcaagcaagatataacttccccaagtcacacagtggtatcagagctaagaatgggacccagatatgactgatctagttctgttccaaaaccgtgctgtattatattaacgcctaccctctgaagaggtccaagcaacggaagtactactacgaagctgcctttctggccatccttgagaaaaatagacagatggccaaggagaggggcctaataagccccagtgattttgcccagctgcaaaaatacatggaatactccaccaaaaaggtcagtgatgtcctaaagctcttcgaggatggcgagatggctaaatatgtccaaggagatgccattgggtacgagggattccagcaattcctgaaaatctatctcgaagtggataatgttcccagacacctaagcctggcactgtttcaatcctttgagactggtcactgcttaaatgagacaaatgtgacaaaagatgtggtgtgtctcaatgatgtttcctgctacttttcccttctggagg

SEQ ID NO: 5491 - DNA, 505 bp, Homo sapiens
  source 1..505: mol_type = unassigned DNA
gctcgggctccagctccagcgccggcgcttcagctgcgaccgcgagccctctcaagcaaggtagagaccccgcgagccccccagcgccccaccctcccccatcggaaaaggacaggggtagggaagccgaggacccacgggctgcgttcgtgctgctgggtcgggaaggaggaagcgtgacagctggagcggatataacttccccaagtcacacagtggtatcagagctaagaatgggacccagatatgactgatctagttctgttccaaaaccgtgctgtattatattaacgcctaccctctgaagaggtccaagcaacggaagtactactacgaagctgcctttctggccatccttgagaaaaatagacagatggccaaggagaggggcctaataagccccagtgattttgcccagctgcaaaaatacatggaatactccaccaaaaaggtcagtgatgtcctaaagctcttcgaggatggcgagatggctaaatatgtccaa

SEQ ID NO: 5492 - DNA, 591 bp, Homo sapiens
  source 1..591: mol_type = unassigned DNA; mol_type = unassigned DNA
agctgcgaccgcgagccctctcaagcaaggtagagaccccgcgagccccccagcgccccaccctcccccatcggaaaaggacaggggtagggaagccgaggacccacgggctgcgttcgtgctgctgggtcgggaaggaggaagcgtgacagctggagcgggcctaccctctgaagaggtccaagcaacggaagtactactacgaagctgcctttctggccatccttgagaaaaatagacagatggccaaggagaggggcctaataagccccagtgattttgcccagctgcaaaaatacatggaatactccaccaaaaaggtcagtgatgtcctaaagctcttcgaggatggcgagatggctaaatatgtccaaggagatgccattgggtacgagggattccagcaattcctgaaaatctatctcgaagtggataatgttcccagacacctaagcctggcactgtttcaatcctttgagactggtcactgcttaaatgagacaaatgtgacaaaagatgtggtgtgtctcaatgatgtttcctgctacttttcccttctggagggtggtcggccagaagacaagttagaat

SEQ ID NO: 5493 - DNA, 497 bp, Homo sapiens
  source 1..497: mol_type = unassigned DNA; mol_type = unassigned DNA
agccctctcaagcaaggcctaccctctgaagaggtccaagcaacggaagtactactacgaagctgcctttctggccatccttgagaaaaatagacagatggccaaggagaggggcctaataagccccagtgattttgcccagctgcaaaaatacatggaatactccaccaaaaaggtcagtgatgtcctaaagctcttcgaggatggcgagatggctaaatatgtccaaggagatgccattgggtacgagggattccagcaattcctgaaaatctatctcgaagtggataatgttcccagacacctaagcctggcactgtttcaatcctttgagactggtcactgcttaaatgagacaaatgtgacaaaagatgtggtgtgtctcaatgatgtttcctgctacttttcccttctggagggtggtcggccagaagacaagttagaattcaccttcaagctgtacgacacggacagaaatgggatcctggacagctcag

SEQ ID NO: 5494 - DNA, 574 bp, Homo sapiens
  source 1..574: mol_type = unassigned DNA; mol_type = unassigned DNA
gcgagccccccagcgccccaccctcccccatcggaaaaggacaggggtagggaagccgaggacccacgggctgcgttcgtgctgctgggtcgggaaggaggaagcgtgacagctggagcgggagaaatgagccttcctgaggaagaatggcaaatattactgggcatctcttcagcctcagcacagacaagcccacatcccccaaccatgccagtatcgtaacttcctcctatactacgcaatgacaccctctacacacacacacacacgcacacacacacacacacacacacacacacacaaccccctcagccaggtgtagcactgcagtcttcagtgtttgtggaggcttaataagttttgaggcttcaagcaaatgattccctcttgagggctacctactagcagcaacggtcagggagaggaggaggatacagtctatgatgtgattaaggaattcagaagtccaggtcttcaagtccccaggatcccacagtttgctgcccttcagctccagggatagctaaactttcagtcagagaagtcaagaaaaccactgaaaagatcccaggag

SEQ ID NO: 5495 - DNA, 540 bp, Homo sapiens
  source 1..540: mol_type = unassigned DNA; mol_type = unassigned DNA
catcggaaaaggacaggggtagggaagccgaggacccacgggctgcgttcgtgctgctgggtcgggaaggaggaagcgtgacagctggagcgggagaaatgagccttcctgaggaagaatggcaaatattactgggcatctcttcagcctcagcacagacaagcccacatcccccaaccatgccagtatcgtaacttcctcctatactacgcaatgacaccctctacacacacacacacacgcacacacacacacacacacacacacacacacaaccccctcagccaggtgtagcactgcagtcttcagtgtttgtggaggcttaataagttttgaggcttcaagcaaatgattccctcttgagggctacctactagcagcaacggtcagggagaggaggaggatacagtctatgatgtgattaaggaattcagaagtccagatataacttccccaagtcacacagtggtatcagagctaagaatgggacccagatatgactgatctagttctgttccaaaaccgtgctgtattatatta

SEQ ID NO: 5496 - DNA, 4076 bp, Homo sapiens
  source 1..4076: mol_type = unassigned DNA; mol_type = unassigned DNA
agagctaagaatgggacccagatatgactgatctagttctgttccaaaaccgtgctgtattatattaacgtaagatatgttattatcattactgaatcaaggaaagtcgcccactgcaccttggtccctggatccagtagccaaaacctggggctccctaagcactgctgacctagcggagtggaaggaagttcccaggagccgagacactagcactcggctccatcgtcccaggactgggaaacactagatctgttggcagcagaagttggattatagtcattgaaaagtgccagatgggtagagtcctttctctaggatgtcagtatcccagaaccctcttctgaggaagagactctgtgggtacccagagtctcttcccctgcctcttccctaccccgcgcctagttccccacccttccctagtggagctccgcggaacgcagtccaggcggggccggggctagggaccttgccagagctggttctgtgtcgcgcgtcagaagcgctagaggtcgttgcgtggcgtgggtggctcggggagtgggtggctgagcggagctggggtccctggccagaggcggaacaaaatggggtcatggccaggaagacgcgctaacgcagtaagagtcactcagagggccggaactgccggaactgccgaagacccgagatgggagagagctcaggatggggagagtctgcagagattgacgatggtggaagaaagcgcagaaacagacaagggacacacccacagaaacatatatagactgagaaagccgggtgcgggtgggaaggtgagggtggtcagatgaatcaagataggttgggggagagggagaaggatccagaaatggagagacagagatgagtcagagaaacagagacagaggacagacactgtcagggaaggtagaggcatagggaagagggacacagggaaaggaagatgtttagggagggactaggagagaaggaaagaacaaaaaataatagtgggagtagagacagaatggaacagacagaagaaaagacacccagacagctggctcttcccactgtacgctctgtcacctttccccaggcctaccctctgaagaggtccaagcaacggaagtactactacgaagctgcctttctggccatccttgagaaaaatagacagatggccaaggagaggggcctaataagccccagtgattttgcccagctgcaaaaatacatggaatgtgagtcttcctgtcaggccttcagttctggagaccctgccccagagaatccctcctcctcctcattacaccccctgccccccagcttcctcagtggctttgagcagtgtgctgctcagatgtgcccatgactggaaatgggaggagtgggagatggggagatgtcagaaaaagatccggatctaccacagtctaactgggctgcattgtgcaaggtctcggctctctacccaccttcgctatacctggactgcttgctccagctctcagagaagaggagtaaagagtggtactgttttggaggatctgaaatatttttccctctgtatttctgtgtttcttcttggaatttcttcatctcatttgaatcttttttcctgctggatttctctggcaagagaactcagctggactaataatgctgttctcttactctctctacaccctagactccaccaaaaaggtcagtgatgtcctaaagctcttcgaggatggcgagatggctaaatatgtccaaggagatgccattgggtacgagggattccagcaattcctgaaaatctatctcgaagtggataatgttcccagacacctaagcctggcactgtttcaatcctttgagactggtcactgcttaaatgagacaaatgtgacaaaagatgtggtgtgtctcaatgatgtttcctgctacttttcccttctggagggtggtcggccagaagacaagttagaattcaccttcaagctgtacgacacggacagaaatgggatcctggacagctcagaagtggacaaaattatcctacagatgatgcgagtggctgaatacctggattgggatgtgtctgagctgaggccgattcttcaggagatgatgaaagagattgactatgatggcagtggctctgtctctcaagctgagtgggtccgggctggggccaccaccgtgccactgctagtgctgctgggtctggagatgactctgaaggacgacggacagcacatgtggaggcccaagaggttccccagaccagtctactgcaatctgtgcgagtcaagcattggtcttggcaaacagggactgagctgtaacctctgtaagtacactgttcacgaccagtgtgccatgaaagccctgccttgtgaagtcagcacctatgccaagtctcggaaggacattggtccaatcacatgtgtgggtgcgaggaggctgtgagtccgggcgctgcgaccgctgtcagaaaaagatccggatctaccacagtctgaccgggctgcattgtgtatggtgccacctagagatccacgatgactgcctgcaagcggtgggccatgagtgtgactgtgggctgctccgggatcacatcctgcctccatcttccatctatcccagtgtcctggcctctggaccggatcgtaaaaatagcaaaacaagccagaagaccatggatgatttaaatttgagcacctctgaggctctgcggattgaccctgttcctaacacccacccacttctcgtctttgtcaatcctaagagtggcgggaagcaggggcaaagggtgctctggaagttccagtatatattaaaccctcgacaggtgttcaacctcctaaaggatggtcctgagatagggctccgattattcaaggatgttcctgatagccggattttggtgtgtggtggagacggcacagtaggctggattctagagaccattgacaaagctaacttgccagttttgcctcctgttgctgtgttgcccctgggtactggaaatgatctggctcgatgcctaagatggggaggaggttatgaaggacagaatctggcaaagatcctcaaggatttagagatgagtaaagtggtacatatggatcgatggtctgtggaggtgatacctcaacaaactgaagaaaaaagtgacccagtcccctttcaaatcatcaataactacttctctattggcgtggatgcctctattgctcatcgattccacatcatgcgagagaaatatccggagaagttcaacagcagaatgaagaacaagctatggtacttcgaatttgccacatctgaatccatcttctcaacatgcaaaaagctggaggagtctttgacagttgagatctgtgggaaaccgctggatctgagcaacctgtccctagaaggcatcgcagtgctaaacatccctagcatgcatggtggctccaacctctggggtgataccaggagaccccatggggatatctatgggatcaaccaggccttaggtgctacagctaaagtcatcaccgaccctgatatcctgaaaacctgtgtaccagacctaagtgacaagagactggaagtggttgggctggagggtgcaattgagatgggccaaatctataccaagctcaagaatgctggacgtcggctggccaagtgctctgagatcaccttccacaccacaaaaacccttcccatgcaaattgacggagaaccctggatgcagacgccctgtacaatcaagatcacccacaagaaccagatgcccatgctcatgggcccacccccccgctccaccaatttctttggcttcttgagctaagggggacacccttggcctccaagccagccttgaacccacctccctgtccctggactctactcccgaggctctgtacattgctgccacatactcctgccagcttgggggagtgttccttcaccctcacagtatttattatcctgcaccacctcactgttccccatgcgcacacacatacacacaccccaaaacacatacattgaaagtgcctcatctgaataaaatgacttgtgtttcccctttgggatctgct

SEQ ID NO: 5497 - DNA, 605 bp, Homo sapiens
  source 1..605: mol_type = unassigned DNA; mol_type = unassigned DNA
gtcagaagcgctagaggtcgttgcgtggcgtgggtggctcggggagtgggtggctgagcggagctggggtccctggccagaggcggaacaaaatggggtcatggccaggaagacgcgctaacgcagcctaccctctgaagaggtccaagcaacggaagtactactacgaagctgcctttctggccatccttgagaaaaatagacagatggccaaggagaggggcctaataagccccagtgattttgcccagctgcaaaaatacatggaatactccaccaaaaaggtcagtgatgtcctaaagctcttcgaggatggcgagatggctaaatatgtccaaggagatgccattgggtacgagggattccagcaattcctgaaaatctatctcgaagtggataatgttcccagacacctaagcctggcactgtttcaatcctttgagactggtcactgcttaaatgagacaaatgtgacaaaagatgtggtgtgtctcaatgatgtttcctgctacttttcccttctggagggtggtcggccagaagacaagttagaattcaccttcaagctgtacgacacggacagaaatgggatcctggacagctca

SEQ ID NO: 5498 - DNA, 5436 bp, Homo sapiens
  source 1..5436: mol_type = unassigned DNA; mol_type = unassigned DNA
cagatgaatcaagataggttgggggagagggagaaggatccagaaatggagagacagagatgagtcagagaaacagagacagaggacagacactgtcagggaaggtagaggcatagggaagagggacacagggaaaggaagatgtttagggagggactaggagagaaggaaagaacaaaaaataatagtgggagtagagacagaatggaacagacagaagaaaagacacccagacagctggctcttcccactgtacgctctgtcacctttccccaggcctaccctctgaagaggtccaagcaacggaagtactactacgaagctgcctttctggccatccttgagaaaaatagacagatggccaaggagaggggcctaataagccccagtgattttgcccagctgcaaaaatacatggaatgtgagtcttcctgtcaggccttcagttctggagaccctgccccagagaatccctcctcctcctcattacaccccctgccccccagcttcctcagtggctttgagcagtgtgctgctcagatgtgcccatgactggaaatgggaggagtgggagatggggagatgtcagaaaaagatccggatctaccacagtctaactgggctgcattgtgcaaggtctcggctctctacccaccttcgctatacctggactgcttgctccagctctcagagaagaggagtaaagagtggtactgttttggaggatctgaaatatttttccctctgtatttctgtgtttcttcttggaatttcttcatctcatttgaatcttttttcctgctggatttctctggcaagagaactcagctggactaataatgctgttctcttactctctctacaccctagactccaccaaaaaggtcagtgatgtcctaaagctcttcgaggatggcgagatggctaaatatgtccaaggagatgccattgggtacgagggattccagcaattcctgaaaatctatctcgaagtggataatgttcccagacacctaagcctggcactgtttcaatcctttgagactggtcactgcttaaatgagacaaatgtgacaaaagatgtggtgtgtctcaatgatgtttcctgctacttttcccttctggagggtggtcggccagaagacaagttagaatgtgagttgcccttctgaagtgaggtggcagggcagtgaagggagagagaggtgtttcccatcctcctttcccttattccttcaggattcctaaaggctgacaggtctagacaaaggtggggccagagaatgagcccatttcctgtgttctcccagactatttatacctaatacccttcaccatagtcaccccagtacccatgtcttgtgcattcccatgtaggcggcctaggatgtccttgggatatggattatgtattgtctcccctgacacattcactgagggtagagtccatgcctgttttcctttcctttttgtctctctctcagtcccatcccaggctctaggcttctcacccaaaagctctctccctgtctctttgtttcccccatattctggtatgaattctttgggtatctctcacaaactgaccctggcccccctaaaacaccccacagtcaccttcaagctgtacgacacggacagaaatgggatcctggacagctcagtgagttggggaccctgtatgctgggcaagggaatatgtgttaatttgtctgcaccctcctgccccaactcttccagggtcttaagaaacagaagaggatggggggagaggttgagtcctctaggactaaatttgaaagtaagtcccaagctcttgacccctcaaagagaatgctggatacatgaattgggtctgccttacaaacatacaaacacatttatttacttggcagacatacctgagaatgagaggtgtgaatctggggtggaacccaggaacactgatttctggaaaagagtttggatggtggtagtaaaggggatatggctgtggctcttgccctttttgctccaggaagtggacaaaattatcctacagatgatgcgagtggctgaatacctggattgggatgtgtctgagctgaggccggtaaggcagctcttccttcatgtcccttcttgtaccttcttccctggtgagtcctgcatctgccttacttcatctctgacaggcaacctggttcccttggctaggatggctgggctggatatcctaagaggcagtggagaggtgttgggtctgaagacccactcatactgaaagtccctttccactctgtgctcagattcttcaggagatgatgaaagagattgactatgatggcagtggctctgtctctcaagctgagtgggtccgggctggggccaccaccgtgccactgctagtgctgctgggtctggagatgactctgaaggacgacggacagcacatgtggaggcccaagaggttccccagaccagtctactgcaatctgtgcgagtcaagcattggtcttggcaaacagggactgagctgtaacctctgtaagtacactgttcacgaccagtgtgccatgaaagccctgccttgtgaagtcagcacctatgccaagtctcggaaggacattggtgtccaatcacatgtgtgggtgcgaggaggctgtgagtccgggcgctgcgaccgctgtcagaaaaagatccggatctaccacagtctgaccgggctgcattgtgtatggtgccacctagagatccacgatgactgcctgcaagcggtgggccatgagtgtgactgtgggctgctccgggatcacatcctgcctccatcttccatctatcccagtgtcctggcctctggaccggatcgtaaaaatagcaaaacaagccagaagaccatggatgatttaaatttgagcacctctgaggctctgcgggtacagggctgagagtcttgggcttcatgatgggggcaggtttttcactggagccctcatgggtgggaatgaagtgggagagcctggtggggagcggttgatgctcactctccagaaactccaccatggtaggggagggaaggggagggaaacaggagggaggggggaaatatcttggtggaatgctagccctctgcccctgtctcctgggcccaccttaactctgacaaaatcctgctttctttgtccttattttcttcccccaatgcagattgaccctgttcctaacacccacccacttctcgtctttgtcaatcctaagagtggcgggaagcaggggcaaagggtgctctggaagttccagtatatattaaaccctcgacaggtgttcaacctcctaaaggatggtcctgagatagggctccgattattcaaggatgttcctgatagccggattttggtgtgtggtggagacggcacagtaggctggattctagagaccattgacaaagctaacttgccagttttgcctcctgttgctgtgttgcccctgggtactggaaatgatctggctcgatgcctaagatggggaggagatggaatctcgctctgttgcccatgctggagtgcagtggtgccatctcagctcactgcaacctctgcctcccaggttcaagtgattctcctgtctcagcctcctgaatagctggaaatacaggtgttatgaaggacagaatctggcaaagatcctcaaggatttagagatgagtaaagtggtacatatggatcgatggtctgtggaggtgatacctcaacaaactgaagaaaaaagtgacccagtcccctttcaaatcatcaataactacttctctattggcgtggtcagtggaatggggcctggggagaagggagaaagggggggccaagcagtcagaggctggaggagagcagaaaaggagggggaggttaagtgacctgtgacacagggaaattgggagtgcagtacagtgctgagttgcaagggaagatcttgggacatgctgtggggagcagcatggggacttgggaaagaggggagaccgggagggagagattgagctctgtactgaccttcatgtcccgaactctccaggatgcctctattgctcatcgattccacatcatgcgagagaaatatccggagaagttcaacagcaggttagggaaaggagggggcagtgtgggcatacacagtgtcaggagccaggttttgaccaagtttgactcagattgctcagaagaacagtggcacctctaggaggtccccccaaccaaagccacccttgttccccatgggactaaagttaggaggttgatgcccttccctgtcacgtaccacccctgccagcactgtgtaacctgtccctccctactgggccttgtgttggggctgacacagaatgaagaacaagctatggtacttcgaatttgccacatctgaatccatcttctcaacatgcaaaaagctggaggagtctttgacagttgagatctgtgggaaaccgctggatctgagcaacctgtccctagaaggcatcgcagtgctaaacatccctagcatgcatggtggctccaacctctggggtgataccaggagaccccatggggatatctatgggatcaaccaggccttaggtgctacagctaaagtcatcaccgaccctgatatcctgaaaacctgtgtaccagacctaagtgacaagagactggaagtggttgggctggagggtgcaattgagatgggccaaatctataccaagctcaagaatgctggacgtcggctggccaagtgctctgagatcaccttccacaccacaaaaacccttcccatgcaaattgacggagaaccctggatgcagacgccctgtacagtgagtattgacgatcccagccaaaaattaaacccttgggctccatggatcctaaatccccattccacagcttctttacacccttctgatgcctgaacttcccctgcacatcattcatcctaaaccctgatttctcagcccctggtttccctatcgtggcctctctaggaacctagcaacccaccccaaaccccacagatttccctctaaatctctgaagccacagccccaaagtatcaggtcctgcctctgaatgtgctcccttcccttccagatcaagatcacccacaagaaccagatgcccatgctcatgggcccacccccccgctccaccaatttctttggcttcttgagctaagggggacacccttggcctccaagccagccttgaacccacctccctgtccctggactctactcccgaggctctgtacattgctgccacatactcctgccagcttgggggagtgttccttcaccctcacagtatttattatcctgcaccacctcactgttccccatgcgcacacacatacacacaccccaaaacacatacattgaaagtgcctcatctgaataaaatgacttgtgtttcccctttgggatctgct

SEQ ID NO: 5499 - DNA, 585 bp, Homo sapiens
  source 1..585: mol_type = unassigned DNA; mol_type = unassigned DNA
aacggaagtactactacgaagctgcctttctggccatccttgagaaaaatagacagatggccaaggagaggggcctaataagccccagtgattttgcccagctgcaaaaatacatggaatactccaccaaaaaggtcagtgatgtcctaaagctcttcgaggatggcgagatggctaaatatgtccaaggagatgccattgggtacgagggattccagcaattcctgaaaatctatctcgaagtggataatgttcccagacacctaagcctggcactgtttcaatcctttgagactggtcactgcttaaatgagacaaatgtgacaaaagatgtggtgtgtctcaatgatgtttcctgctacttttcccttctggagggtggtcggccagaagacaagttagaatgaagtggacaaaattatcctacagatgatgcgagtggctgaatacctggattgggatgtgtctgagctgaggccgattcttcaggagatgatgaaagagattgactatgatggcagtggctctgtctctcaagctgagtgggtccgggctggggccaccaccgtgccactgctagtgctg

SEQ ID NO: 5500 - DNA, 540 bp, Homo sapiens
  source 1..540: mol_type = unassigned DNA; mol_type = unassigned DNA
gagacaaatgtgacaaaagatgtggtgtgtctcaatgatgtttcctgctacttttcccttctggagggtggtcggccagaagacaagttagaattcaccttcaagctgtacgacacggacagaaatgggatcctggacagctcagaagtggacaaaattatcctacagatgatgcgagtggctgaatacctggattgggatgtgtctgagctgaggccgattcttcaggagatgatgaaagagattgactatgatggcagtggctctgtctctcaagctgagtgggtccgggctggggccaccaccgtgccactgctagtgctgctgggtctggagatgactctgaaggacgacggacagcacatgtggaggcccaagaggttccccagaccagtctactgcaatctgtgcgagtcaagcattggtcttggcaaacagggactgagctgtaaccgtgagtaatgggagctgggaggtaggggaagagggtcagcccagctatctgtgggagcttgatgctgtaaacttagaaaagaccta

SEQ ID NO: 5501 - DNA, 1961 bp, Homo sapiens
  source 1..1961: mol_type = unassigned DNA; mol_type = unassigned DNA
atgtggtgtgtctcaatgatgtttcctgctacttttcccttctggagggtggtcggccagaagacaagttagaattcaccttcaagctgtacgacacggacagaaatgggatcctggacagctcagaagtggacaaaattatcctacagatgatgcgagtggctgaatacctggattgggatgtgtctgagctgaggccgattcttcaggagatgatgaaagagattgactatgatggcagtggctctgtctctcaagctgagtgggtccgggctggggccaccaccgtgccactgctagtgctgctgggtctggagatgactctgaaggacgacggacagcacatgtggaggcccaagaggttccccagaccagtctactgcaatctgtgcgagtcaagcattggtcttggcaaacagggactgagctgtaacctctgtaagtacactgttcacgaccagtgtgccatgaaagccctgccttgtgaagtcagcacctatgccaagtctcggaaggacattggtgtccaatcacatgtgtgggtgcgaggaggctgtgagtccgggcgctgcgaccgctgtcagaaaaagatccggatctaccacagtctgaccgggctgcattgtgtatggtgccacctagagatccacgatgactgcctgcaagcggtgggccatgagtgtgactgtgggctgctccgggatcacatcctgcctccatcttccatctatcccagtgtcctggcctctggaccggatcgtaaaaatagcaaaacaagccagaagaccatggatgatttaaatttgagcacctctgaggctctgcggattgaccctgttcctaacacccacccacttctcgtctttgtcaatcctaagagtggcgggaagcaggggcaaagggtgctctggaagttccagtatatattaaaccctcgacaggtgttcaacctcctaaaggatggtcctgagatagggctccgattattcaaggatgttcctgatagccggattttggtgtgtggtggagacggcacagtaggctggattctagagaccattgacaaagctaacttgccagttttgcctcctgttgctgtgttgcccctgggtactggaaatgatctggctcgatgcctaagatggggaggaggttatgaaggacagaatctggcaaagatcctcaaggatttagagatgagtaaagtggtacatatggatcgatggtctgtggaggtgatacctcaacaaactgaagaaaaaagtgacccagtcccctttcaaatcatcaataactacttctctattggcgtggatgcctctattgctcatcgattccacatcatgcgagagaaatatccggagaagttcaacagcagaatgaagaacaagctatggtacttcgaatttgccacatctgaatccatcttctcaacatgcaaaaagctggaggagtctttgacagttgagatctgtgggaaaccgctggatctgagcaacctgtccctagaaggcatcgcagtgctaaacatccctagcatgcatggtggctccaacctctggggtgataccaggagaccccatggggatatctatgggatcaaccaggccttaggtgctacagctaaagtcatcaccgaccctgatatcctgaaaacctgtgtaccagacctaagtgacaagagactggaagtggttgggctggagggtgcaattgagatgggccaaatctataccaagctcaagaatgctggacgtcggctggccaagtgctctgagatcaccttccacaccacaaaaacccttcccatgcaaattgacggagaaccctggatgcagacgccctgtacaatcaagatcacccacaagaaccagatgcccatgctcatgggcccacccccccgctccaccaatttctttggcttcttgagctaagggggacacccttggcctccaagccag

SEQ ID NO: 5502 - DNA, 4357 bp, Homo sapiens
  source 1..4357: mol_type = unassigned DNA; mol_type = unassigned DNA
gtgcattcccatgtaggcggcctaggatgtccttgggatatggattatgtattgtctcccctgacacattcactgagggtagagtccatgcctgttttcctttcctttttgtctctctctcagtcccatcccaggctctaggcttctcacccaaaagctctctccctgtctctttgtttcccccatattctggtatgaattctttgggtatctctcacaaactgaccctggcccccctaaaacaccccacagtcaccttcaagctgtacgacacggacagaaatgggatcctggacagctcagtgagttggggaccctgtatgctgggcaagggaatatgtgttaatttgtctgcaccctcctgccccaactcttccagggtcttaagaaacagaagaggatggggggagaggttgagtcctctaggactaaatttgaaagtaagtcccaagctcttgacccctcaaagagaatgctggatacatgaattgggtctgccttacaaacatacaaacacatttatttacttggcagacatacctgagaatgagaggtgtgaatctggggtggaacccaggaacactgatttctggaaaagagtttggatggtggtagtaaaggggatatggctgtggctcttgccctttttgctccaggaagtggacaaaattatcctacagatgatgcgagtggctgaatacctggattgggatgtgtctgagctgaggccgattcttcaggagatgatgaaagagattgactatgatggcagtggctctgtctctcaagctgagtgggtccgggctggggccaccaccgtgccactgctagtgctgctgggtctggagatgactctgaaggacgacggacagcacatgtggaggcccaagaggttccccagaccagtctactgcaatctgtgcgagtcaagcattggtcttggcaaacagggactgagctgtaaccgtgagtaatgggagctgggaggtaggggaagagggtcagcccagctatctgtgggagcttgatgctgtaaacttagaaaagacctaggtttgaatcctgggctctgccactgactagttatgtgaccttgggaaagccacatcacttctttaagccttagtttcctcaactgaaaatgaggtaattgtgagcattaaaaaagttggtgcaagaaaagtgcttcagatggtgcatgcacatactataaaatgcaataaaaaatatctattatgattactgttgctgttagacctgggcctcccaagcattatccagctcagttcctgcctggcacatggatggtgtggggcaggcatgcagtagcagctgatcttttaggaggaagagtaaggaaaaggcgtgggttttggaggtgggcacttcaccccgaacttttattctgctacaccctcaagcaagggatcacatatctgatcctgcctcaccctcaggtaagaaggaaatagggggagaggctcagctaagcctcccaacttcttccttctccctcagtctgtaagtacactgttcacgaccagtgtgccatgaaagccctgccttgtgaagtcagcacctatgccaagtctcggaaggacattggtgtgagtgatctcatgcctccacccccaacatcacctacatcctggccctggccctggcccttggcccattgctgccctcagcccctccctcccctaggtcctgctcagaccctgccagacaaggaactgcctttctccccaaggtccaatcacatgtgtgggtgcgaggaggctgtgagtccgggcgctgcgaccgctgtcagaaaaagatccggatctaccacagtctgaccgggctgcattgtgtatggtgccacctagagatccacgatgactgcctgcaagcggtgggccatgagtgtgactgtgggctgctccgggatcacatcctgcctccatcttccatctatcccagtgtcctggcctctggaccggatcgtaaaaatagcaaaacaagccagaagaccatggatgatttaaatttgagcacctctgaggctctgcggattgaccctgttcctaacacccacccacttctcgtctttgtcaatcctaagagtggcgggaagcaggggcaaagggtgctctggaagttccagtatatattaaaccctcgacaggtgttcaacctcctaaaggatggtcctgagatagggctccgattattcaaggatgttcctgatagccggattttggtgtgtggtggagacggcacagtaggctggattctagagaccattgacaaagctaacttgccagttttgcctcctgttgctgtgttgcccctgggtactggaaatgatctggctcgatgcctaagatggggaggagatggaatctcgctctgttgcccatgctggagtgcagtggtgccatctcagctcactgcaacctctgcctcccaggttcaagtgattctcctgtctcagcctcctgaatagctggaaatacaggtgttatgaaggacagaatctggcaaagatcctcaaggatttagagatgagtaaagtggtacatatggatcgatggtctgtggaggtgatacctcaacaaactgaagaaaaaagtgacccagtcccctttcaaatcatcaataactacttctctattggcgtggtcagtggaatggggcctggggagaagggagaaagggggggccaagcagtcagaggctggaggagagcagaaaaggagggggaggttaagtgacctgtgacacagggaaattgggagtgcagtacagtgctgagttgcaagggaagatcttgggacatgctgtggggagcagcatggggacttgggaaagaggggagaccgggagggagagattgagctctgtactgaccttcatgtcccgaactctccaggatgcctctattgctcatcgattccacatcatgcgagagaaatatccggagaagttcaacagcagaatgaagaacaagctatggtacttcgaatttgccacatctgaatccatcttctcaacatgcaaaaagctggaggagtctttgacagttgaggtgtgtgtaataagacttaaccctacatccttttcagcttcttaatagccaagtttctccctccatggcacccttaggaacttcccatattcttgaacctatgcttctttaacctcccagctctcctaccccaattctccaagtcctcaagatacactagtccctatttccattccttgcacacctccaaatcctgccttctccagtttgtcatctggtggagggagcgatcacatctatgatcatgccatgaggtgaggatctgtaccctccctaactgggactgtgccccctcctctcagatctgtgggaaaccgctggatctgagcaacctgtccctagaaggcatcgcagtgctaaacatccctagcatgcatggtggctccaacctctggggtgataccaggagaccccatggggatatctatgggatcaaccaggccttaggtgctacagctaaagtcatcaccgaccctgatatcctgaaaacctgtgtaccagacctaagtgacaagagactggaagtggttgggctggagggtgcaattgagatgggccaaatctataccaagctcaagaatgctggacgtcggctggccaagtgctctgagatcaccttccacaccacaaaaacccttcccatgcaaattgacggagaaccctggatgcagacgccctgtacagtgagtattgacgatcccagccaaaaattaaacccttgggctccatggatcctaaatccccattccacagcttctttacacccttctgatgcctgaacttcccctgcacatcattcatcctaaaccctgatttctcagcccctggtttccctatcgtggcctctctaggaacctagcaacccaccccaaaccccacagatttccctctaaatctctgaagccacagccccaaagtatcaggtcctgcctctgaatgtgctcccttcccttccagatcaagatcacccacaagaaccagatgcccatgctcatgggcccacccccccgctccaccaatttctttggcttcttgagctaagggggacacccttggcctccaagccagccttgaacccacctccctgtccctggactctactcccgaggctctgtacattgctgccacatactcctgccagcttgggggagtgttccttcaccctcacagtatttattatcctgcaccacctcactgttccccatgcgcacacacatacacacaccccaaaacacatacattgaaagtgcctcatctgaataaaatgacttgtgtttcccctttggg

SEQ ID NO: 5503 - DNA, 527 bp, Homo sapiens
  source 1..527: mol_type = unassigned DNA; mol_type = unassigned DNA
acagctcagaagtggacaaaattatcctacagatgatgcgagtggctgaatacctggattgggatgtgtctgagctgaggccggtaaggcagctcttccttcatgtcccttcttgtaccttcttccctggtgagtcctgcatctgccttacttcatctctgacaggcaacctggttcccttggctaggatggctgggctggatatcctaagaggcagtggagaggtgttgggtctgaagacccactcatactgaaagtccctttccactctgtgctcagattcttcaggagatgatgaaagagattgactatgatggcagtggctctgtctctcaagctgagtgggtccgggctggggccaccaccgtgccactgctagtgctgctgggtctggagatgactctgaaggacgacggacagcacatgtggaggcccaagaggttccccagaccagtctactgcaatctgtgcgagtcaagcattggtcttggcaaacagggactgagctgtaaccgtgagtaatggga

SEQ ID NO: 5504 - DNA, 699 bp, Homo sapiens
  source 1..699: mol_type = unassigned DNA; mol_type = unassigned DNA
gaagaggatggggggagaggttgagtcctctaggactaaatttgaaaatgatgcgagtggctgaatacctggattgggatgtgtctgagctgaggccgattcttcaggagatgatgaaagagattgactatgatggcagtggctctgtctctcaagctgagtgggtccgggctggggccaccaccgtgccactgctagtgctgctgggtctggagatgactctgaaggacgacggacagcacatgtggaggcccaagaggttccccagaccagtctactgcaatctgtgcgagtcaagcattggtcttggcaaacagggactgagctgtaaccgtgagtaatgggagctgggaggtaggggaagagggtcagcccagctatctgtgggagcttgatgctgtaaacttagaaaagacctaggtttgaatcctgggctctgccactgactagttatgtgaccttgggaaagccacatcacttctttaagccttagtttcctcaactgaaaatgaggtaattgtgagcattaaaaaagttggtgcaagaaaagtgcttcagatggtgcatgcacatactataaaatgcaataaaaaatatctattatgattactgttgctgttagacctgggcctcccaagcattatccagctcagttcctgcctggcacatggatggtgtggggcaggcatgcagtagcag

SEQ ID NO: 5505 - DNA, 621 bp, Homo sapiens
  source 1..621: mol_type = unassigned DNA; mol_type = unassigned DNA
aatttgaaagtaagtcccaagctcttgacccctcaaagagaatgctggatacatgaattgggtctgccttacaaacatacaaacacatttatttacttggcagacatacctgagaatgagaggtgtgaatctggggtggaacccaggaacactgatttctggaaaagagtttggatggtggtagtaaaggggatatggctgtggctcttgccctttttgctccaggaagtggacaaaattatcctacagatgatgcgagtggctgaatacctggattgggatgtgtctgagctgaggccgattcttcaggagatgatgaaagagattgactatgatggcagtggctctgtctctcaagctgagtgggtccgggctggggccaccaccgtgccactgctagtgctgctgggtctggagatgactctgaaggacgacggacagcacatgtggaggcccaagaggttccccagaccagtctactgcaatctgtgcgagtcaagcattggtcttggcaaacagggactgagctgtaaccgtgagtaatgggagctgggaggtaggggaagagggtcagcccagctatctgtgggagcttgatgctgtaaacttagaaaagaccta

SEQ ID NO: 5506 - DNA, 566 bp, Homo sapiens
  source 1..566: mol_type = unassigned DNA; mol_type = unassigned DNA
tgggtctgccttacaaacatacaaacacatttatttacttggcagacatacctgagaatgagaggtgtgaatctggggtggaacccaggaacactgatttctggaaaagagtttggatggtggtagtaaaggggatatggctgtggctcttgccctttttgctccaggaagtggacaaaattatcctacagatgatgcgagtggctgaatacctggattgggatgtgtctgagctgaggccgattcttcaggagatgatgaaagagattgactatgatggcagtggctctgtctctcaagctgagtgggtccgggctggggccaccaccgtgccactgctagtgctgctgggtctggagatgactctgaaggacgacggacagcacatgtggaggcccaagaggttccccagaccagtctactgcaatctgtgcgagtcaagcattggtcttggcaaacagggactgagctgtaacctctgtaagtacactgttcacgaccagtgtgccatgaaagccctgccttgtgaagtcagcacctatgccaagtctcggaaggacattggt

SEQ ID NO: 5507 - DNA, 780 bp, Homo sapiens
  source 1..780: mol_type = unassigned DNA; mol_type = unassigned DNA
gaatgagaggtgtgaatctggggtggaacccaggaacactgatttctggaaaagagtttggatggtggtagtaaaggggatatggctgtggctcttgccctttttgctccaggaagtggacaaaattatcctacagatgatgcgagtggctgaatacctggattgggatgtgtctgagctgaggccgattcttcaggagatgatgaaagagattgactatgatggcagtggctctgtctctcaagctgagtgggtccgggctggggccaccaccgtgccactgctagtgctgctgggtctggagatgactctgaaggacgacggacagcacatgtggaggcccaagaggttccccagaccagtctactgcaatctgtgcgagtcaagcattggtcttggcaaacagggactgagctgtaacctctgtaagtacactgttcacgaccagtgtgccatgaaagccctgccttgtgaagtcagcacctatgccaagtctcggaaggacattggtgtccaatcacatgtgtgggtgcgaggaggctgtgagtccgggcgctgcgaccgctgtcagaaaaagatccggatctaccacagtctgaccgggctgcattgtgtatggtgccacctagaggtcagtttgggagccatcccttctgggtgcgtcttaccccgcagagctgccttctccacgggcctccggccacacctcctttacaggcacagttgcccctgctcccaagggctctttccagcccagactgccaggttgagaggagacag

SEQ ID NO: 5508 - DNA, 2031 bp, Homo sapiens
  source 1..2031: mol_type = unassigned DNA; mol_type = unassigned DNA
gatgatgcgagtggctgaatacctggattgggatgtgtctgagctgaggccgattcttcaggagatgatgaaagagattgactatgatggcagtggctctgtctctcaagctgagtgggtccgggctggggccaccaccgtgccactgctagtgctgctgggtctggagatgactctgaaggacgacggacagcacatgtggaggcccaagaggttccccagaccagtctactgcaatctgtgcgagtcaagcattggtcttggcaaacagggactgagctgtaaccgtgagtaatgggagctgggaggtaggggaagagggtcagcccagctatctgtgggagcttgatgctgtaaacttagaaaagacctaggtttgaatcctgggctctgccactgactagttatgtgaccttgggaaagccacatcacttctttaagccttagtttcctcaactgaaaatgaggtaattgtgagcattaaaaaagttggtgcaagaaaagtgcttcagatggtgcatgcacatactataaaatgcaataaaaaatatctattatgattactgttgctgttagacctgggcctcccaagcattatccagctcagttcctgcctggcacatggatggtgtggggcaggcatgcagtagcagctgatcttttaggaggaagagtaaggaaaaggcgtgggttttggaggtgggcacttcaccccgaacttttattctgctacaccctcaagcaagggatcacatatctgatcctgcctcaccctcaggtaagaaggaaatagggggagaggctcagctaagcctcccaacttcttccttctccctcagtctgtaagtacactgttcacgaccagtgtgccatgaaagccctgccttgtgaagtcagcacctatgccaagtctcggaaggacattggtgtccaatcacatgtgtgggtgcgaggaggctgtgagtccgggcgctgcgaccgctgtcagaaaaagatccggatctaccacagtctgaccgggctgcattgtgtatggtgccacctagagatccacgatgactgcctgcaagcggtgggccatgagtgtgactgtgggctgctccgggatcacatcctgcctccatcttccatctatcccagtgtcctggcctctggaccggatcgtaaaaatagcaaaacaagccagaagaccatggatgatttaaatttgagcacctctgaggctctgcggattgaccctgttcctaacacccacccacttctcgtctttgtcaatcctaagagtggcgggaagcaggggcaaagggtgctctggaagttccagtatatattaaaccctcgacaggtgttcaacctcctaaaggatggtcctgagatagggctccgattattcaaggatgttcctgatagccggattttggtgtgtggtggagacggcacagtaggctggattctagagaccattggtcagtgcagggaggggcgtggggaaggtattggggtcgtagtcttgcagagctaactcactccatccttctcttcacctgcctccgcagacaaagctaacttgccagttttgcctcctgttgctgtgttgcccctgggtactggaaatgatctggctcgatgcctaagatggggaggaggtaagtggttagaaattgttttgctgtaggctgagaggagttgtgtaggaagggaaaggcacttagagaagaaactaggcatctggtatggaaaggattggggaagaagaggggcacagacaggtggatacaaaagtggaatgtccaaaaagaagagagctttggaagaagcagggaccacaatctgaacctagaagggtcaagggtgatagtcccctttcctgtaaatatttttatgtttctcccaaccaactcttatggctcagagaatcaaggaatatgggggtggggaacaatgtgtgaataaggaaggttgtataagagctaagccagatgctgaatgatggagctagcaggtcatgactcattcactcattcaaacaat

SEQ ID NO: 5509 - DNA, 750 bp, Homo sapiens
  source 1..750: mol_type = unassigned DNA; mol_type = unassigned DNA
gctagtgctgctgggtctggagatgactctgaaggacgacggacagcacatgtggaggcccaagaggttccccagaccagtctactgcaatctgtgcgagtcaagcattggtcttggcaaacagggactgagctgtaacctctgtaagtacactgttcacgaccagtgtgccatgaaagccctgccttgtgaagtcagcacctatgccaagtctcggaaggacattggtgtgagtgatctcatgcctccacccccaacatcacctacatcctggccctggccctggcccttggcccattgctgccctcagcccctccctcccctaggtcctgctcagaccctgccagacaaggaactgcctttctccccaaggtccaatcacatgtgtgggtgcgaggaggctgtgagtccgggcgctgcgaccgctgtcagaaaaagatccggatctaccacagtctgaccgggctgcattgtgtatggtgccacctagagatccacgatgactgcctgcaagcggtgggccatgagtgtgactgtgggctgctccgggatcacatcctgcctccatcttccatctatcccagtgtcctggcctctggaccggatcgtaaaaatagcaaaacaagccagaagaccatggatgatttaaatttgagcacctctgaggctctgcggattgaccctgttcctaacacccacccacttctcgtctttgtcaatcctaagagtggcgggaagcaggggcaaagg

SEQ ID NO: 5510 - DNA, 698 bp, Homo sapiens
  source 1..698: mol_type = unassigned DNA; mol_type = unassigned DNA
tgcaatctgtgcgagtcaagcattggtcttggcaaacagggactgagctgtaacctctgtaagtacactgttcacgaccagtgtgccatgaaagccctgccttgtgaagtcagcacctatgccaagtctcggaaggacattggtcccctccctcccctaggtcctgctcagaccctgccagacaaggaactgcctttctccccaaggtccaatcacatgtgtgggtgcgaggaggctgtgagtccgggcgctgcgaccgctgtcagaaaaagatccggatctaccacagtctgaccgggctgcattgtgtatggtgccacctagagatccacgatgactgcctgcaagcggtgggccatgagtgtgactgtgggctgctccgggatcacatcctgcctccatcttccatctatcccagtgtcctggcctctggaccggatcgtaaaaatagcaaaacaagccagaagaccatggatgatttaaatttgagcacctctgaggctctgcggattgaccctgttcctaacacccacccacttctcgtctttgtcaatcctaagagtggcgggaagcaggggcaaagggtgctctggaagttccagtatatattaaaccctcgacaggtgttcaacctcctaaaggatggtcctgagatagggctccgattattcaaggatgttcctgatagccggattttg

SEQ ID NO: 5511 - DNA, 782 bp, Homo sapiens
  source 1..782: mol_type = unassigned DNA; mol_type = unassigned DNA
gagtcaagcattggtcttggcaaacagggactgagctgtaacctctgtaagtacactgttcacgaccagtgtgccatgaaagccctgccttgtgaagtcagcacctatgccaagtctcggaaggacattggtgtgagtgatctcatgcctccacccccaacatcacctacatcctggccctggccctggcccttggcccattgctgccctcagcccctccctcccctaggtcctgctcagaccctgccagacaaggaactgcctttctccccaaggtccaatcacatgtgtgggtgcgaggaggctgtgagtccgggcgctgcgaccgctgtcagaaaaagatccggatctaccacagtctgaccgggctgcattgtgtatggtgccacctagaggtcagtttgggagccatcccttctgggtgcgtcttaccccgcagagctgccttctccacgggcctccggccacacctcctttacaggcacagttgcccctgctcccaagggctctttccagcccagactgccaggttgagaggagacagggttaccttcgtgatctctctgtgcccacctcgtctttcagatccacgatgactgcctgcaagcggtgggccatgagtgtgactgtgggctgctccgggatcacatcctgcctccatcttccatctatcccagtgtcctggcctctggaccggatcgtaaaaatagcaaaacaagccagaagaccatggatgatttaaatttgagcacctctgaggctctgcgggtacagggctgaga

SEQ ID NO: 5512 - DNA, 453 bp, Homo sapiens
  source 1..453: mol_type = unassigned DNA; mol_type = unassigned DNA
agtaaggaaaaggcgtgggttttggaggtgggcacttcaccccgaacttttattctgctacaccctcaagcaagggatcacatatctgatcctgcctcaccctcaggtaagaaggaaatagggggagaggctcagctaagcctcccaacttcttccttctccctcagtctgtaagtacactgttcacgaccagtgtgccatgaaagccctgccttgtgaagtcagcacctatgccaagtctcggaaggacattggtgtccaatcacatgtgtgggtgcgaggaggctgtgagtccgggcgctgcgaccgctgtcagaaaaagatccggatctaccacagtctgaccgggctgcattgtgtatggtgccacctagaggtcagtttgggagccatcccttctgggtgcgtcttaccccgcagagctgccttctccacgggcctccggccacacct

SEQ ID NO: 5513 - DNA, 607 bp, Homo sapiens
  source 1..607: mol_type = unassigned DNA; mol_type = unassigned DNA
ctgcggattgaccctgttcctaacacccacccacttctcgtctttgtcaatcctaagagtggcgggaagcaggggcaaaggctccgattattcaaggatgttcctgatagccggattttggtgtgtggtggagacggcacagtaggctggattctagagaccattgacaaagctaacttgccagttttgcctcctgttgctgtgttgcccctgggtactggaaatgatctggctcgatgcctaagatggggaggaggttatgaaggacagaatctggcaaagatcctcaaggatttagagatgagtaaagtggtacatatggatcgatggtctgtggaggtgatacctcaacaaactgaagaaaaaagtgacccagtcccctttcaaatcatcaataactacttctctattggcgtggatgcctctattgctcatcgattccacatcatgcgagagaaatatccggagaagttcaacagcagaatgaagaacaagctatggtacttcgaatttgccacatctgaatccatcttctcaacatgcaaaaagctggaggagtctttgacagttgagatctgtgggaaaccgctggatctgagcaacctgt

SEQ ID NO: 5514 - DNA, 678 bp, Homo sapiens
  source 1..678: mol_type = unassigned DNA; mol_type = unassigned DNA
gtctttgtcaatcctaagagtggcgggaagcaggggcaaagggtgctctggaagttccagtatatattaaaccctcgacaggtgttcaacctcctaaaggatggtcctgagatagggctccgattattcaaggatgttcctgatagccggattttggtgtgtggtggagacggcacagtaggctggattctagagaccattggtcagtgcagggaggggcgtggggaaggtattggggtcgtagtcttgcagagctaactcactccatccttctcttcacctgcctccgcagacaaagctaacttgccagttttgcctcctgttgctgtgttgcccctgggtactggaaatgatctggctcgatgcctaagatggggaggaggttatgaaggacagaatctggcaaagatcctcaaggatttagagatgagtaaagtggtacatatggatcgatggtctgtggaggtgatacctcaacaaactgaagaaaaaagtgacccagtcccctttcaaatcatcaataactacttctctattggcgtggatgcctctattgctcatcgattccacatcatgcgagagaaatatccggagaagttcaacagcagaatgaagaacaagctatggtacttcgaatttgccacatctgaatccatcttctcaacatgcaaaaagctg

SEQ ID NO: 5515 - DNA, 224 bp, Homo sapiens
  source 1..224: mol_type = unassigned DNA; mol_type = unassigned DNA
accagacctaagtgacaagagactggaagtggttgggctggagggtgcaattgagatgggccaaatctataccaagctcaagaatgctggacgtcggctggccaagtgctctgagatcaccttccacaccacaaaaacccttcccatgcaaattgacggagaaccctggatgcagacgccctgtacagtgagtattgacgatcccagccaaaaattaaaccctt

SEQ ID NO: 5516 - DNA, 533 bp, Homo sapiens
  source 1..533: mol_type = unassigned DNA; mol_type = unassigned DNA
tggggcagcagaagggtcatgggaatggtggggaggggctttactagatctccctcaatgacaaaaggtctcaaagccaacctaagaagcagagttttggtattcgattggtaaggaaatcaccaatgttccttggcctcctatagcaccacaaaaacccttcccatgcaaattgacggagaaccctggatgcagacgccctgtacaatcaagatcacccacaagaaccagatgcccatgctcatgggcccacccccccgctccaccaatttctttggcttcttgagctaagggggacacccttggcctccaagccagccttgaacccacctccctgtccctggactctactcccgaggctctgtacattgctgccacatactcctgccagcttgggggagtgttccttcaccctcacagtatttattatcctgcaccacctcactgttccccatgcgcacacacatacacacaccccaaaacacatacattgaaagtgcctcatctgaataaaatgacttgtgtttcccctt

SEQ ID NO: 5517 - DNA, 2770 bp, Homo sapiens
  source 1..2770: mol_type = unassigned DNA; mol_type = unassigned DNA
gcggccgcgtctgcctggcccgtcccctccagcccagctcgggctccagctccagcgccggcgcttcagctgcgaccgcgagccctctcaagcaaggtagagaccccgcgagccccccagcgccccaccctcccccatcggaaaaggacaggggtagggaagccgaggacccacgggctgcgttcgtgctgctgggtcgggaaggaggaagcgtgacagctggagcgggcctaccctctgaagaggtccaagcaacggaagtactactacgaagctgcctttctggccatccttgagaaaaatagacagatggccaaggagaggggcctaataagccccagtgattttgcccagctgcaaaaatacatggaatactccaccaaaaaggtcagtgatgtcctaaagctcttcgaggatggcgagatggctaaatatgtccaaggagatgccattgggtacgagggattccagcaattcctgaaaatctatctcgaagtggataatgttcccagacacctaagcctggcactgtttcaatcctttgagactggtcactgcttaaatgagacaaatgtgacaaaagatgtggtgtgtctcaatgatgtttcctgctacttttcccttctggagggtggtcggccagaagacaagttagaattcaccttcaagctgtacgacacggacagaaatgggatcctggacagctcagaagtggacaaaattatcctacagatgatgcgagtggctgaatacctggattgggatgtgtctgagctgaggccgattcttcaggagatgatgaaagagattgactatgatggcagtggctctgtctctcaagctgagtgggtccgggctggggccaccaccgtgccactgctagtgctgctgggtctggagatgactctgaaggacgacggacagcacatgtggaggcccaagaggttccccagaccagtctactgcaatctgtgcgagtcaagcattggtcttggcaaacagggactgagctgtaacctctgtaagtacactgttcacgaccagtgtgccatgaaagccctgccttgtgaagtcagcacctatgccaagtctcggaaggacattggtgtccaatcacatgtgtgggtgcgaggaggctgtgagtccgggcgctgcgaccgctgtcagaaaaagatccggatctaccacagtctgaccgggctgcattgtgtatggtgccacctagagatccacgatgactgcctgcaagcggtgggccatgagtgtgactgtgggctgctccgggatcacatcctgcctccatcttccatctatcccagtgtcctggcctctggaccggatcgtaaaaatagcaaaacaagccagaagaccatggatgatttaaatttgagcacctctgaggctctgcggattgaccctgttcctaacacccacccacttctcgtctttgtcaatcctaagagtggcgggaagcaggggcaaagggtgctctggaagttccagtatatattaaaccctcgacaggtgttcaacctcctaaaggatggtcctgagatagggctccgattattcaaggatgttcctgatagccggattttggtgtgtggtggagacggcacagtaggctggattctagagaccattgacaaagctaacttgccagttttgcctcctgttgctgtgttgcccctgggtactggaaatgatctggctcgatgcctaagatggggaggaggttatgaaggacagaatctggcaaagatcctcaaggatttagagatgagtaaagtggtacatatggatcgatggtctgtggaggtgatacctcaacaaactgaagaaaaaagtgacccagtcccctttcaaatcatcaataactacttctctattggcgtggatgcctctattgctcatcgattccacatcatgcgagagaaatatccggagaagttcaacagcagaatgaagaacaagctatggtacttcgaatttgccacatctgaatccatcttctcaacatgcaaaaagctggaggagtctttgacagttgagatctgtgggaaaccgctggatctgagcaacctgtccctagaaggcatcgcagtgctaaacatccctagcatgcatggtggctccaacctctggggtgataccaggagaccccatggggatatctatgggatcaaccaggccttaggtgctacagctaaagtcatcaccgaccctgatatcctgaaaacctgtgtaccagacctaagtgacaagagactggaagtggttgggctggagggtgcaattgagatgggccaaatctataccaagctcaagaatgctggacgtcggctggccaagtgctctgagatcaccttccacaccacaaaaacccttcccatgcaaattgacggagaaccctggatgcagacgccctgtacaatcaagatcacccacaagaaccagatgcccatgctcatgggcccacccccccgctccaccaatttctttggcttcttgagctaagggggacacccttggcctccaagccagccttgaacccacctccctgtccctggactctactcccgaggctctgtacattgctgccacatactcctgccagcttgggggagtgttccttcaccctcacagtatttattatcctgcaccacctcactgttccccatgcgcacacacatacacacaccccaaaacacatacattgaaagtgcctcatctgaataaaatgacttgtgtttcccctttgggatctgct

SEQ ID NO: 5518 - DNA, 6917 bp, Homo sapiens
  source 1..6917: mol_type = unassigned DNA; mol_type = unassigned DNA
attttcccctgagctccatcagcaagagtagcaatagcagctggagaagcggcagccagagataggcagggctggtgcttgcagccgcgcaaatcgcctcctcctcaacacacacacacacacacacacacacacacacacacacacactgcacagacttccaatatcaacgcgtcttgacataaatcaaggactaagagagactgaagaagagcgttagtcatggacaacagttctttaacacattattgaaattacaagcatccaaagcagtttcatgtggacagattgcatattttgaaagcctgaggtattttatcatgaaacatgccatgtggaatctttgaagcatagacctctgcgcaacacctgaataaagaatcttttacctggtatgtgacagagcttctcaccaccaccatgacaaaccaggaaaaatgggcccacctcagcccttcggaattttcccaacttcagaaatatgctgagtattctacaaagaaattaaaggatgttcttgaagaattccatggtaatggtgtgcttgcaaagtataatcctgaagggaaacaagacattcttaaccaaacaatagattttgaaggtttcaaactattcatgaagacattcctggaagccgagcttcctgatgatttcactgcacaccttttcatgtcatttagcaacaagtttcctcattctagtccaatggtaaaaagtaagcctgctctcctatcaggcggtctgagaatgaataaaggtgccatcacccctccccggactacttctcctgcaaatacgtgttccccagaagtaatccatctgaaggacattgtctgttacctgtctctgcttgaaagaggaagacctgaggataagcttgagtttatgtttcgcctttatgacacggatgggaatggcttcctggacagctcggagctagaaaatatcatcagtcagatgatgcatgttgcagaataccttgagtgggatgtcactgaacttaatccaatcctccatgaaatgatggaagaaattgactatgatcatgatggaaccgtgtctctggaggaatggattcaaggaggaatgacaacgattccacttcttgtgctcctgggcttagaaaataacgtgaaggatgatggacagcacgtgtggcgactgaagcactttaacaaacctgcctattgcaacctttgcctgaacatgctgattggcgtggggaagcagggcctctgctgttccttctgcaagtacacagtccatgagcgctgtgtggctcgagcacctccctcttgcatcaagacctatgtgaagtccaaaaggaacactgatgtcatgcaccattactgggttgaaggtaactgcccaaccaagtgtgataagtgccacaaaactgttaaatgttaccagggcctgacaggactgcattgtgtttggtgtcagatcacactgcataataaatgtgcttctcatctaaaacctgaatgtgactgtggacctttgaaggaccatattttaccacccacaacaatctgtccagtggtactgcagactctgcccacttcaggagtttcagttcctgaggaaagacaatcaacagtgaaaaaggaaaagagtggttcccagcagccaaacaaagtgattgacaagaataaaatgcaaagagccaactctgttactgtagatggacaaggcctgcaggtcactcctgtgcctggtactcacccacttttagtttttgtgaaccccaaaagtggtggaaaacaaggagaacgaatttacagaaaattccagtatctattaaatcctcgtcaggtttacagtctttctggaaatggaccaatgccagggttaaactttttccgtgatgttcctgacttcagagtgttagcctgtggtggagatggaaccgtgggctgggttttggattgcatagaaaaggccaatgtaggcaagcatcctccagttgcgattctgcctcttgggactggcaatgatctagcaagatgcctgcgatggggaggaggttacgaaggtgagaatctgatgaaaattctaaaagacattgaaaacagcacagaaatcatgttggacaggtggaagtttgaagtcatacctaatgacaaagatgagaaaggagacccagtgccttacagtatcatcaataattacttttccattggcgtggatgcctccattgcacacagattccacatcatgagagaaaaacacccagagaaattcaacagtagaatgaagaacaaattttggtattttgagtttggcacatctgaaactttctcagccacctgcaagaagctacatgaatctgtagaaatagaatgtgatggagtacagatagatttaataaacatctctctggaaggaattgctattttgaatataccaagcatgcatggaggatccaatctttggggagagtctaagaaaagacgaagccatcgacgaatagagaaaaaagggtctgacaaaaggaccaccgtcacagatgccaaagagttgaagtttgcaagtcaagatctcagtgaccagctgctggaggtggtcggcttggaaggagccatggagatggggcaaatatacacaggcctgaaaagtgctggccggcggctggctcagtgctcctgcgtggtcatcaggacgagcaagtctctgccaatgcaaattgatggggagccatggatgcagaccccatgcacaataaaaattacacacaagaaccaagccccaatgctgatgggcccgcctccaaaaaccggtttattctgctccctcgtcaaaaggacaagaaaccgaagcaaggaataatcctgtgttgtttcactcttagaaattgaattagcataattgggccatggaacacatatgctggaaatctttgaaccatttcaagtctcctgctcatgcaaaatcatggaagtggtttaacagtttttgttactaagctaatgtaaaattcagctattagaaaatttattgtctcagtttttataggcatctttgcatgaagaaagcagaagtttacctgaagtgatactgcatatttttggtgcatgcattcccatagatttttacatctcccacccaactcttccccaatttccttttactaacctgtgagaaaaacccgtgaaacatgaaaaaggaaataccatgggaaacgtgattctcagtgtgattccaattattacgaagcactaatcagtaacgctacaatgatcataattgcagattgctatacgtttcccttttagaatcagtgtatcagtgacctatgacttgaggagaaacttttaattcgaagattttattaaatagttgactacaataccttgctatatatacatagtttttcttcaacatcttaactcttctgagtggaaataaaaatatcaggcataaggttttctcatgctgaaaaatagaacgcggtttttattttgcttagttttctttttaattccagaaataagtgaaaacatgttacttgacagtcaagtgtggtaatatggcaagccttgttcctttctgcatgagaatctaggagagaattcataaccacaccaataacgaaatagaagttttaaactatgtgcctaatcaatgtgtttcccaccaaagattcagaaaacaatgcttgagagaaatgggttaatgcataattaattaagcattgtggagcaaatttagggttcctgtgattaattttgtgatgactaaaatgctggaaagcgagtgagttgcccattaattatgattaaaattctcacctttcacagacagacaataagccagacaacacaatcaaagctcaatagatgatttcttgcttttttcagtcatttataaatataggtgtaatttttcatggatcagttaagtacacttgaaggaagtaaatgattgtatcagtttatttctagtataaatgggtacctgtaataatactgagctcttggaagcgaatcatgcatgcaattagctccctcctcctcacctactccactcccatctttatgacatttcaaatgtttatttggaaacaacagcctagatcactgttgaaggtgttcatggcatagttggagtctctgactgtttaaagaaatcacagaacagtacttttcttttagtgtttcattaagcctatgatgtaaaatgaaatgcttctgagcagtcttgtaatattgttcattcatattgacctgcatctcatcattgcatgttttatgttttcaaacatgccataaggaaaacgagtgcctgaactgcatgatttattagtttctctccactctgcattaaagtgctaatgatttatcggttctattttgttattgattcattcatctttctttgaataacaaatagcatttagtgattctgttgaacacaatcctgtgcatggatttatggatttcaagtgaaattgctataattttagttctttggtttgaaaactcaactgaatgctgttatatcaaatagctgctctcaagcaatgtgctataatggaagattacgtacaaagtgtattcttttagtgttcctggaacattggacggtaaatatcaatcaacaataagcttaattactttaaaaataaaagcttttgaataaaattaagacataatttagcattcccaggaaaattatgattacaattgcaaatttagtacagcaatcacttgcgctggtataaaataaaaaagttgtttggcagaagagtaatccagaccaaaagaaagaaagaaatctcaaaacagtaacaagtacattactgacataatgttacgtaacacacacattgattttttgtatctatggttgcaggtaataaatattttcacatgaattgacaaaattttctacaatgggcaggcaggctttgtgtcaaaaacatattttgaagccacaaattattttatgttcgctacaacatacaattatgtcttggctaccttttatagtatatagtttgaaggcagcaacagtttgtgaatcattcttaacaatctgtacagtagaaagctgttggatagacagtgggatgagacaaattaaacaacctgcttataagatttcaatgattgaaataatgggatgcagcttcacttcagtgtagctgtataactacaattagtgctaatagtggttacattttcagtcagatggattctttggtacccataataaatgttcaaataggaatccaatttgacttttctcaactcattttctaaatacactgatgtacttgccccttcaagtatactgcccctggggtttggaaagtagtttttaaaaacgtaacttgatgggtttgaaatcagagaagatattctcatcagttttatgacagcttcatatgaaaaatatatagtttaaggaaaattctatagtatattaaaatattgaatgatgaatgttgttagctttacaagatggaaacttctcttctatgtgtgcagataaattttcagctattgagtcgccctcttttaatataggagacataaagttttaagtggctgaaactcttaaatgtaaattaatgctggacttaacagcagtcagaaacaaagagggaaaagagacatgcactctgctaaacattgctaggcactgagttgatgagattccagagagacatttcagagtaaaccttgatatccacgcttctaagagataggaagggaggtatctacatagaaccagaaagtttaaaagacgtaaatttattttttccacttccttgtgtacaccatgtatttcatgtgaaaatgctgatcaatttattgtggtggaaggagatatcttgcaggaagtttaaaaattaacattttaaaacagtttttattttatttaaaacaggttcatgtgatcatagccagaataaaacaaaaggctcagatgtttagcctagtctactgcagacagaaatttaaatccagtgagggctaatgaatcacatacgtgtttccacattttattttgttttcgttttttaggcatatgggaagtagttgcaatttttcagggaagaatatgttttgaatctcacactgtattctccttgaatctcacactgtattcttgaatgagacaagattttgagatcattcttttcctttttgtgtcaacgttagtttgttgttcattggttataaaaaggaaaatgtggccaggcgcaatggcttacgcctgtaatcccagcactttgggagacagaggcaggcagatcacaaggtcaggagttcaagaccagcctggccaatatggtgaaacctcgtctctactaaaaatacaaaaattagccaggcatggtggcacatgcctgtaatcccagctactcgggaggctgaggcagaagaattgcttgaactcgggaggctgcggttgcagtgagccaagatcacaccactgcactccagcctgggtgacagagccagactctgtctcaaaaaaaaaaaggaaaatgtacttttcatggcacgtataacccccaaaggattattcaatactgaacaattaaataataattgaataatattgaatcatgttctccgttatttttcaaataactgaataatatctctattaaaagattaaacccttgtaacatatattaaagctgtaaactttaagaaaataaataaataaaaccctgtaaaagagcttttattttgtgagaggcagaaatcaccacttaaaactcccaattaaattctgctatatttaaataaagtttgagtaaactcacatttgagagattctgtataaccttattgtgtttaaaaacatggaacttaattatagtaccttaattattttctcagaaatgatatatacaatatcctgttttttgaaataaaaacgttaaccactca

SEQ ID NO: 5519 - DNA, 5595 bp, Homo sapiens
  source 1..5595: mol_type = unassigned DNA; mol_type = unassigned DNA
ggaaaggatcctgagaactggctagtcccagttcctctccggaaaagcagtggctctcgcttcagagatgcgctcagctttcgcctgcatcacactgcattctttaacacattattgaaattacaagcatccaaagcagtttcatgtggacagattgcatattttgaaagcctgaggtattttatcatgaaacatgccatgtggaatctttgaagcatagacctctgcgcaacacctgaataaagaatcttttacctggtatgtgacagagcttctcaccaccaccatgacaaaccaggaaaaatgggcccacctcagcccttcggaattttcccaacttcagaaatatgctgagtattctacaaagaaattaaaggatgttcttgaagaattccatggtaatggtgtgcttgcaaagtataatcctgaagggaaacaagacattcttaaccaaacaatagattttgaaggtttcaaactattcatgaagacattcctggaagccgagcttcctgatgatttcactgcacaccttttcatgtcatttagcaacaagtttcctcattctagtccaatggtaaaaagtaagcctgctctcctatcaggcggtctgagaatgaataaaggtgccatcacccctccccggactacttctcctgcaaatacgtgttccccagaagtaatccatctgaaggacattgtctgttacctgtctctgcttgaaagaggaagacctgaggataagcttgagtttatgtttcgcctttatgacacggatgggaatggcttcctggacagctcggagctagaaaatatcatcagtcagatgatgcatgttgcagaataccttgagtgggatgtcactgaacttaatccaatcctccatgaaatgatggaagaaattgactatgatcatgatggaaccgtgtctctggaggaatggattcaaggaggaatgacaacgattccacttcttgtgctcctgggcttagaaaataacgtgaaggatgatggacagcacgtgtggcgactgaagcactttaacaaacctgcctattgcaacctttgcctgaacatgctgattggcgtggggaagcagggcctctgctgttccttctgcaagtacacagtccatgagcgctgtgtggctcgagcacctccctcttgcatcaagacctatgtgaagtccaaaaggaacactgatgtcatgcaccattactgggttgaaggtaactgcccaaccaagtgtgataagtgccacaaaactgttaaatgttaccagggcctgacaggactgcattgtgtttggtgtcagatcacactgcataataaatgtgcttctcatctaaaacctgaatgtgactgtggacctttgaaggaccatattttaccacccacaacaatctgtccagtggtactgactctgcccacttcaggagtttcagttcctgaggaaagacaatcaacagtgaaaaaggaaaagagtggttcccagcagccaaacaaagtgattgacaagaataaaatgcaaagagccaactctgttactgtagatggacaaggcctgcaggtcactcctgtgcctggtactcacccacttttagtttttgtgaaccccaaaagtggtggaaaacaaggagaacgaatttacagaaaattccagtatctattaaatcctcgtcaggtttacagtctttctggaaatggaccaatgccagggttaaactttttccgtgatgttcctgacttcagagtgttagcctgtggtggagatggaaccgtgggctgggttttggattgcatagaaaaggccaatgtaggcaagcatcctccagttgcgattctgcctcttgggactggcaatgatctagcaagatgcctgcgatggggaggaggttacgaaggtgagaatctgatgaaaattctaaaagacattgaaaacagcacagaaatcatgttggacaggtggaagtttgaagtcatacctaatgacaaagatgagaaaggagacccagtgccttacagtatcatcaataattacttttccattggcgtggatgcctccattgcacacagattccacatcatgagagaaaaacacccagagaaattcaacagtagaatgaagaacaaattttggtattttgagtttggcacatctgaaactttctcagccacctgcaagaagctacatgaatctgtagaaatagaatgtgatggagtacagatagatttaataaacatctctctggaaggaattgctattttgaatataccaagcatgcatggaggatccaatctttggggagagtctaagaaaagacgaagccatcgacgaatagagaaaaaagggtctgacaaaaggaccaccgtcacagatgccaaagagttgaagtttgcaagtcaagatctcagtgaccagctgctggaggtggtcggcttggaaggagccatggagatggggcaaatatacacaggcctgaaaagtgctggccggcggctggctcagtgctcctgcgtggtcatcaggacgagcaagtctctgccaatgcaaattgatggggagccatggatgcagaccccatgcacaataaaaattacacacaagaaccaagccccaatgctgatgggcccgcctccaaaaaccggtttattctgctccctcgtcaaaaggacaagaaaccgaagcaaggaataatcctgtgttgtttcactcttagaaattgaattagcataattgggccatggaacacatatgctggaaatctttgaaccatttcaagtctcctgctcatgcaaaatcatggaagtggtttaacagtttttgttactaagctaatgtaaaattcagctattagaaaatttattgtctcagtttttataggcatctttgcatgaagaaagcagaagtttacctgaagtgatactgcatatttttggtgcatgcattcccatagatttttacatctcccacccaactcttccccaatttccttttactaacctgtgagaaaaacccgtgaaacatgaaaaaggaaataccatgggaaacgtgattctcagtgtgattccaattattacgaagcactaatcagtaacgctacaatgatcataattgcagattgctatacgtttcccttttagaatcagtgtatcagtgacctatgacttgaggagaaacttttaattcgaagattttattaaatagttgactacaataccttgctatatatacatagtttttcttcaacatcttaactcttctgagtggaaataaaaatatcaggcataaggttttctcatgctgaaaaatagaacgcggtttttattttgcttagttttctttttaattccagaaataagtgaaaacatgttacttgacagtcaagtgtggtaatatggcaagccttgttcctttctgcatgagaatctaggagagaattcataaccacaccaataacgaaatagaagttttaaactatgtgcctaatcaatgtgtttcccaccaaagattcagaaaacaatgcttgagagaaatgggttaatgcataattaattaagcattgtggagcaaatttagggttcctgtgattaattttgtgatgactaaaatgctggaaagcgagtgagttgcccattaattatgattaaaattctcacctttcacagacagacaataagccagacaacacaatcaaagctcaatagatgatttcttgcttttttcagtcatttataaatataggtgtaatttttcatggatcagttaagtacacttgaaggaagtaaatgattgtatcagtttatttctagtataaatgggtacctgtaataatactgagctcttggaagcgaatcatgcatgcaattagctccctcctcctcacctactccactcccatctttatgacatttcaaatgtttatttggaaacaacagcctagatcactgttgaaggtgttcatggcatagttggagtctctgactgtttaaagaaatcacagaacagtacttttcttttagtgtttcattaagcctatgatgtaaaatgaaatgcttctgagcagtcttgtaatattgttcattcatattgacctgcatctcatcattgcatgttttatgttttcaaacatgccataaggaaaacgagtgcctgaactgcatgatttattagtttctctccactctgcattaaagtgctaatgatttatcggttctattttgttattgattcattcatctttctttgaataacaaatagcatttagtgattctgttgaacacaatcctgtgcatggatttatggatttcaagtgaaattgctataattttagttctttggtttgaaaactcaactgaatgctgttatatcaaatagctgctctcaagcaatgtgctataatggaagattacgtacaaagtgtattcttttagtgttcctggaacattggacggtaaatatcaatcaacaataagcttaattactttaaaaataaaagcttttgaataaaattaagacataatttagcattcccaggaaaattatgattacaattgcaaatttagtacagcaatcacttgcgctggtataaaataaaaaagttgtttggcagaagagtaatccagaccaaaagaaagaaagaaatctcaaaacagtaacaagtacattactgacataatgttacgtaacacacacattgattttttgtatctatggttgcaggtaataaatattttcacatgaattgacaaaattttctacaatgggcaggcaggctttgtgtcaaaaacatattttgaagccacaaattattttatgttcgctacaacatacaattatgtcttggctaccttttatagtatatagtttgaaggcagcaacagtttgtgaatcattcttaacaatctgtacagtagaaagctgttggatagacagtgggatgagacaaattaaacaacctgcttataagatttcaatgattgaaataatgggatgcagcttcacttcagtgtagctgtataactacaattagtgctaatagtggttacattttcagtcagatggattctttggtacccataataaatgttcaaataggaatccaatttgacttttctcaactcattttctaaatacactgatgtacttgccccttcaagtatactgcccctggggtttggaaagtagtttttaaaaacgtaacttgatgggtttgaaatcagagaagatattctcatcagttttatgacagcttcatatgaaaaatatatagtttaaggaaaattctatagtatattaaaatattgaatgatgaatgttgttagctttacaagatggaaacttctcttctatgtgtgcagataaattttcagctattgagtcgccctcttttaatataggagacataaagttttaagtggctgaaactcttaaatgtaaattaatgctggacttaacagcagtcagaaacaaagagggaaaagagacatgcactctgctaaacattgctaggcactgagttgatgagattccagagagacatttcagagtaaaccttgatatccacgcttctaagagataggaagggaggtatc

SEQ ID NO: 5520 - DNA, 3651 bp, Homo sapiens
  source 1..3651: mol_type = unassigned DNA; mol_type = unassigned DNA
atctttcagacactagttccaatgggccgggtgttctggaagggggtggcagtggggaggaggatgctgtgagcagagttcttgaagctccactcctctggggaagccgagctgtgtgggagccttcttactgtgccgggagcgtgtgaattggaaaggatcctgagaactggctagtcccagttcctctccggaaaagcagtggctctcgcttcagagatgcgctcagctttcgcctgcatcacactgcattctttaacacattattgaaattacaagcatccaaagcagtttcatgtggacagattgcatattttgaaagcctgaggtattttatcatgaaacatgccatgtggaatctttgaagcatagacctctgcgcaacacctgaataaagaatcttttacctggtatgtgacagagcttctcaccaccaccatgacaaaccaggaaaaatgggcccacctcagcccttcggaattttcccaacttcagaaatatgctgagtattctacaaagaaattaaaggatgttcttgaagaattccatggtaatggtgtgcttgcaaagtataatcctgaagggacaatagattttgaaggtttcaaactattcatgaagacattcctggaagccgagcttcctgatgatttcactgcacaccttttcatgtcatttagcaacaagtttcctcattctagtccaatggtaaaaagtaagcctgctctcctatcaggcggtctgagaatgaataaaggtgccatcacccctccccggactacttctcctgcaaatacgtgttccccagaagtaatccatctgaaggacattgtctgttacctgtctctgcttgaaagaggaagacctgaggataagcttgagtttatgtttcgcctttatgacacggatgggaatggcttcctggacagctcggagctagaaaatatcatcagtcagatgatgcatgttgcagaataccttgagtgggatgtcactgaacttaatccaatcctccatgaaatgatggaagaaattgactatgatcatgatggaaccgtgtctctggaggaatggattcaaggaggaatgacaacgattccacttcttgtgctcctgggcttagaaaataacgtgaaggatgatggacagcacgtgtggcgactgaagcactttaacaaacctgcctattgcaacctttgcctgaacatgctgattggcgtggggaagcagggcctctgctgttccttctgcaagtacacagtccatgagcgctgtgtggctcgagcacctccctcttgcatcaagacctatgtgaagtccaaaaggaacactgatgtcatgcaccattactgggttgaaggtaactgcccaaccaagtgtgataagtgccacaaaactgttaaatgttaccagggcctgacaggactgcattgtgtttggtgtcagatcacactgcataataaatgtgcttctcatctaaaacctgaatgtgactgtggacctttgaaggaccatattttaccacccacaacaatctgtccagtggtactgactctgcccacttcaggagtttcagttcctgaggaaagacaatcaacagtgaaaaaggaaaagagtggttcccagcagccaaacaaagtgattgacaagaataaaatgcaaagagccaactctgttactgtagatggacaaggcctgcaggtcactcctgtgcctggtactcacccacttttagtttttgtgaaccccaaaagtggtggaaaacaaggagaacgaatttacagaaaattccagtatctattaaatcctcgtcaggtttacagtctttctggaaatggaccaatgccagggttaaactttttccgtgatgttcctgacttcagagtgttagcctgtggtggagatggaaccgtgggctgggttttggattgcatagaaaaggccaatgtaggcaagcatcctccagttgcgattctgcctcttgggactggcaatgatctagcaagatgcctgcgatggggaggaggttacgaaggtgagaatctgatgaaaattctaaaagacattgaaaacagcacagaaatcatgttggacaggtggaagtttgaagtcatacctaatgacaaagatgagaaaggagacccagtgccttacagtatcatcaataattacttttccattggcgtggatgcctccattgcacacagattccacatcatgagagaaaaacacccagagaaattcaacagtagaatgaagaacaaattttggtattttgagtttggcacatctgaaactttctcagccacctgcaagaagctacatgaatctgtagaaatagaatgtgatggagtacagatagatttaataaacatctctctggaaggaattgctattttgaatataccaagcatgcatggaggatccaatctttggggagagtctaagaaaagacgaagccatcgacgaatagagaaaaaagggtctgacaaaaggaccaccgtcacagatgccaaagagttgaagtttgcaagtcaagatctcagtgaccagctgctggaggtggtcggcttggaaggagccatggagatggggcaaatatacacaggcctgaaaagtgctggccggcggctggctcagtgctcctgcgtggtcatcaggacgagcaagtctctgccaatgcaaattgatggggagccatggatgcagaccccatgcacaataaaaattacacacaagaaccaagccccaatgctgatgggcccgcctccaaaaaccggtttattctgctccctcgtcaaaaggacaagaaaccgaagcaaggaataatcctgtgttgtttcactcttagaaattgaattagcataattgggccatggaacacatatgctggaaatctttgaaccatttcaagtctcctgctcatgcaaaatcatggaagtggtttaacagtttttgttactaagctaatgtaaaattcagctattagaaaatttattgtctcagtttttataggcatctttgcatgaagaaagcagaagtttacctgaagtgatactgcatatttttggtgcatgcattcccatagatttttacatctcccacccaactcttccccaatttccttttactaacctgtgagaaaaacccgtgaaacatgaaaaaggaaataccatgggaaacgtgattctcagtgtgattccaattattacgaagcactaatcagtaacgctacaatgatcataattgcagattgctatacgtttcccttttagaatcagtgtatcagtgacctatgacttgaggagaaacttttaattcgaagattttattaaatagttgactacaataccttgctatatatacatagtttttcttcaacatcttaactcttctgagtggaaataaaaatatcaggcataaggttttctcatgctgaaaaatagaacgcggtttttattttgcttagttttctttttaattccagaaataagtgaaaacatgttacttgacagtcaagtgtggtaatatggcaagccttgttcctttctgcatgagaatctaggagagaattcataaccacaccaataacgaaatagaagttttaaactatgtgcctaatcaatgtgtttcccaccaaagattcagaaa

SEQ ID NO: 5521 - DNA, 567 bp, Homo sapiens
  source 1..567: mol_type = unassigned DNA; mol_type = unassigned DNA
gcactctgggtaaagccagctgccatgtcataaggagatcaagcagctccacagaaaagtcagcatggcaaggagctaaggctttctgccgatagcctctgagggactgaggcctccagccaacagccacgcaaatgagccatcatggaatcagatcagcccaagttaaaccttcagcttcttggtgatggcttacctgaatcatcatgacagactcagtcagagtcacctggccctgaatccttgacccacagaaactgtgagctaataaatgtgtgttgttttgagctgctaaacaaaaagatctcagtgaccagctgctggaggtggtcggcttggaaggagccatggagatggggcaaatatacacaggcctgaaaagtgctggccggcggctggctcagtgctcctgcgtggtcatcaggacgagcaagtctctgccaatgcaaattgatggggagccatggatgcagaccccatgcacaataaaaattacacacaagaaccaagccccaatgctgatgggcccgcctccaaaaaccggtttattctgctccctcgtcaaaa

SEQ ID NO: 5522 - DNA, 3257 bp, Homo sapiens
  source 1..3257: mol_type = unassigned DNA; mol_type = unassigned DNA
ggaatctttgaagcatagacctctgcgcaacacctgaataaagaatcttttacctggtatgtgacagagcttctcaccaccaccatgacaaaccaggaaaaatgggcccacctcagcccttcggaattttcccaacttcagaaatatgctgagtattctacaaagaaattaaaggatgttcttgaagaattccatggtaatggtgtgcttgcaaagtataatcctgaagggaaacaagacattcttaaccaaacaatagattttgaaggtttcaaactattcatgaagacattcctggaagccgagcttcctgatgatttcactgcacaccttttcatgtcatttagcaacaagtttcctcattctagtccaatggtaaaaagtaagcctgctctcctatcaggcggtctgagaatgaataaaggtgccatcacccctccccggactacttctcctgcaaatacgtgttccccagaagtaatccatctgaaggacattgtctgttacctgtctctgcttgaaagaggaagacctgaggataagcttgagtttatgtttcgcctttatgacacggatgggaatggcttcctggacagctcggagctagaaaatatcatcagtcagatgatgcatgttgcagaataccttgagtgggatgtcactgaacttaatccaatcctccatgaaatgatggaagaaattgactatgatcatgatggaaccgtgtctctggaggaatggattcaaggaggaatgacaacgattccacttcttgtgctcctgggcttagaaaataacgtgaaggatgatggacagcacgtgtggcgactgaagcactttaacaaacctgcctattgcaacctttgcctgaacatgctgattggcgtggggaagcagggcctctgctgttccttctgcaagtacacagtccatgagcgctgtgtggctcgagcacctccctcttgcatcaagacctatgtgaagtccaaaaggaacactgatgtcatgcaccattactgggttgaaggtaactgcccaaccaagtgtgataagtgccacaaaactgttaaatgttaccagggcctgacaggactgcattgtgtttggtgtcagatcacactgcataataaatgtgcttctcatctaaaacctgaatgtgactgtggacctttgaaggaccatattttaccacccacaacaatctgtccagtggtactgcagactctgcccacttcaggagtttcagttcctgaggaaagacaatcaacagtgaaaaaggaaaagagtggttcccagcagccaaacaaagtgattgacaagaataaaatgcaaagagccaactctgttactgtagatggacaaggcctgcaggtcactcctgtgcctggtactcacccacttttagtttttgtgaaccccaaaagtggtggaaaacaaggagaacgaatttacagaaaattccagtatctattaaatcctcgtcaggtttacagtctttctggaaatggaccaatgccagggttaaactttttccgtgatgttcctgacttcagagtgttagcctgtggtggagatggaaccgtgggctgggttttggattgcatagaaaaggccaatgtaggcaagcatcctccagttgcgattctgcctcttgggactggcaatgatctagcaagatgcctgcgatggggaggaggttacgaaggtgagaatctgatgaaaattctaaaagacattgaaaacagcacagaaatcatgttggacaggtggaagtttgaagtcatacctaatgacaaagatgagaaaggagacccagtgccttacagtatcatcaataattacttttccattggcgtggatgcctccattgcacacagattccacatcatgagagaaaaacacccagagaaattcaacagtagaatgaagaacaaattttggtattttgagtttggcacatctgaaactttctcagccacctgcaagaagctacatgaatctgtagaaatagaatgtgatggagtacagatagatttaataaacatctctctggaaggaattgctattttgaatataccaagcatgcatggaggatccaatctttggggagagtctaagaaaagacgaagccatcgacgaatagagaaaaaagggtctgacaaaaggaccaccgtcacagatgccaaagagttgaagtttgcaagtcaagatctcagtgaccagctgctggaggtggtcggcttggaaggagccatggagatggggcaaatatacacaggcctgaaaagtgctggccggcggctggctcagtgctcctgcgtggtcatcaggacgagcaagtctctgccaatgcaaattgatggggagccatggatgcagaccccatgcacagtgagtacagagtagttgatatgctatgtcaatctcagttttgctttcctctttgactaaataaccacaataactgatttttttctttatttcttttcaacctatcagcaaatagtctttttgttgttgttgttatgtgtgtgtcagagccactacatttaggttgtagacattatatacccttggcaatgatttagctcttgaatgtttgtgttagcctaagtataaatagatcttttaaatagatcaattataaaccatagatcaattataaactatggagctaaacaaaatattaataaaagtttatctgaaacttttttgtttatttcagagcacattattagaatattatttgcaagaaatgcagacctaagcttatatgtgaacttatttctcagcttttctatgcctccatttggggatttgagggctttcttctccataagaaaaaaatttctctccagtttctaccataattaattgtgttttccagaatgaggtattatttaaggcagacactgcccctctcaaaaaaaaatcagttttcatttgcatagtgaatattttattgcatttcaaaaacatgctaggaactgcttttggcactgggagtagacacatgaacaagaccaacagtgtaatttccttcaagttacttacattcctataatagaggaccgaataaataaacaactacatgataaatataacttcagactgtgagagttattaaaaaataaggtgaaatgatgataagaagctggattaggtgtggagaataaatactacttgagataagggagacctctttgaaaggacatagccaaaagcttagtataaaattaaaaaaaataaaaaaaaaa

SEQ ID NO: 5523 - DNA, 3174 bp, Homo sapiens
  source 1..3174: mol_type = unassigned DNA; mol_type = unassigned DNA
gaagtgggaggagtgagaggtggggaagggggacgccaaagatgactttcaggctccggaaacctacgtctttcagcctccgctgttttttagttgcaaatgatcagagacgggtgaactgcaggcagcctgtgttgctgcctggaagtagatttccatctttcagacactagttccaatgggccgggtgttctggaagggggtggcagtggggaggaggatgctgtgagcagagttcttgaagctccactcctctggggaagccgagctgtgtgggagccttcttactgtgccgggagcgtgtgaattggaaaggatcctgagaactggctagtcccagttcctctccggaaaagcagtggctctcgcttcagagatgcgctcagctttcgcctgcatcacactgcattctttaacacattattgaaattacaagcatccaaagcagtttcatgtggacagattgcatattttgaaagcctgaggtattttatcatgaaacatgccatgtggaatctttgaagcatagacctctgcgcaacacctgaataaagaatcttttacctggtatgtgacagagcttctcaccaccaccatgacaaaccaggaaaaatgggcccacctcagcccttcggaattttcccaacttcagaaatatgctgagtattctacaaagaaattaaaggatgttcttgaagaattccatggtaatggtgtgcttgcaaagtataatcctgaagggacaatagattttgaaggtttcaaactattcatgaagacattcctggaagccgagcttcctgatgatttcactgcacaccttttcatgtcatttagcaacaagtttcctcattctagtccaatggtaaaaagtaagcctgctctcctatcaggcggtctgagaatgaataaaggtgccatcacccctccccggactacttctcctgcaaatacgtgttccccagaagtaatccatctgaaggacattgtctgttacctgtctctgcttgaaagaggaagacctgaggataagcttgagtttatgtttcgcctttatgacacggatgggaatggcttcctggacagctcggagctagaaaatatcatcagtcagatgatgcatgttgcagaataccttgagtgggatgtcactgaacttaatccaatcctccatgaaatgatggaagaaattgactatgatcatgatggaaccgtgtctctggaggaatggattcaaggaggaatgacaacgattccacttcttgtgctcctgggcttagaaaataacgtgaaggatgatggacagcacgtgtggcgactgaagcactttaacaaacctgcctattgcaacctttgcctgaacatgctgattggcgtggggaagcagggcctctgctgttccttctgcaagtacacagtccatgagcgctgtgtggctcgagcacctccctcttgcatcaagacctatgtgaagtccaaaaggaacactgatgtcatgcaccattactgggttgaaggtaactgcccaaccaagtgtgataagtgccacaaaactgttaaatgttaccagggcctgacaggactgcattgtgtttggtgtcagatcacactgcataataaatgtgcttctcatctaaaacctgaatgtgactgtggacctttgaaggaccatattttaccacccacaacaatctgtccagtggtactgactctgcccacttcaggagtttcagttcctgaggaaagacaatcaacagtgaaaaaggaaaagagtggttcccagcagccaaacaaagtgattgacaagaataaaatgcaaagagccaactctgttactgtagatggacaaggcctgcaggtcactcctgtgcctggtactcacccacttttagtttttgtgaaccccaaaagtggtggaaaacaaggagaacgaatttacagaaaattccagtatctattaaatcctcgtcaggtttacagtctttctggaaatggaccaatgccagggttaaactttttccgtgatgttcctgacttcagagtgttagcctgtggtggagatggaaccgtgggctgggttttggattgcatagaaaaggccaatgtaggcaagcatcctccagttgcgattctgcctcttgggactggcaatgatctagcaagatgcctgcgatggggaggaggttacgaaggtgagaatctgatgaaaattctaaaagacattgaaaacagcacagaaatcatgttggacaggtggaagtttgaagtcatacctaatgacaaagatgagaaaggagacccagtgccttacagtatcatcaataattacttttccattggcgtggatgcctccattgcacacagattccacatcatgagagaaaaacacccagagaaattcaacagtagaatgaagaacaaattttggtattttgagtttggcacatctgaaactttctcagccacctgcaagaagctacatgaatctgtagaaatagaatgtgatggagtacagatagatttaataaacatctctctggaaggaattgctattttgaatataccaagcatgcatggaggatccaatctttggggagagtctaagaaaagacgaagccatcgacgaatagagaaaaaagggtctgacaaaaggaccaccgtcacagatgccaaagagttgaagtttgcaagtcaaggagtggagctctgtgcagctgaagactgcatatgacctcctgaatataggataaaaaaacctttggaaggagacaagatcattactccagagaatagccttgtgtagttgctgtcctactgaagtggagaaagggcatccaaatgttttgatcttgtttttatagttgcaagcagtgtctgtatctttccaaatacccaatcttgtcgtatatatctctctatgaaaaggaatttcaatgctacttaattttggtttagggggagatgggactgactttaattattcatttgaagcaaataaatgtttaaacatgagatacaatttaaaaattgatgaatggtgatggttttttaaatttggcgttttttttttttctatcagtagtaatagttactcaggcttatactcatgtcctcaatatataaggactgcttgtttcccactcagcatctagctataattatattctgtttgag

SEQ ID NO: 5524 - DNA, 674 bp, Homo sapiens
  source 1..674: mol_type = unassigned DNA; mol_type = unassigned DNA
tattcatgaagacattcctggaagccgagcttcctgatgatttcactgcacaccttttcatgtcatttagcaacaagtttcctcattctagtccaatggtaaaaagtaagcctgctctcctatcaggcggtctgagaatgaataaaggtgccatcacccctccccggactacttctcctgcaaatacgtgttccccagaagtaatccatctgaaggacattgtctgttacctgtctctgcttgaaagaggaagacctgaggataagcttgagtgaaagacaatcaacagtgaaaaaggaaaagagtggttcccagcagccaaacaaagtgattgacaagaataaaatgcaaagagccaactctgttactgtagatggacaaggcctgcaggtcactcctgtgcctggtactcacccacttttagtttttgtgaaccccaaaagtggtggaaaacaaggagaacgaatttacagaaaattccagtatctattaaatcctcgtcaggtttacagtctttctggaaatggaccaatgccagggttaaactttttccgtgatgttcctgacttcagagtgttagcctgtggtggagatggaaccgtgggctgggttttggattgcatagaaaaggccaatgtaggcaagcatcctccagttgcgattctgcctcttgg

SEQ ID NO: 5525 - DNA, 1959 bp, Homo sapiens
  source 1..1959: mol_type = unassigned DNA; mol_type = unassigned DNA
atctttcagacactagttccaatgggccgggtgttctggaagggggtggcagtggggaggaggatgctgtgagcagagttcttgaagctccactcctctggggaagccgagctgtgtgggagccttcttactgtgccgggagcgtgtgaattggaaaggatcctgagaactggctagtcccagttcctctccggaaaagcagtggctctcgcttcagagatgcgctcagctttcgcctgcatcacactgcattctttaacacattattgaaattacaagcatccaaagcagtttcatgtggacagattgcatattttgaaagcctgaggtattttatcatgaaacatgccatgtggaatctttgaagcatagacctctgcgcaacacctgaataaagaatcttttacctggtatgtgacagagcttctcaccaccaccatgacaaaccaggaaaaatgggcccacctcagcccttcggaattttcccaacttcagaaatatgctgagtattctacaaagaaattaaaggatgttcttgaagaattccatggtaatggtgtgcttgcaaagtataatcctgaagggaaacaagacattcttaaccaaacaatagattttgaaggtttcaaactattcatgaagacattcctggaagccgagcttcctgatgatttcactgcacaccttttcatgtcatttagcaacaagtttcctcattctagtccaatggtaaaaagtaagcctgctctcctatcaggcggtctgagaatgaataaaggtgccatcacccctccccggactacttctcctgcaaatacgtgttccccagaagtaatccatctgaaggacattgtctgttacctgtctctgcttgaaagaggaagacctgaggataagcttgagtttatgtttcgcctttatgacacggatgggaatggcttcctggacagctcggagctagaaaatatcatcagtcagatgatgcatgttgcagaataccttgagtgggatgtcactgaacttaatccaatcctccatgaaatgatggaagaaattgactatgatcatgatggaaccgtgtctctggaggaatggattcaaggaggaatgacaacgattccacttcttgtgctcctgggcttagaaaataacgtgaaggatgatggacagcacgtgtggcgactgaagcactttaacaaacctgcctattgcaacctttgcctgaacatgctgattggcgtggggaagcagggcctctgctgttccttctgcaagtacacagtccatgagcgctgtgtggctcgagcacctccctcttgcatcaagacctatgtgaagtccaaaaggaacactgatgtcatgcaccattactgggttgaaggtaactgcccaaccaagtgtgataagtgccacaaaactgttaaatgttaccagggcctgacaggactgcattgtgtttggtgtcagatcacactgcataataaatgtgcttctcatctaaaacctgaatgtgactgtggacctttgaaggaccatattttaccacccacaacaatctgtccagtggtactgactctgcccacttcaggagtttcagttcctgaggaaagacaatcaacagtgaaaaaggaaaagagtggttcccagcagccaaacaaagtgattgacaagaataaaatgcaaagagccaactctgttactgtagatggacaaggcctgcaggtatgattttttaaatcaaaattttagtaggtttcatatttgatacttctaggctctaaaggggcatatgttcagctatcaacacatttgtttaatctgcatattagcttagtagactctttcagaaagatctttattaatttatcaagatgtcagtcttacggttgattgacagagtaacattctggttaaattaatcatttatgattttatctccatttaaactcaaattggcaa

SEQ ID NO: 5526 - DNA, 582 bp, Homo sapiens
  source 1..582: mol_type = unassigned DNA; mol_type = unassigned DNA
aaagaactctccttcatctacaacagtcgtaggctatgtctagctgctgtaccgatcttacagagaatttggttattctatgcctaaaaaatataaatttctatgtagcctgtgtgttctctattttcttaatttgttttctgtttgagatcactgtaaataattaacaaaatataaagacaattttttttccaggtctgagaatgaataaaggtgccatcacccctccccggactacttctcctgcaaatacgtgttccccagaagtaatccatctgaaggacattgtctgttacctgtctctgcttgaaagaggaagacctgaggataagcttgagtttatgtttcgcctttatgacacggatgggaatggcttcctggacagctcggagctagaaaatatcatcagtcagatgatgcatgttgcagaataccttgagtgggatgtcactgaacttaatccaatcctccatgaaatgatggaagaaattgactatgatcatgatggaaccgtgtctctggaggaatggattcaaggaggaatgacaacgattccacttcttgtgctcctgggcttagaaa

SEQ ID NO: 5527 - DNA, 472 bp, Homo sapiens
  source 1..472: mol_type = unassigned DNA; mol_type = unassigned DNA
agttgcaaatgatcagagacgggtgaactgcaggcagcctgtgttgctgcctggaagtagatttccatctttcagacactagttccaatgggccgggtgttctggaagggggtggcagtggggaggaggatgctgtgagcagagttcttgaagctccactcctctggggaagccgagctgtgtgggagccttcttactgtgccgggagcgtgtgaattggaaaggatcctgagaactggctagtcccagttcctctccggaaaagcagtggctctcgcttcagagatgcgctcagctttcgcctgcatcacactgcaattctacaaagaaattaaaggatgttcttgaagaattccatggtaatggtgtgcttgcaaagtataatcctgaagggaaacaagacattcttaaccaaacaatagattttgaaggtttcaaactattcatgaagacattcctggaagccgagctt

SEQ ID NO: 5528 - DNA, 494 bp, Homo sapiens
  source 1..494: mol_type = unassigned DNA; mol_type = unassigned DNA
acataaattagtaccttactggctagggaatgttgaatcacagttggatgaagaaacaattcatgttaatgtttctctaaagttctttaacacattattgaaattacaagcatccaaagcagtttcatgtggacagattgcatattttgaaagcctgaggtattttatcatgaaacatgccatgtggaatctttgaagcatagacctctgcgcaacacctgaataaagaatcttttacctggtatgtgacagagcttctcaccaccaccatgacaaaccaggaaaaatgggcccacctcagcccttcggaattttcccaacttcagaaatatgctgagtattctacaaagaaattaaaggatgttcttgaagaattccatggtaatggtgtgcttgcaaagtataatcctgaagggaaacaagacattcttaaccaaacaatagattttgaaggtttcaaactattcatgaagacattcctggaagccgagctt

SEQ ID NO: 5529 - DNA, 558 bp, Homo sapiens
  source 1..558: mol_type = unassigned DNA; mol_type = unassigned DNA
gtctcattttcccctgagctccatcagcaagagtagcaatagcagctggagaagcggcagccagagataggcagggctggtgcttgcagccgcgcaaatcgcctcctcctcaacacacacacacacacacacacacacacacacacacacacactgcacagacttccaatatcaacgcgtcttgacataaatcaaggactaagagagactgaagaagagcgttagtcatggacaacagttctttaacacattattgaaattacaagcatccaaagcagtttcatgtggacagattgcatattttgaaagcctgaggtattttatcatgaaacatgccatgtggaatctttgaagcatagacctctgcgcaacacctgaataaagaatcttttacctggtatgtgacagagcttctcaccaccaccatgacaaaccaggaaaaatgggcccacctcagcccttcggaattttcccaacttcagaaatatgctgagtattctacaaagaaattaaaggatgttcttgaagaattccatgacaatagattttgaaggtttc

SEQ ID NO: 5530 - DNA, 6684 bp, Homo sapiens
  source 1..6684: mol_type = unassigned DNA; mol_type = unassigned DNA
ttctttaacacattattgaaattacaagcatccaaagcagtttcatgtggacagattgcatattttgaaagcctgaggtattttatcatgaaacatgccatgtggaatctttgaagcatagacctctgcgcaacacctgaataaagaatcttttacctggtatgtgacagagcttctcaccaccaccatgacaaaccaggaaaaatgggcccacctcagcccttcggaattttcccaacttcagaaatatgctgagtattctacaaagaaattaaaggatgttcttgaagaattccatggtaatggtgtgcttgcaaagtataatcctgaagggaaacaagacattcttaaccaaacaatagattttgaaggtttcaaactattcatgaagacattcctggaagccgagcttcctgatgatttcactgcacaccttttcatgtcatttagcaacaagtttcctcattctagtccaatggtaaaaagtaagcctgctctcctatcaggcggtctgagaatgaataaaggtgccatcacccctccccggactacttctcctgcaaatacgtgttccccagaagtaatccatctgaaggacattgtctgttacctgtctctgcttgaaagaggaagacctgaggataagcttgagtttatgtttcgcctttatgacacggatgggaatggcttcctggacagctcggagctagaaaatatcatcagtcagatgatgcatgttgcagaataccttgagtgggatgtcactgaacttaatccaatcctccatgaaatgatggaagaaattgactatgatcatgatggaaccgtgtctctggaggaatggattcaaggaggaatgacaacgattccacttcttgtgctcctgggcttagaaaataacgtgaaggatgatggacagcacgtgtggcgactgaagcactttaacaaacctgcctattgcaacctttgcctgaacatgctgattggcgtggggaagcagggcctctgctgttccttctgcaagtacacagtccatgagcgctgtgtggctcgagcacctccctcttgcatcaagacctatgtgaagtccaaaaggaacactgatgtcatgcaccattactgggttgaaggtaactgcccaaccaagtgtgataagtgccacaaaactgttaaatgttaccagggcctgacaggactgcattgtgtttggtgtcagatcacactgcataataaatgtgcttctcatctaaaacctgaatgtgactgtggacctttgaaggaccatattttaccacccacaacaatctgtccagtggtactgcagactctgcccacttcaggagtttcagttcctgaggaaagacaatcaacagtgaaaaaggaaaagagtggttcccagcagccaaacaaagtgattgacaagaataaaatgcaaagagccaactctgttactgtagatggacaaggcctgcaggtcactcctgtgcctggtactcacccacttttagtttttgtgaaccccaaaagtggtggaaaacaaggagaacgaatttacagaaaattccagtatctattaaatcctcgtcaggtttacagtctttctggaaatggaccaatgccagggttaaactttttccgtgatgttcctgacttcagagtgttagcctgtggtggagatggaaccgtgggctgggttttggattgcatagaaaaggccaatgtaggcaagcatcctccagttgcgattctgcctcttgggactggcaatgatctagcaagatgcctgcgatggggaggaggttacgaaggtgagaatctgatgaaaattctaaaagacattgaaaacagcacagaaatcatgttggacaggtggaagtttgaagtcatacctaatgacaaagatgagaaaggagacccagtgccttacagtatcatcaataattacttttccattggcgtggatgcctccattgcacacagattccacatcatgagagaaaaacacccagagaaattcaacagtagaatgaagaacaaattttggtattttgagtttggcacatctgaaactttctcagccacctgcaagaagctacatgaatctgtagaaatagaatgtgatggagtacagatagatttaataaacatctctctggaaggaattgctattttgaatataccaagcatgcatggaggatccaatctttggggagagtctaagaaaagacgaagccatcgacgaatagagaaaaaagggtctgacaaaaggaccaccgtcacagatgccaaagagttgaagtttgcaagtcaagatctcagtgaccagctgctggaggtggtcggcttggaaggagccatggagatggggcaaatatacacaggcctgaaaagtgctggccggcggctggctcagtgctcctgcgtggtcatcaggacgagcaagtctctgccaatgcaaattgatggggagccatggatgcagaccccatgcacaataaaaattacacacaagaaccaagccccaatgctgatgggcccgcctccaaaaaccggtttattctgctccctcgtcaaaaggacaagaaaccgaagcaaggaataatcctgtgttgtttcactcttagaaattgaattagcataattgggccatggaacacatatgctggaaatctttgaaccatttcaagtctcctgctcatgcaaaatcatggaagtggtttaacagtttttgttactaagctaatgtaaaattcagctattagaaaatttattgtctcagtttttataggcatctttgcatgaagaaagcagaagtttacctgaagtgatactgcatatttttggtgcatgcattcccatagatttttacatctcccacccaactcttccccaatttccttttactaacctgtgagaaaaacccgtgaaacatgaaaaaggaaataccatgggaaacgtgattctcagtgtgattccaattattacgaagcactaatcagtaacgctacaatgatcataattgcagattgctatacgtttcccttttagaatcagtgtatcagtgacctatgacttgaggagaaacttttaattcgaagattttattaaatagttgactacaataccttgctatatatacatagtttttcttcaacatcttaactcttctgagtggaaataaaaatatcaggcataaggttttctcatgctgaaaaatagaacgcggtttttattttgcttagttttctttttaattccagaaataagtgaaaacatgttacttgacagtcaagtgtggtaatatggcaagccttgttcctttctgcatgagaatctaggagagaattcataaccacaccaataacgaaatagaagttttaaactatgtgcctaatcaatgtgtttcccaccaaagattcagaaaacaatgcttgagagaaatgggttaatgcataattaattaagcattgtggagcaaatttagggttcctgtgattaattttgtgatgactaaaatgctggaaagcgagtgagttgcccattaattatgattaaaattctcacctttcacagacagacaataagccagacaacacaatcaaagctcaatagatgatttcttgcttttttcagtcatttataaatataggtgtaatttttcatggatcagttaagtacacttgaaggaagtaaatgattgtatcagtttatttctagtataaatgggtacctgtaataatactgagctcttggaagcgaatcatgcatgcaattagctccctcctcctcacctactccactcccatctttatgacatttcaaatgtttatttggaaacaacagcctagatcactgttgaaggtgttcatggcatagttggagtctctgactgtttaaagaaatcacagaacagtacttttcttttagtgtttcattaagcctatgatgtaaaatgaaatgcttctgagcagtcttgtaatattgttcattcatattgacctgcatctcatcattgcatgttttatgttttcaaacatgccataaggaaaacgagtgcctgaactgcatgatttattagtttctctccactctgcattaaagtgctaatgatttatcggttctattttgttattgattcattcatctttctttgaataacaaatagcatttagtgattctgttgaacacaatcctgtgcatggatttatggatttcaagtgaaattgctataattttagttctttggtttgaaaactcaactgaatgctgttatatcaaatagctgctctcaagcaatgtgctataatggaagattacgtacaaagtgtattcttttagtgttcctggaacattggacggtaaatatcaatcaacaataagcttaattactttaaaaataaaagcttttgaataaaattaagacataatttagcattcccaggaaaattatgattacaattgcaaatttagtacagcaatcacttgcgctggtataaaataaaaaagttgtttggcagaagagtaatccagaccaaaagaaagaaagaaatctcaaaacagtaacaagtacattactgacataatgttacgtaacacacacattgattttttgtatctatggttgcaggtaataaatattttcacatgaattgacaaaattttctacaatgggcaggcaggctttgtgtcaaaaacatattttgaagccacaaattattttatgttcgctacaacatacaattatgtcttggctaccttttatagtatatagtttgaaggcagcaacagtttgtgaatcattcttaacaatctgtacagtagaaagctgttggatagacagtgggatgagacaaattaaacaacctgcttataagatttcaatgattgaaataatgggatgcagcttcacttcagtgtagctgtataactacaattagtgctaatagtggttacattttcagtcagatggattctttggtacccataataaatgttcaaataggaatccaatttgacttttctcaactcattttctaaatacactgatgtacttgccccttcaagtatactgcccctggggtttggaaagtagtttttaaaaacgtaacttgatgggtttgaaatcagagaagatattctcatcagttttatgacagcttcatatgaaaaatatatagtttaaggaaaattctatagtatattaaaatattgaatgatgaatgttgttagctttacaagatggaaacttctcttctatgtgtgcagataaattttcagctattgagtcgccctcttttaatataggagacataaagttttaagtggctgaaactcttaaatgtaaattaatgctggacttaacagcagtcagaaacaaagagggaaaagagacatgcactctgctaaacattgctaggcactgagttgatgagattccagagagacatttcagagtaaaccttgatatccacgcttctaagagataggaagggaggtatctacatagaaccagaaagtttaaaagacgtaaatttattttttccacttccttgtgtacaccatgtatttcatgtgaaaatgctgatcaatttattgtggtggaaggagatatcttgcaggaagtttaaaaattaacattttaaaacagtttttattttatttaaaacaggttcatgtgatcatagccagaataaaacaaaaggctcagatgtttagcctagtctactgcagacagaaatttaaatccagtgagggctaatgaatcacatacgtgtttccacattttattttgttttcgttttttaggcatatgggaagtagttgcaatttttcagggaagaatatgttttgaatctcacactgtattctccttgaatctcacactgtattcttgaatgagacaagattttgagatcattcttttcctttttgtgtcaacgttagtttgttgttcattggttataaaaaggaaaatgtggccaggcgcaatggcttacgcctgtaatcccagcactttgggagacagaggcaggcagatcacaaggtcaggagttcaagaccagcctggccaatatggtgaaacctcgtctctactaaaaatacaaaaattagccaggcatggtggcacatgcctgtaatcccagctactcgggaggctgaggcagaagaattgcttgaactcgggaggctgcggttgcagtgagccaagatcacaccactgcactccagcctgggtgacagagccagactctgtctcaaaaaaaaaaaggaaaatgtacttttcatggcacgtataacccccaaaggattattcaatactgaacaattaaataataattgaataatattgaatcatgttctccgttatttttcaaataactgaataatatctctattaaaagattaaacccttgtaacatatattaaagctgtaaactttaagaaaataaataaataaaaccctgtaaaagagcttttattttgtgagaggcagaaatcaccacttaaaactcccaattaaattctgctatatttaaataaagtttgagtaaactcacatttgagagattctgtataaccttattgtgtttaaaaacatggaacttaattatagtaccttaattattttctcagaaatgatatatacaatatcctgttttttgaaataaaaacgttaaccactca

SEQ ID NO: 5531 - DNA, 4246 bp, Homo sapiens
  source 1..4246: mol_type = unassigned DNA; mol_type = unassigned DNA
tccccgcaggagtcggagaggatggcaggggccggaggccagcaccaccctccgggcgccgctggaggagcggccgccggagccggcgccgcggtcacctccgccgctgcctcggcggggccgggagaggattcgtctgacagcgaagcggagcaagagggaccccagaaactgatccgcaaagtgtctacctcggggcagatccggaccaagaccagtattaaagagggacagctattgaagcaaaccagttctttccaaaggtggaaaaagcgatacttcaaacttcgaggccgcaccctttactatgcaaaggactcaaagtctctgatatttgatgaagttgacctctcagatgctagtgtagctgaagcaagcacgaaaaatgctaacaacagcttcacgatcatcactccattcagaaggctaatgctgtgtgctgagaacagaaaggagatggaggattggatcagctcactgaagtctgtacagaccagagaaccctacgaggtggcccagtttaatgtggaacatttctcagggatgcacaactggtacgcctgctcccacgcccgacccaccttctgtaacgtgtgcagagagagtctttctggagtcacctcccatggcctgtcctgcgaagtgtgtaaattcaaggctcacaaaagatgtgcagtgagagcaacaaataactgtaaatggactaccctggcctccatcgggaaggacattatagaagatgaagatggcgtcgcgatgcctcaccagtggcttgagggcaacctgcctgtaagtgccaagtgtgctgtctgcgacaaaacatgtggcagtgttctccgtctacaggattggaaatgcctttggtgtaagacaatggtacacactgcctgcaaagatttataccatccaatatgtccacttggtcaatgtaaagtatctatcatacctccaattgcactaaacagcaccgattccgatggtttctgtagagcaacattttcgttctgtgttagtcctctattggtttttgtcaattctaagagtggagataatcagggagtaaagttcctccgtcgctttaaacagttgctaaatccggctcaggtgtttgatttaatgaatggaggtcctcatttaggtttaagattatttcagaagtttgacaatttccggattcttgtttgtggaggcgatggaagtgtaggttgggttttgtcagaaatcgataagctcaacttgaataaacagtgtcagctgggagtgttgcctttgggtacaggaaatgaccttgcccgagttcttggctggggaggttcatatgacgatgacacccaacttcctcagatcctagagaaactggaacgagccagtaccaaaatgttggacaggtggagtataatgacatatgaactcaaattgccaccaaaagcttccctacttccaggacctccagaagcatctgaagaattttatatgacgatttatgaagactcagttgcaacgcatcttacaaaaatcctcaattctgatgaacatgcagtggtcatatcttctgccaagacgctatgtgaaactgtaaaggacttcgttgccaaagtagaaaagacgtatgacaaaaccttggaaaatgccgttgtagctgatgccgtggccagtaaatgttcagtcctaaacgagaagctcgaacaactgctgcaggctttgcacacagattcccaggctgcgcctgttctccctggcctcagccctctcattgtggaagaagatgctgtggaatcgtccagtgaagagtccctgggtgaaagcaaagagcagcttggggatgacgttacaaaaccttcctcccagaaagccgtcaaaccaagggaaatcatgttgcgggcaaatagtttaaagaaagcagtgaggcaagtcattgaggaagccggaaaagttatggatgacccgacagttcacccctgtgaaccagctaatcagtcctctgattatgacagcacagaaacagatgaatctaaggaggaagctaaagatgatggtgccaaagaatcaataactgttaaaactgcacctcggtctccagatgcccgggcaagttatggccattcccaaactgattctgtccctggtccagctgtggcagccagcaaagaaaacctccctgtgctcaataccagaataatctgcccaggtttaagagcaggactggctgcctcaattgctgggagttcgattatcaacaaaatgttactggcaaacattgatccttttggtgccacgccgtttattgacccggatctagattccgtagatggatattcagaaaaatgtgtcatgaacaattactttgggattggattagatgcaaaaatttcattagaatttaataataaaagagaggagcaccctgaaaaatgcaggagccgaactaaaaacttgatgtggtatggagtccttggaacccgggagttattacagagatcgtacaagaatttagaacaaagggttcaacttgagtgtgatgggcagtatattcctcttcccagcttgcaaggcatagccgtgttgaacattcccagctatgctggaggcactaacttttggggtggaactaaagaggatgatatatttgctgcaccatcctttgatgacaagatcctggaagttgtagcaatatttgatagcatgcaaatggcagtttcaagggtcattaaactgcagcatcatcgaatagcccagtgccgtacagtgaaaatcactatatttggtgacgaaggagtcccagtgcaagtggatggtgaagcgtgggttcagcctccagggattatcaaaattgtgcacaaaaacagagcacaaatgctaacaagggacagagcctttgagagcactctgaaatcttgggaagataagcagaagtgtgattctggtaaaccagttctccgaacccatttgtacatccatcacgccattgacttggcaacagaagaggtgtcgcagatgcagctatgctcccaggctgcagaggagctcattactaggatatgtgacgcagccacaattcactgtcttttggagcaagaactggcccatgctgtgaatgcctgctcccatgccctgaataaagccaacccaaggtgcccggagagtcttacaagagacactgccactgaaatagccatcaatgtgaaggcgctgtataatgaaacagaatctttgctagttggcagggttcctttgcagctggaatcgccacatgaagagcgagtatccaatgccttacactctgtggaggtggaattacagaaactgacagagattccttggctttattatatcttacacccaaatgaggatgaggaacctcctatggattgcaccaaaaggaacaacagaagcaccgtatttcgaatagtgccaaagtttaaaaaggaaaaggttcagaagcagaagacaagttcacagcctgttcagaaatggggcacagaggaagttgctgcttggctggatctgctcaatttgggagagtacaaagatatcttcatccgtcatgacatcagaggggctgaacttttgcatctggaaaggcgagatcttaaggatctggggataccgaaagtgggtcatgtgaagcgaattctccagggaattaaagagcttggaaggagcactccacagtcggaggtgtaatcatattggtgctatttcttggaagagaagttattgccacttaatacaaagtccttggaagcaagtggctgttcttgtagttttctgcatagataagtaagcaccactgaagcacctctgtggcttgatattttgctgtgggtgaaattttgatttgaggtattagaaaatatttttgtgccgaacaatacattccacaaagccattttctttttgtgcaaacctgacatgttcaaatatattcacaatggtaataaggtaggaggaatctgagacgattgcattgtctaaacagtggaattgcaaaatgtttactttccatagatctggtctgatggaatgttcctactgtgcaactgcataacaatatgtggttaaaacttcctaggtttcattacgggggggcattggccattttcttaaaatcataggttaggagactaaaatataaattaagttgtgatttgaatgtagattggtatcacctccaactcctagtgcttagtggtcaaatatgttgaaaacctttccaatactatgaatgaatgcaaatcttaatgca

SEQ ID NO: 5532 - DNA, 17261 bp, Homo sapiens
  source 1..17261: mol_type = unassigned DNA; mol_type = unassigned DNA
tccccgcaggagtcggagaggatggcaggggccggaggccagcaccaccctccgggcgccgctggaggagcggccgccggagccggcgccgcggtcacctccgccgctgcctcggcggggccgggagaggattcgtctgacagcgaagcggagcaagagggaccccagaaactgatccgcaaagtgtctacctcggggcagatccggaccaagaccagtattaaagagggacagctattgaagcaaaccagttctttccaaaggtggaaaaagcgatacttcaaacttcgaggccgcaccctttactatgcaaaggactcaaagtctctgatatttgatgaagttgacctctcagatgctagtgtagctgaagcaagcacgaaaaatgctaacaacagcttcacgatcatcactccattcagaaggctaatgctgtgtgctgagaacagaaaggagatggaggattggatcagctcactgaagtctgtacagaccagagaaccctacgaggtggcccagtttaatgtggaacatttctcagggatgcacaactggtacgcctgctcccacgcccgacccaccttctgtaacgtgtgcagagagagtctttctggagtcacctcccatggcctgtcctgcgaagtgtgtaaattcaaggctcacaaaagatgtgcagtgagagcaacaaataactgtaaatggactaccctggcctccatcgggaaggacattatagaagatgaagatggcgtcgcgatgcctcaccagtggcttgagggcaacctgcctgtaagtgccaagtgtgctgtctgcgacaaaacatgtggcagtgttctccgtctacaggattggaaatgcctttggtgtaagacaatggtacacactgcctgcaaagatttataccatccaatatgtccacttggtcaatgtaaagtatctatcatacctccaattgcactaaacagcaccgattccgatggtttctgtagagcaacattttcgttctgtgttagtcctctattggtttttgtcaattctaagagtggagataatcagggagtaaagttcctccgtcgctttaaacagttgctaaatccggctcaggtgtttgatttaatgaatggaggtcctcatttaggtttaagattatttcagaagtttgacaatttccggattcttgtttgtggaggcgatggaagtgtaggttgggttttgtcagaaatcgataagctcaacttgaataaacagtgtcagctgggagtgttgcctttgggtacaggaaatgaccttgcccgagttcttggctggggaggttcatatgacgatgacacccaacttcctcagatcctagagaaactggaacgagccagtaccaaaatgttggacaggtggagtataatgacatatgaactcaaattgccaccaaaagcttccctacttccaggacctccagaagcatctgaagaattttatatgacgatttatgaagactcagttgcaacgcatcttacaaaaatcctcaattctgatgaacatgcagtggtcatatcttctgccaagacgctatgtgaaactgtaaaggacttcgttgccaaagtagaaaagacgtatgacaaaaccttggaaaatgccgttgtagctgatgccgtggccagtaaatgttcagtcctaaacgagaagctcgaacaactgctgcaggctttgcacacagattcccaggctgcgcctgttctccctggcctcagccctctcattgtggaagaagatgctgtggaatcgtccagtgaagagtccctgggtgaaagcaaagagcagcttggggatgacgttacaaaaccttcctcccagaaagccgtcaaaccaagggaaatcatgttgcgggcaaatagtttaaagaaagcagtgaggcaagtcattgaggaagccggaaaagttatggatgacccgacagttcacccctgtgaaccagctaatcagtcctctgattatgacagcacagaaacagatgaatctaaggaggaagctaaagatgatggtgccaaagaatcaataactgttaaaactgcacctcggtctccagatgcccgggcaagttatggccattcccaaactgattctgtccctggtccagctgtggcagccagcaaagaaaacctccctgtgctcaataccagaataatctgcccaggtttaagagcaggactggctgcctcaattgctgggagttcgattatcaacaaaatgttactggcaaacattgatccttttggtgccacgccgtttattgacccggatctagattccgtagatggatattcagaaaaatgtgtcatgaacaattactttgggattggattagatgcaaaaatttcattagaatttaataataaaagagaggagcaccctgaaaaatgcaggagccgaactaaaaacttgatgtggtatggagtccttggaacccgggagttattacagagatcgtacaagaatttagaacaaagggttcaacttgagtgtgatgggcagtatattcctcttcccagcttgcaaggcatagccgtgttgaacattcccagctatgctggaggcactaacttttggggtggaactaaagaggatgatatatttgctgcaccatcctttgatgacaagatcctggaagttgtagcaatatttgatagcatgcaaatggcagtttcaagggtcattaaactgcagcatcatcgaatagcccagtgccgtacagtgaaaatcactatatttggtgacgaaggagtcccagtgcaagtggatggtgaagcgtgggttcagcctccagggattatcaaaattgtgcacaaaaacagagcacaaatgctaacaagggacagagcctttgagagcactctgaaatcttgggaagataagcagaagtgtgattctggtaaaccagttctccgaacccatttgtacatccatcacgccattgacttggcaacagaagaggtgtcgcagatgcagctatgctcccaggctgcagaggagctcattactaggatatgtgacgcagccacaattcactgtcttttggagcaagaactggcccatgctgtgaatgcctgctcccatgccctgaataaagccaacccaaggtgcccggagagtcttacaagagacactgccactgaaatagccatcaatgtgaaggcgctgtataatgaaacagaatctttgctagttggcagggttcctttgcagctggaatcgccacatgaagagcgagtatccaatgccttacactctgtggaggtggaattacagaaactgacagagattccttggctttattatatcttacacccaaatgaggatgaggaacctcctatggattgcaccaaaaggaacaacagaagcaccgtatttcgaatagtgccaaagtttaaaaaggaaaaggttcagaagcagaagacaagttcacagcctggatctggggataccgaaagtgggtcatgtgaagcgaattctccagggaattaaagagcttggaaggagcactccacagtcggaggtgtaatcatattggtgctatttcttggaagagaagttattgccacttaatacaaagtccttggaagcaagtggctgttcttgtagttttctgcatagataagtaagcaccactgaagcacctctgtggcttgatattttgctgtgggtgaaattttgatttgaggtattagaaaatatttttgtgccgaacaatacattccacaaagccattttctttttgtgcaaacctgacatgttcaaatatattcacaatggtaataaggtaggaggaatctgagacgattgcattgtctaaacagtggaattgcaaaatgtttactttccatagatctggtctgatggaatgttcctactgtgcaactgcataacaatatgtggttaaaacttcctaggtttcattacgggggggcattggccattttcttaaaatcataggttaggagactaaaatataaattaagttgtgatttgaatgtagattggtatcacctccaactcctagtgcttagtggtcaaatatgttgaaaacctttccaatactatgaatgaatgcaaatcttaatgcacgatgttcctgcctgaaatgtctttctttttcttgcatgtcacatctaatactgtaacactttaaatagctttcatgtcagttttaatgttaatgggatttaatttattactaaagtacatttttgttggttaagggcactgcacttttctgttttttaatgtgggattttgcgtaaatattctgtacctaagactttgtgaaagtgtgtctgtgccataatcaacaaatgatatacatcacatgcaagtcaattttatttcaatctatcataagcagtaggcgtgcacgttaagaaaattctctggatattttcataaaattacatgctcccttacctgacaaaacttgttacagctttccaaaccaaaatttccacattttgtttctaatttttaatttcaatttaataattatttaatattctatttgaatttataatatagtaaagtgttgatatccaggaattccctgaggtgtcaactgagatttatatactgacagataacccagactcacccgctctctacagtgacttctgacacgatcttccaaacagaagggatttaaattttttcttaagggctttatgttgttattattattatctcacttaattcttaattcttatcaggtggatattattttcctttttctaaaccactgtacttcagtgtagcttattattagaagtcaacattacaatgatcaaatctttgaaagccaaaggcatacgtatcaaaaagtcacaaaaatatccttaaataagctttctttagccattatataccaaaacattaattataatattttaaaatttgtatataagagaaataaacagggtactgactcagtggtgacaatttttatgaagtagcctgctaggtgcttaatagatatatatacacacagatatatacatatacacatatatgtgtatatatacatacatacacatatacatttatatgtgtatatatatacctacatacatataaccttgtgatatggcatcattgatattttctagacaattatttccccagtgtttaaagagaaatactaataggcgagcatttaaaatgaactattgtcaggcatattatttaattacatcaaaggagtttaactgtttgacactttactcttgtttataacttgggtatttaactactagtaaaaatcacaaaattttaatgtctttaaaataaatgaccctgagggattcctgaccaagtatgtctgactatatattttacctaagttgtaaataaatggaaattttccaaagacagttatatcaagtagtttaaaaagtcatgaggcagggtgctgtggctcacgcctgtaatcccagcacttcgggaggtttaggtgggtagatcaccggaggtcaggagttcgagaccagcctgaccagtgtatgaaaccccatctctactaaaaatacaaaaattagccgggtgtggtggcacgcacctgtaatcccagctactcgggaggctgaggcaggagaattgcttgaacccaggagatggaggttgcagtgactgagatcacaccactgcactctactagcctgggtgacagagcaagactcccatctcaatctcaaaaaaaaatagtcatgaattatgcaattattctaattgtatctgcacttacgaagtcagaggtctcctttttcagtccctctgatagtcccacctaagtgctgtcctgctcctgtgaacactttcctgtgcaaccaaacaggaggtgccaggttcccagaactctctaacattacagatctctgtccatctttactaaaaaaaggaaatgtgagggaaagaaggggaagaactctagcataaataatgtattaatataaatatctatattgattttcaccccccattcccctttgctaatagaaaagagtctagctatgatgtgtcccaaatttaagagtgtgatgtgaaggactgaatttttgtttgttcgtttggtgagcttttcactcgtaggtgacatcttttgtatatgctgtaaagtctcagttaatggaatcctacagtgcatttctggctagctcggttggtagagcgtgagtctcttaatggaatccttaattagctagaattttcctgcaaatggctttggatgagggaaattctataaaatgacaatttggatatactttttgttaaatgagagcaattttctctgtatgctttgtctatgcatggctgtgcagggcccaaatgacttcactgacacctgtttccaggagggggtcttcagagcctccttaggctcttgtcagtatcataaataattcctcttcttatagcggatggggttaccaaaaaaaataaaaagtagggaagagcttctccatgggatcagatcacagctttggggagtgggatggggcctctatgctttgatctatgcatgagctggggtgagaagttcccacctgcacctgactgcaatgactgtaatggctggaattgtcacctcttctccctgataggctcttcctcacctggaggatcggggctggtgggagggcagggaaggggaggccatcagccagaatgtattttctttcagttccatttcctgaggaagaacttgcttttaaaggaggaaagggacagaatcagacctaaataaaattcctgagtatgcaatatttctctttagtgtctcttcacctccctttctgagtttctttcctacatcctggctcttcattttcccaatgcccaatataatcatggttgctgaaattctcactgccttctactttcctttccccatcaattaacccactacaaaatgacccctttcatttctcgcttaagcatacatggtgggtcatttaactaagtgttaggaagaaaacaatttaaagacactaattttacagtttgcgttctgtaaaaggatacttgctggataatctaagtgaattgatggattaggtcatttgggattgtgatatatattgttcttgctgacaagaaatgacccatgaatgtctagatctatcctgtccaatattgtagctacatgtggctatctaaatttaaatgtaatttaattaagccaggcataatggcacaagcctgtaattccggtgactcaggaggcttaggagggaagatggcttcaggccaggagtttgagaccagcctcggcaacatagtgagaccctgtctctgaaaaaaaatttttttaactagctaggcatggtggcatgcgcctgtagtcccagctattctgaaggctgaggtgggaggattgcttgagaccaggagttcaaggctgcagtgagccatgatcatgctactgccctccagcctgggcagcagagcaagacccctactctttaaaaaaattaatttaattagaaactccatttctcagttgcactaactacatttcaagtgttcagtaaccatagtggacagtgcagatgtagaaaatttccatcactgcaaaaattctattggacagcactggtgcagatcattgctactcaaaatgtgatccatgggccagcagcatcaatattacctgggagcttacagaaatgcagaatttcaggcccactgcagatctaccgaatcaaaatcttcctttagcaaaatttctcaaacgattagcactggcctacatccattttatccttccttagctattagggatgtgaggtccgagggcttcaaaaggtccccggaatagcttgttccttcatccactgtgtcctattcattcttcagctaactccagcaatgagctgaaactcattcatcacccttgctgagttttcttctcaatccttattcctaattctggttctagatgagccctacctacccagtggttgtatttttgtagccagtgtgggacacaggagattggcagaccaacacagctagcctctctctagccctccctccacctctaagtcactaacaatccatgtttgttcagtttgttgacatgtggcatgttcatttgttcacaacttaatcacgggggacatttcagaaaaatgtgtactaagttaaaaccatgtttagtctcctacaacttgtacattttcattttctcttatcagtagattgtccttgttgacatagctcatgcatgaggacacatagcagtacacacacattgaatgaattgttagtcatgcaaaaaaagaaaaggaatgaaccaagatgattgcaagttaatctcatttaagccctctaaaaaggcatgctttgctagatttagatctgttttccttacactcacttatcttgatgttcacatggttaataattccttaaaatagtgcctgaagaataatatttcatattcttgacccccaaataacagtttacttaattttataagatttttcccaatgagacttattttcaggaatccttctcttaataacttttacatattgatataatgtaccaaaacacaattgcctagagatgctttagctaatttttattaataaagaggacaatatttttgtcttcatggaacttatttttaacaggaatcaaggaagaaaatattcatgcagagctatgacttagaaagttataggggctgccactatacagcacttctaaagtaaaacatcttctatctccaactgggctgtcaacatagtggactttcatgttctatggatatgaattctttaaggatgtagcccttaattaagctgtaaaaacaatgcatctctcaaccttgacatttaggatctctcctgtctgccccctctacgccccactccaattaactcatcctacatctctcagatgtaagttggataagagtgggtttgaagtttggtaatacaagtggcagttttaaaacaccaaattctttagatcagctgaaaagaagagtgagaattgaaaattcctccactagtaattgttagccaatagaatagcctcccagagcagtccccacagcacttggttgccatgggtttctctcctctcactgcctgccccagtgccatgatgtctggggcttgtctcttctatggcatcccctgattgacttttgtatagcaacctctgtgtcaagtcagtaatatgatgccattgtaataggaggccttcctaaagaagtaactgcaacttttaaaacgtgatgattattggtttttataatacacaaagcattaattttttcttatcttattttctctttattatttctttccaacttttgtttggagacatttatgttagaagaaaaactataaagttttatcattgtagagaacagagagatcaaagacagctggactgtacctgtttgtgtaattatttctgatatttttaggaaaagaagtttaacagagtaactcagactgagactgttaaactctgttcatgataaactccatattacataatataggtgaacagattaattccctccatgtaactaagatactctatttacattatttatatactctcttagttttttatgcacttccaagttttagttggaaaaatgaaaaccaagctactacttaaaagttattaaaaacttcacataaaatatttcattttagctacaagttattcattgcataggattttataaatagtctgggtatttcataggaactgcatttcaaaagtgaattaaccaaacctaaaaaaagggttacttttaaaatgcattaaaataaagaagtttcatattcagttgataaggccattaaggtaggataatgcagttacatatacaaactaaaaaaggaaaaagaatatattttgtggtccttaatgtttgattgcactattgtttcccacagcttagccgtatctatttctgtataccaagtattaagctgatatgtagctaaatatttcttacagttctggtaactggtaactagtgctgtgaaaggttttggtattgtaacattcccagttttgtgagttatatattgtatattgaagatgactagtaaattcaagtaatatatttatctacagctgggaaaatataattattttcaaatcttcaagtaagttgtatcgaatgtttttcttcctcttaagtgagataaatctcacttttatgttaaaatgtctatttatacaacaggtttctccttttgctgttattttcatattaaaatttttcttatctttttatatcaaaataattatgctggctattcaaactgccaagatgtattttagtttgcaggatttttggcagacaaaatatttaataacaaatataaaagctttgtatattttgtggcattaggggcaagaattttacctttggatttctctatgtgaggcagtgctggtgtcagcaaagtcagtaacagacagtattacttgtaatcatcaaaagaaggtttccacaagttgtataaatcagtgcatttatttattatgttgtgaaacttaagctttatatgaaatacatattctagctcttttcctttttactgctgttgtttagagtgtgtagttctgttgatgatttacttatgtacttgaagtactcatttctgtcaaacagatgcccaactattttccttttaaaaaactgtattctttactgcaatagatagcggaatagtaatagacactttgttaaaaaaataagtttcatgtttaaaataaatatttttttaaaatataaagccaaaatgaattcaccaatattaaggatttaatgtagccaagggattcagtgtgttatattttgccaatatgtattttatcttcatgtcacaacttattttctgtagccaattctcagttttagttgaagagagatctcagtgattgtactgccaatatgacattcaaatgaacattaggaatcttgaaccatggctgagcgctgttgctcaggcctgtaatcccagcactttggaaagccgagggaggtagatcacctgaggtcaggagtttgagaccagcctggccaacttaatacaaaaattagccaggtgtggtggtgggtgcctgtaatcccagctactcaggaggctgaggcaggagaattgcttgaacccaggaggtggaggttgcagtgagccaagatctcgccactgcactccagcctgggcgacagagcgagactctgtctcagggggaaaaaaaagaattttgaaccccccaaaatatcacatatctagcagttctaggttccagggtggatatttttaacatatgtttgcatttggttctgggatagtaaccgttatggataattgtttgtttctgtcaagtcggtgagattttaattgtttgaattatttctatttaaaattactctcaatttaactgtttaaaaaactaaaaatttaaaacataatggcacaacatacgacacagaataaaacacatgttttcaaggaagaagaaaaaactgttttgacttaatgtgaagcaggggtttaccaaagaaaattgctttaataagccctaactttaactgttttcttctatgttacagtgttagcggttgatgtattgtgtactgtttaagaactcataggagactaataattaatttactataattttaaaggcaaagagttttatattaattttactgttgcacaagcagttattggaagtgggggaaaaaaagaaaactggtgagagaaattacatggaaattataggaaaaaggaacttgaattggtaatttggcaaagatttgggaacaaatagtttgaacatagatttctttcaccttatatgatagaaacacaaggcacacgtgagctgtatagtgtgctgagcacacccccagaaaacaaaaaatatcacattgatgaagtccgagactgtatctagatcttagcataactagtgaattcagggagcacatcctgctgctgaaattgagaagtcagtaagaaggtagttcagatgacctaatcattcaagacatttgatggagtccacacaagggtttatgatgtggggcaaatatctgtgctttctcatctcagtgattgatgtctggagaactagtcagacacacttagctggttcctatagaaaaacaccagtaaatgtggatcagaccataccctgcagaccaaggagattttcttaaacttgctaagcctttcttaaacttgccaagtattagcaatgataattgctaaatggattttttcctttcactgaaacaacaaaacaattattgaaattcacaatacctagagatgggaacatggtttaggtttatccagttctgtaactgactttggcattggctcattgtgtcctttctacaagttatgttttggtgacttggtgtccccagttagaaatggcacacaatattatcagttgttagtacttggtaacgtttcttttactaaaggaattatataagtatgaatcatacctaattttacaatttctttcccacggtcattttggatataaagatagacttcccagacagtgaggttagaaattagaagttcaaattgatatccctgatgtttaatttaaaaatgaaagtaaagttaaaattagtagcatttgtaccagagtagattatgggtattttcatctgttatattacatgttcatattattcattttaggataggccaaaactcacttctaaaatcttcaaaaattttgaatagtttcattttttcaatacttaagccaaatgacaattttatagatgtgaatatatgttttttaaagttaagtccttcatatcttttcttagtttaactccccaaagaggaaaatgtctctttaaaccagtagttaaaaagatggagtatgtgatgttcctttctctgtactgagttctgaatgtttaatccagagcatggatcactgactgcgttctctgactgtggaatggtattctttcatgcaaagtactttcaaaacttcccataaagaaactaaactagagattgtctttattaattaatggaactctgggtatgattaagggaattaaattagaaagtagaataacctagttaaaatcattatattagttatacatgagagtcagtgaacgatgacttgatttttacatgacatttgaattctgtcactatctgattcttgacctaaaggtttctttgctaaatctgatatttattatagtataatatgataatttggagctcctgttgcatctcactgccccaaaaatgttggaatgccatatgatacagggaaaagattggagttcatcaccgtggaattttgatctgtcttaatgacacaacttaattttcatgatgatagatctctgaatgattaatccagaatgatttggtacagtgactggaagaaattgtttttctgggaatttgcttcccataatgacctgatatacaggtgaccttagtataattgaaattaattataattttaattagaacatgctctgtttacagattataattgcgcagcattttaaaaaaatatacataattatgaggatgagagaattgcaaacttgaacagttcttttgttttctctccttttacttgaaaagctttcagaaagcttttgaaagatgacacagttttcatagcaacagtatgcaaattaggtttttctgccaagaaactcataaactaaagtatggaataacacaaatgcttaatcttaatcttggctttggattttgtaagcaaaagcattttctgcatcaatttttttcagtatgcagttgcatatttcattttttgattatgtcaaaagttgaattctcattttatgctgtgtttctcattagttgcagtaaagtgttgatttcattgctgcctttcaggccttcatcatacaaaccctcaccatttttcactcctgtgcttttgccataggtttttttttgtttttggtttttttccagcaactagtttttctactttcactctttcccaccagagtggtctctctaaaacaaatttgctaaagttcttaagtaggctcttttttctctaaattacagaatagcaaactaactcctaagcaagatgagtcagtgtctatgaccttgcctctttcttcctttttagtatcctcaccaaccttccctctgttgacttttgtaatccaggaatttggaactacttatgacttagtgccttggcataatcacatgccatagatgaacatgttcaagactcagttcaaatttaactttctgtgaagccctacctgacttccctaggcaggtattttctccatgcctatagtatattgaaactttttctgttaaaataacataacatttcaattacacacacacaacctgtctcttccactgaacttctctctccccctttgtattctcagtgtctagctacacataataggactttgataaatatttttgaatgaaggtaatagaaaacccgaacttctctatatttgtgtactttcacaaacaaaggcttagaattccacatgaaagtccacatgaggtaagtgtgcattcatgagcatgtgtgcactctgggcaaaccaacagaagataaacagcaaggaagagcagttgttttgtgaaaaataatcatctgttagctgtaaatcagaaatattggccaaatcagaattcttgtttctaaaatgaggcttctaaaattttcacataactgccaaactcttatttgtaattcttaaatatgccctaaagatcatctttctcttttatagacatttagtgtatacagtccacataaatacatatactgattacctacagacaataatgagacttcagaaagaatcaaaagcaatagtgatggtggaatttttaaataatattcagctggggggaaatagactgagtttgtgtgatttcaggttatttagagttattaatgtaaacataagaaggcttgtgactcttatcaccctctatagaatataaagactaaaaataaaaactattacctctgggcctgtttttctttgggattagataaagcctttctaccatatcaccaaatactcataaaggctaacacagaaagcttttccaagttaataatttctaaaattaaatatcagggccaggtgtggtggctgacacctgtaatcccagcactttgggaggccgaagtgggtggattacctgaggtcaggagctcgagacaagtcaacatggtgaaacctcatctctgctaaaaatacaaaaactagccaggcatggtgatgcacacctgtaatcccagctactcgggaggctgaggcaggagaattgcttgaacccaggaggcggaggttgcagtgagctgagattgcaccactgcactccagcctgggcgacagagtgagactctgtctcaaaaaaaagaaaaaaaatcaaaataattgtaattaactgaaatgccctgttccttcattcacttgatagacttttctacctgctctatacttggcactcaattagattctggggatacagataaaataagacaaagctcccatctggtagagtccaagtttgttttcacagttatttttccacagtctgtttaaggtattaggaggacttttataaaccgagtgtttttcaggttacttcagagaggagtctccttccacccaaaaaaactaaccaaattattttatcataaagaggtaatcccatttttatgtccacaatttttacatttttgtatcagccaccaataattttgactgttttgtcaagtacatatttcatcaatcctatttccacagccgtacatgtgatcccagtgactgatagatctgtagaatgtgaactcacatttaaagtttattttgggaaggcatatatgccttttgatgacacacacaccaaaatatataagagctgtgcatggtaaacccacagtagaagggaaaaagtaatgctttctggtatacttcagaggctccatttgaagatgtgcgttgatgtttccttgattattttgaatgaggagtaggcggtaatatttaacaggtagcatacgtatctaagcatatagtaaatattactagtacttgtgtgccatgaggcactaatacataggtgaaacaaaaatatttttagttctaaaaaattctctagatatttatggatggttaggcaatagggttccttcatgagaaggaaaaaactgtatctttattgtcagtaagtgtggaaaaaaacccgacttgtatgtgtattcacagtttgataggcatattttgaagtcattgttttccatcagtattaagtatcatccatttctatgttctctagcaaaagaaaattcttagtgtgatacagctttactctttgtttgactttgtacaaggtccacaaaaggaggaggctcaaaagattggacactttaccctgacattcagcacattcattttatctttcgataaagataaccagaaatcatttgcctcttgtttattatcatgttgaaaacacaacagtatagttccttttgtcccttacattggaaaaggtattttaaatttagccttgccgtattatttatagttaggaatttactacattttggtagtctgttttgaaactaagcacttgtgtctgaaagatgcagataatatctatctatttattacacagtgggctctgtttgctgcagaaaagagtgaaacttttaactgcttagcacacttgccagtgaaatatacctgacagagcagaggttataactttggctctaattacttttagtaatggtaagacaacgtgagttttgtttgtttacatgctgtttacaatggcataattttaaaaatatatacaattgagatatttattgcctactattttaaagatgttttatgtgttttcacctttggaatatattgttacatttccttgtacagataattttggtggctttgttaatgtagctagtaatttttatgactactaagtgaccagttttcggtgccttttattgtgggatgcatgattatgtatttattgtacggaagtcactgacgtgtgtatttttgtactttgctgaaagtaatggttgatcctgatgtacatgatgatgaaagacatctttcccaaagggcactgccttgagatcatccttctcaaataaaaagaatgcatttgaagaaa

SEQ ID NO: 5533 - DNA, 777 bp, Homo sapiens
  source 1..777: mol_type = unassigned DNA; mol_type = unassigned DNA
gcggccgccggagccggcgccgcggtcacctccgccgctgcctcggcggggccgggagaggattcgtctgacagcgaagcggagcaagagggaccccagaaactgatccgcaaagtgtctacctcggggcagatccggaccaagggtttcatcatgttggccaggctggtcacttctgagctcaagtgatccgcccacctgggcctcccaaagtgctgggattacaggtgtgagccaccgcgcccagccgaaaacaatacaattgtgaagcagttctacaccatgttcgtagcagcgttattcataggagccaaaaagtggaagcaacccaactgttcactgatggatgaatggataaacaaaatgtggcacacacatataataatgggacattattcagccttgaactggagggaaattctgacaggtcactgtgaggtgaaaggtcgcattttcaggtgtcagggaatctttactgcaatttgctgacattattgaacaccaccacatttagcatattttcacataacaaaaaacactacatgtatgtacttaacattttatagggtcgatcttccttattcatggtttcagtatttgctaatttacctactcactaacatttatttgtgactccaaaatcaatacttgtatgtaatttttcacatgtgaaaaattggagttgcccaatgtgcacattcgcagctaaggttgaacctggctgtgctctgtcttcttgttttagctctcatgcaataaacaagcaccctttcatga

SEQ ID NO: 5534 - DNA, 3449 bp, Homo sapiens
  source 1..3449: mol_type = unassigned DNA; mol_type = unassigned DNA
attattagaaatctttagtcatctcattccctgtgagctgaaaggggccttcaagaagagagttctcagagcagactcagctttaggtgctgaaatgaatttctcaagatcatcactccattcagaaggctaatgctgtgtgctgagaacagaaaggagatggaggattggatcagctcactgaagtctgtacagaccagagaaccctacgaggtggcccagtttaatgtggaacatttctcagggatgcacaactggtacgcctgctcccacgcccgacccaccttctgtaacgtgtgcagagagagtctttctggagtcacctcccatggcctgtcctgcgaagtgtgtaaattcaaggctcacaaaagatgtgcagtgagagcaacaaataactgtaaatggactaccctggcctccatcgggaaggacattatagaagatgaagatggcgtcgcgatgcctcaccagtggcttgagggcaacctgcctgtaagtgccaagtgtgctgtctgcgacaaaacatgtggcagtgttctccgtctacaggattggaaatgcctttggtgtaagacaatggtacacactgcctgcaaagatttataccatccaatatgtccacttggtcaatgtaaagtatctatcatacctccaattgcactaaacagcaccgattccgatggtttctgtagagcaacattttcgttctgtgttagtcctctattggtttttgtcaattctaagagtggagataatcagggagtaaagttcctccgtcgctttaaacagttgctaaatccggctcaggtgtttgatttaatgaatggaggtcctcatttaggtttaagattatttcagaagtttgacaatttccggattcttgtttgtggaggcgatggaagtgtaggttgggttttgtcagaaatcgataagctcaacttgaataaacagtgtcagctgggagtgttgcctttgggtacaggaaatgaccttgcccgagttcttggctggggaggttcatatgacgatgacacccaacttcctcagatcctagagaaactggaacgagccagtaccaaaatgttggacaggtggagtataatgacatatgaactcaaattgccaccaaaagcttccctacttccaggacctccagaagcatctgaagaattttatatgacgatttatgaagactcagttgcaacgcatcttacaaaaatcctcaattctgatgaacatgcagtggtcatatcttctgccaagacgctatgtgaaactgtaaaggacttcgttgccaaagtagaaaagacgtatgacaaaaccttggaaaatgccgttgtagctgatgccgtggccagtaaatgttcagtcctaaacgagaagctcgaacaactgctgcaggctttgcacacagattcccaggctgcgcctgttctccctggcctcagccctctcattgtggaagaagatgctgtggaatcgtccagtgaagagtccctgggtgaaagcaaagagcagcttggggatgacgttacaaaaccttcctcccagaaagccgtcaaaccaagggaaatcatgttgcgggcaaatagtttaaagaaagcagtgaggcaagtcattgaggaagccggaaaagttatggatgacccgacagttcacccctgtgaaccagctaatcagtcctctgattatgacagcacagaaacagatgaatctaaggaggaagctaaagatgatggtgccaaagaatcaataactgttaaaactgcacctcggtctccagatgcccgggcaagttatggccattcccaaactgattctgtccctggtccagctgtggcagccagcaaagaaaacctccctgtgctcaataccagaataatctgcccaggtttaagagcaggactggctgcctcaattgctgggagttcgattatcaacaaaatgttactggcaaacattgatccttttggtgccacgccgtttattgacccggatctagattccgtagatggatattcagaaaaatgtgtcatgaacaattactttgggattggattagatgcaaaaatttcattagaatttaataataaaagagaggagcaccctgaaaaatgcaggagccgaactaaaaacttgatgtggtatggagtccttggaacccgggagttattacagagatcgtacaagaatttagaacaaagggttcaacttgagtgtgatgggcagtatattcctcttcccagcttgcaaggcatagccgtgttgaacattcccagctatgctggaggcactaacttttggggtggaactaaagaggatgatatatttgctgcaccatcctttgatgacaagatcctggaagttgtagcaatatttgatagcatgcaaatggcagtttcaagggtcattaaactgcagcatcatcgaatagcccagtgccgtacagtgaaaatcactatatttggtgacgaaggagtcccagtgcaagtggatggtgaagcgtgggttcagcctccagggattatcaaaattgtgcacaaaaacagagcacaaatgctaacaagggacagagcctttgagagcactctgaaatcttgggaagataagcagaagtgtgattctggtaaaccagttctccgaacccatttgtacatccatcacgccattgacttggcaacagaagaggtgtcgcagatgcagctatgctcccaggctgcagaggagctcattactaggatatgtgacgcagccacaattcactgtcttttggagcaagaactggcccatgctgtgaatgcctgctcccatgccctgaataaagccaacccaaggtgcccggagagtcttacaagagacactgccactgaaatagccatcaatgtgaaggcgctgtataatgaaacagaatctttgctagttggcagggttcctttgcagctggaatcgccacatgaagagcgagtatccaatgccttacactctgtggaggtggaattacagaaactgacagagattccttggctttattatatcttacacccaaatgaggatgaggaacctcctatggattgcaccaaaaggaacaacagaagcaccgtatttcgaatagtgccaaagtttaaaaaggaaaaggttcagaagcagaagacaagttcacagcctgttcagaaatggggcacagaggaagttgctgcttggctggatctgctcaatttgggagagtacaaagatatcttcatccgtcatgacatcagaggggctgaacttttgcatctggaaaggcgagatcttaaggatctggggataccgaaagtgggtcatgtgaagcgaattctccagggaattaaagagcttggaaggagcactccacagtcggaggtgtaatcatattggtgctatttcttggaagagaagttattgccacttaatacaaagtccttggaagc

SEQ ID NO: 5535 - DNA, 3517 bp, Homo sapiens
  source 1..3517: mol_type = unassigned DNA; mol_type = unassigned DNA
gagctgaaaggggccttcaagaagagagttctcagagcagactcagctttaggtgctgaaatgaatttctcaagatcatcactccattcagaaggctaatgctgtgtgctgagaacagaaaggagatggaggattggatcagctcactgaagtctgtacagaccagagaaccctacgaggtggcccagtttaatgtggaacatttctcagggatgcacaactggtacgcctgctcccacgcccgacccaccttctgtaacgtgtgcagagagagtctttctggagtcacctcccatggcctgtcctgcgaagtgtgtaaattcaaggctcacaaaagatgtgcagtgagagcaacaaataactgtaaatggactaccctggcctccatcgggaaggacattatagaagatgaagatggcgtcgcgatgcctcaccagtggcttgagggcaacctgcctgtaagtgccaagtgtgctgtctgcgacaaaacatgtggcagtgttctccgtctacaggattggaaatgcctttggtgtaagacaatggtacacactgcctgcaaagatttataccatccaatatgtccacttggtcaatgtaaagtatctatcatacctccaattgcactaaacagcaccgattccgatggtttctgtagagcaacattttcgttctgtgttagtcctctattggtttttgtcaattctaagagtggagataatcagggagtaaagttcctccgtcgctttaaacagttgctaaatccggctcaggtgtttgatttaatgaatggaggtcctcatttaggtttaagattatttcagaagtttgacaatttccggattcttgtttgtggaggcgatggaagtgtaggttgggttttgtcagaaatcgataagctcaacttgaataaacagtgtcagctgggagtgttgcctttgggtacaggaaatgaccttgcccgagttcttggctggggaggttcatatgacgatgacacccaacttcctcagatcctagagaaactggaacgagccagtaccaaaatgttggacaggtggagtataatgacatatgaactcaaattgccaccaaaagcttccctacttccaggacctccagaagcatctgaagaattttatatgacgatttatgaagactcagttgcaacgcatcttacaaaaatcctcaattctgatgaacatgcagtggtcatatcttctgccaagacgctatgtgaaactgtaaaggacttcgttgccaaagtagaaaagacgtatgacaaaaccttggaaaatgccgttgtagctgatgccgtggccagtaaatgttcagtcctaaacgagaagctcgaacaactgctgcaggctttgcacacagattcccaggctgcgcctgttctccctggcctcagccctctcattgtggaagaagatgctgtggaatcgtccagtgaagagtccctgggtgaaagcaaagagcagcttggggatgacgttacaaaaccttcctcccagaaagccgtcaaaccaagggaaatcatgttgcgggcaaatagtttaaagaaagcagtgaggcaagtcattgaggaagccggaaaagttatggatgacccgacagttcacccctgtgaaccagctaatcagtcctctgattatgacagcacagaaacagatgaatctaaggaggaagctaaagatgatggtgccaaagaatcaataactgttaaaactgcacctcggtctccagatgcccgggcaagttatggccattcccaaactgattctgtccctggtccagctgtggcagccagcaaagaaaacctccctgtgctcaataccagaataatctgcccaggtttaagagcaggactggctgcctcaattgctgggagttcgattatcaacaaaatgttactggcaaacattgatccttttggtgccacgccgtttattgacccggatctagattccgtagatggatattcagaaaaatgtgtcatgaacaattactttgggattggattagatgcaaaaatttcattagaatttaataataaaagagaggagcaccctgaaaaatgcaggagccgaactaaaaacttgatgtggtatggagtccttggaacccgggagttattacagagatcgtacaagaatttagaacaaagggttcaacttgagtgtgatgggcagtatattcctcttcccagcttgcaaggcatagccgtgttgaacattcccagctatgctggaggcactaacttttggggtggaactaaagaggatgatatatttgctgcaccatcctttgatgacaagatcctggaagttgtagcaatatttgatagcatgcaaatggcagtttcaagggtcattaaactgcagcatcatcgaatagcccagtgccgtacagtgaaaatcactatatttggtgacgaaggagtcccagtgcaagtggatggtgaagcgtgggttcagcctccagggattatcaaaattgtgcacaaaaacagagcacaaatgctaacaagggacagagcctttgagagcactctgaaatcttgggaagataagcagaagtgtgattctggtaaaccagttctccgaacccatttgtacatccatcacgccattgacttggcaacagaagaggtgtcgcagatgcagctatgctcccaggctgcagaggagctcattactaggatatgtgacgcagccacaattcactgtcttttggagcaagaactggcccatgctgtgaatgcctgctcccatgccctgaataaagccaacccaaggtgcccggagagtcttacaagagacactgccactgaaatagccatcaatgtgaaggcgctgtataatgaaacagaatctttgctagttggcagggttcctttgcagctggaatcgccacatgaagagcgagtatccaatgccttacactctgtggaggtggaattacagaaactgacagagattccttggctttattatatcttacacccaaatgaggatgaggaacctcctatggattgcaccaaaaggaacaacagaagcaccgtatttcgaatagtgccaaagtttaaaaaggaaaaggttcagaagcagaagacaagttcacagcctgcactgccgctgcactctgttttgcatcttctttggccaacctttgctttgtaatgcattgagcatgtagaaattaagggggttttgctcttaactttggtagttcagaaatggggcacagaggaagttgctgcttggctggatctgctcaatttgggagagtacaaagatatcttcatccgtcatgacatcagaggggctgaacttttgcatctggaaaggcgagatcttaaggatctggggataccgaaagtgggtcatgtgaagcgaattctccagggaattaaagagcttggaaggagcactccacagtcggaggtgtaatcatattggtgctatttcttggaagagaagttattgccacttaatacaaagtccttggaagc

SEQ ID NO: 5536 - DNA, 3045 bp, Homo sapiens
  source 1..3045: mol_type = unassigned DNA; mol_type = unassigned DNA
aaaggggccttcaagaagagagttctcagagcagactcagctttaggtgctgaaatgaatttctcaagatcatcactccattcagaaggctaatgctgtgtgctgagaacagaaaggagatggaggattggatcagctcactgaagtctgtacagaccagagaaccctacgaggtggcccagtttaatgtggaacatttctcagggatgcacaactggtacgcctgctcccacgcccgacccaccttctgtaacgtgtgcagagagagtctttctggagtcacctcccatggcctgtcctgcgaaggtacacactgcctgcaaagatttataccatccaatatgtccacttggtcaatgtaaagtatctatcatacctccaattgcactaaacagcaccgattccgatggtttctgtagagcaacattttcgttctgtgttagtcctctattggtttttgtcaattctaagagtggagataatcagggagtaaagttcctccgtcgctttaaacagttgctaaatccggctcaggtgtttgatttaatgaatggaggtcctcatttaggtttaagattatttcagaagtttgacaatttccggattcttgtttgtggaggcgatggaagtgtaggttgggttttgtcagaaatcgataagctcaacttgaataaacagtgtcagctgggagtgttgcctttgggtacaggaaatgaccttgcccgagttcttggctggggaggttcatatgacgatgacacccaacttcctcagatcctagagaaactggaacgagccagtaccaaaatgttggacaggtggagtataatgacatatgaactcaaattgccaccaaaagcttccctacttccaggacctccagaagcatctgaagaattttatatgacgatttatgaagactcagttgcaacgcatcttacaaaaatcctcaattctgatgaacatgcagtggtcatatcttctgccaagacgctatgtgaaactgtaaaggacttcgttgccaaagtagaaaagacgtatgacaaaaccttggaaaatgccgttgtagctgatgccgtggccagtaaatgttcagtcctaaacgagaagctcgaacaactgctgcaggctttgcacacagattcccaggctgcgcctgttctccctggcctcagccctctcattgtggaagaagatgctgtggaatcgtccagtgaagagtccctgggtgaaagcaaagagcagcttggggatgacgttacaaaaccttcctcccagaaagccgtcaaaccaagggaaatcatgttgcgggcaaatagtttaaagaaagcagtgaggcaagtcattgaggaagccggaaaagttatggatgacccgacagttcacccctgtgaaccagctaatcagtcctctgattatgacagcacagaaacagatgaatctaaggaggaagctaaagatgatggtgccaaagaatcaataactgttaaaactgcacctcggtctccagatgcccgggcaagttatggccattcccaaactgattctgtccctggtccagctgtggcagccagcaaagaaaacctccctgtgctcaataccagaataatctgcccaggtttaagagcaggactggctgcctcaattgctgggagttcgattatcaacaaaatgttactggcaaacattgatccttttggtgccacgccgtttattgacccggatctagattccgtagatggatattcagaaaaatgtgtcatgaacaattactttgggattggattagatgcaaaaatttcattagaatttaataataaaagagaggagcaccctgaaaaatgcaggagccgaactaaaaacttgatgtggtatggagtccttggaacccgggagttattacagagatcgtacaagaatttagaacaaagggttcaacttgagtgtgatgggcagtatattcctcttcccagcttgcaaggcatagccgtgttgaacattcccagctatgctggaggcactaacttttggggtggaactaaagaggatgatatatttgctgcaccatcctttgatgacaagatcctggaagttgtagcaatatttgatagcatgcaaatggcagtttcaagggtcattaaactgcagcatcatcgaatagcccagtgccgtacagtgaaaatcactatatttggtgacgaaggagtcccagtgcaagtggatggtgaagcgtgggttcagcctccagggattatcaaaattgtgcacaaaaacagagcacaaatgctaacaagggacagagcctttgagagcactctgaaatcttgggaagataagcagaagtgtgattctggtaaaccagttctccgaacccatttgtacatccatcacgccattgacttggcaacagaagaggtgtcgcagatgcagctatgctcccaggctgcagaggagctcattactaggatatgtgacgcagccacaattcactgtcttttggagcaagaactggcccatgctgtgaatgcctgctcccatgccctgaataaagccaacccaaggtgcccggagagtcttacaagagacactgccactgaaatagccatcaatgtgaaggcgctgtataatgaaacagaatctttgctagttggcagggttcctttgcagctggaatcgccacatgaagagcgagtatccaatgccttacactctgtggaggtggaattacagaaactgacagagattccttggctttattatatcttacacccaaatgaggatgaggaacctcctatggattgcaccaaaaggaacaacagaagcaccgtatttcgaatagtgccaaagtttaaaaaggaaaaggttcagaagcagaagacaagttcacagcctggatctggggataccgaaagtgggtcatgtgaagcgaattctccagggaattaaagagcttggaaggagcactccacagtcggaggtgtaatcatattggtgctatttcttggaagagaagttattgccacttaatacaaagtccttggaagc

SEQ ID NO: 5537 - DNA, 3957 bp, Homo sapiens
  source 1..3957: mol_type = unassigned DNA; mol_type = unassigned DNA
ggggccttcaagaagagagttctcagagcagactcagctttaggtgctgaaatgaatttctcaagatcatcactccattcagaaggctaatgctgtgtgctgagaacagaaaggagatggaggattggatcagctcactgaagtctgtacagaccagagaaccctacgaggtggcccagtttaatgtggaacatttctcagggatgcacaactggtacgcctgctcccacgcccgacccaccttctgtaacgtgtgcagagagagtctttctggagtcacctcccatggcctgtcctgcgaagtgtgtaaattcaaggctcacaaaagatgtgcagtgagagcaacaaataactgtaaatggactaccctggcctccatcgggaaggacattatagaagatgaagatggcgtcgcgatgcctcaccagtggcttgagggcaacctgcctgtaagtgccaagtgtgctgtctgcgacaaaacatgtggcagtgttctccgtctacaggattggaaatgcctttggtgtaagacaatggtacacactgcctgcaaagatttataccatccaatatgtccacttggtcaatgtaaagtatctatcatacctccaattgcactaaacagcaccgattccgatggtttctgtagagcaacattttcgttctgtgttagtcctctattggtttttgtcaattctaagagtggagataatcagggagtaaagttcctccgtcgctttaaacagttgctaaatccggctcaggtgtttgatttaatgaatggaggtcctcatttaggtttaagattatttcagaagtttgacaatttccggattcttgtttgtggaggcgatggaagtgtaggttgggttttgtcagaaatcgataagctcaacttgaataaacagtgtcagctgggagtgttgcctttgggtacaggaaatgaccttgcccgagttcttggctggggaggttcatatgacgatgacacccaacttcctcagatcctagagaaactggaacgagccagtaccaaaatgttggacaggtggagtataatgacatatgaactcaaattgccaccaaaagcttccctacttccaggacctccagaagcatctgaagaattttatatgacgatttatgaagactcagttgcaacgcatcttacaaaaatcctcaattctgatgaacatgcagtggtcatatcttctgccaagacgctatgtgaaactgtaaaggacttcgttgccaaagtagaaaagacgtatgacaaaaccttggaaaatgccgttgtagctgatgccgtggccagtaaatgttcagtcctaaacgagaagctcgaacaactgctgcaggctttgcacacagattcccaggctgcgcctgttctccctggcctcagccctctcattgtggaagaagatgctgtggaatcgtccagtgaagagtccctgggtgaaagcaaagagcagcttggggatgacgttacaaaaccttcctcccagaaagccgtcaaaccaagggaaatcatgttgcgggcaaatagtttaaagaaagcagtgaggcaagtcattgaggaagccggaaaagttatggatgacccgacagttcacccctgtgaaccagctaatcagtcctctgattatgacagcacagaaacagatgaatctaaggaggaagctaaagatgatggtgccaaagaatcaataactgttaaaactgcacctcggtctccagatgcccgggcaagttatggccattcccaaactgattctgtccctggtccagctgtggcagccagcaaagaaaacctccctgtgctcaataccagaataatctgcccaggtttaagagcaggactggctgcctcaattgctgggagttcgattatcaacaaaatgttactggcaaacattgatccttttggtgccacgccgtttattgacccggatctagattccgtagatggatattcagaaaaatgtgtcatgaacaattactttgggattggattagatgcaaaaatttcattagaatttaataataaaagagaggagcaccctgaaaaatgcaggagccgaactaaaaacttgatgtggtatggagtccttggaacccgggagttattacagagatcgtacaagaatttagaacaaagggttcaacttgagtgtgatgggcagtatattcctcttcccagcttgcaaggcatagccgtgttgaacattcccagctatgctggaggcactaacttttggggtggaactaaagaggatgatatatttgctgcaccatcctttgatgacaagatcctggaagttgtagcaatatttgatagcatgcaaatggcagtttcaagggtcattaaactgcagcatcatcgaatagcccagtgccgtacagtgaaaatcactatatttggtgacgaaggagtcccagtgcaagtggatggtgaagcgtgggttcagcctccagggattatcaaaattgtgcacaaaaacagagcacaaatgctaacaagggacagagcctttgagagcactctgaaatcttgggaagataagcagaagtgtgattctggtaaaccagttctccgaacccatttgtacatccatcacgccattgacttggcaacagaagaggtgtcgcagatgcagctatgctcccaggctgcagaggagctcattactaggatatgtgacgcagccacaattcactgtcttttggagcaagaactggcccatgctgtgaatgcctgctcccatgccctgaataaagccaacccaaggtgcccggagagtcttacaagagacactgccactgaaatagccatcaatgtgaaggcgctgtataatgaaacagaatctttgctagttggcagggttcctttgcagctggaatcgccacatgaagagcgagtatccaatgccttacactctgtggaggtggaattacagaaactgacagagattccttggctttattatatcttacacccaaatgaggatgaggaacctcctatggattgcaccaaaaggaacaacagaagcaccgtatttcgaatagtgccaaagtttaaaaaggaaaaggttcagaagcagaagacaagttcacagcctgttcagaaatggggcacagaggaagttgctgcttggctggatctgctcaatttgggagagtacaaagatatcttcatccgtcatgacatcagaggggctgaacttttgcatctggaaaggcgagatcttaagaacacagtaggagaaaaaagagacaccaaagaaaatggtaaacatatggatctggggataccgaaagtgggtcatgtgaagcgaattctccagggaattaaagagcttggaaggagcactccacagtcggaggtgtaatcatattggtgctatttcttggaagagaagttattgccacttaatacaaagtccttggaagcaagtggctgttcttgtagttttctgcatagataagtaagcaccactgaagcacctctgtggcttgatattttgctgtgggtgaaattttgatttgaggtattagaaaatatttttgtgccgaacaatacattccacaaagccattttctttttgtgcaaacctgacatgttcaaatatattcacaatggtaataaggtaggaggaatctgagacgattgcattgtctaaacagtggaattgcaaaatgtttactttccatagatctggtctgatggaatgttcctactgtgcaactgcataacaatatgtggttaaaacttcctaggtttcattacgggggggcattggccattttcttaaaatcataggttaggagactaaaatataaattaagttgtgatttgaatgtagattggtatcacctccaactcctagtgcttagtggtcaaatatgttgaaaacctttccaatactatgaatgaatgcaaatcttaatgcacga

SEQ ID NO: 5538 - DNA, 4422 bp, Homo sapiens
  source 1..4422: mol_type = unassigned DNA; mol_type = unassigned DNA
aggccttttacagactccaaatagatggtcctgagctgatactgtcattgtcaccatgatcctggagacacagcctgtagctgtgtggaagtaaacttctaaaacctgtctcttctgagagttactgcatgaaaacaggcaaggatgggtcaagttttggaccagcagcccaagttccaccaaccactctgttatacagaggcttctaagctatgcagagtgctatgaagggtttattcttcttttgcccacctgactgatatactgatgtactttttgaagaagggcaatggaatttacctagacgtcactgtggtcttgatgtggctgaagtgttttgttgaaggctctttagtcctgtactcatttagattgactctcacttctggtccctttttgtggtgcagactaaagcctcaaactctgtaaaagacaatggcttgtctcatgaagagaagtgaccaactgttaataagctttatccaaagagggtcgtggaaaacaagaaaatgcaaaagtgaggttctcttcaatttcatatgcaattaacaaatatccagagctgactgattggtgctcctcttccatgtgacttttggctggctgtatttaaggatcatcactccattcagaaggctaatgctgtgtgctgagaacagaaaggagatggaggattggatcagctcactgaagtctgtacagaccagagaaccctacgaggtggcccagtttaatgtggaacatttctcagggatgcacaactggtacgcctgctcccacgcccgacccaccttctgtaacgtgtgcagagagagtctttctggagtcacctcccatggcctgtcctgcgaagtgtgtaaattcaaggctcacaaaagatgtgcagtgagagcaacaaataactgtaaatggactaccctggcctccatcgggaaggacattatagaagatgaagatggcgtcgcgatgcctcaccagtggcttgagggcaacctgcctgtaagtgccaagtgtgctgtctgcgacaaaacatgtggcagtgttctccgtctacaggattggaaatgcctttggtgtaagacaatggtacacactgcctgcaaagatttataccatccaatatgtccacttggtcaatgtaaagtatctatcatacctccaattgcactaaacagcaccgattccgatggtttctgtagagcaacattttcgttctgtgttagtcctctattggtttttgtcaattctaagagtggagataatcagggagtaaagttcctccgtcgctttaaacagttgctaaatccggctcaggtgtttgatttaatgaatggaggtcctcatttaggtttaagattatttcagaagtttgacaatttccggattcttgtttgtggaggcgatggaagtgtaggttgggttttgtcagaaatcgataagctcaacttgaataaacagtgtcagctgggagtgttgcctttgggtacaggaaatgaccttgcccgagttcttggctggggaggttcatatgacgatgacacccaacttcctcagatcctagagaaactggaacgagccagtaccaaaatgttggacaggtggagtataatgacatatgaactcaaattgccaccaaaagcttccctacttccaggacctccagaagcatctgaagaattttatatgacgatttatgaagactcagttgcaacgcatcttacaaaaatcctcaattctgatgaacatgcagtggtcatatcttctgccaagacgctatgtgaaactgtaaaggacttcgttgccaaagtagaaaagacgtatgacaaaaccttggaaaatgccgttgtagctgatgccgtggccagtaaatgttcagtcctaaacgagaagctcgaacaactgctgcaggctttgcacacagattcccaggctgcgcctgttctccctggcctcagccctctcattgtggaagaagatgctgtggaatcgtccagtgaagagtccctgggtgaaagcaaagagcagcttggggatgacgttacaaaaccttcctcccagaaagccgtcaaaccaagggaaatcatgttgcgggcaaatagtttaaagaaagcagtgaggcaagtcattgaggaagccggaaaagttatggatgacccgacagttcacccctgtgaaccagctaatcagtcctctgattatgacagcacagaaacagatgaatctaaggaggaagctaaagatgatggtgccaaagaatcaataactgttaaaactgcacctcggtctccagatgcccgggcaagttatggccattcccaaactgattctgtccctggtccagctgtggcagccagcaaagaaaacctccctgtgctcaataccagaataatctgcccaggcaatgatttctcagatatgacaagcacacgccacaaaagacaaataaattggacttcaccgaaatgaatagttttgtgattcaaaggacactatcgagaaagtgaaatgacaatttaagaatttacaaataatatatctgataaaggactagtatccagaacatataaagaacccttaaaattcaacaataaaaaggtttaagagcaggactggctgcctcaattgctgggagttcgattatcaacaaaatgttactggcaaacattgatccttttggtgccacgccgtttattgacccggatctagattccagatggatattcagaaaaatgtgtcatgaacaattactttgggattggattagatgcaaaaatttcattagaatttaataataaaagagaggagcaccctgaaaaatgcaggagccgaactaaaaacttgatgtggtatggagtccttggaacccgggagttattacagagatcgtacaagaatttagaacaaagggttcaacttgagtgtgatgggcagtatattcctcttcccagcttgcaaggcatagccgtgttgaacattcccagctatgctggaggcactaacttttggggtggaactaaagaggatgatatatttgctgcaccatcctttgatgacaagatcctggaagttgtagcaatatttgatagcatgcaaatggcagtttcaagggtcattaaactgcagcatcatcgaatagcccagtgccgtacagtgaaaatcactatatttggtgacgaaggagtcccagtgcaagtggatggtgaagcgtgggttcagcctccagggattatcaaaattgtgcacaaaaacagagcacaaatgctaacaagggacagagcctttgagagcactctgaaatcttgggaagataagcagaagtgtgattctggtaaaccagttctccgaacccatttgtacatccatcacgccattgacttggcaacagaagaggtgtcgcagatgcagctatgctcccaggctgcagaggagctcattactaggatatgtgacgcagccacaattcactgtcttttggagcaagaactggcccatgctgtgaatgcctgctcccatgccctgaataaagccaacccaaggtgcccggagagtcttacaagagacactgccactgaaatagccatcaatgtgaaggcgctgtataatgaaacagaatctttgctagttggcagggttcctttgcagctggaatcgccacatgaagagcgagtatccaatgccttacactctgtggaggtggaattacagaaactgacagagattccttggctttattatatcttacacccaaatgaggatgaggaacctcctatggattgcaccaaaaggaacaacagaagcaccgtatttcgaatagtgccaaagtttaaaaaggaaaaggttcagaagcagaagacaagttcacagcctggatctggggataccgaaagtgggtcatgtgaagcgaattctccagggaattaaagagcttggaaggagcactccacagtcggaggtgtaatcatattggtgctatttcttggaagagaagttattgccacttaatacaaagtccttggaagcaagtggctgttcttgtagttttctgcatagataaaggatatatatgagttcaagatggtcacctgcttctctaggaatccaagggacaacttcaattcctttaggagtttcctttacagaaaactgcgtggtgggaatccaggccaatacagaaaggatcaacaagctgatgaatgagtctcaaatgttggtgacagctctcaatcctcgtatagcgtatgacaaggcagcaaagattgctaagacagcacacaaaaatggatcaaccttaaaggaaactgttattgaacttggctatctcacaccagaacagtttgatgaacaggtaaaaactaaggacatgctgagtccaaagtgatttaagtaaatttataatgaaaataaacgtgtatataatttttt

SEQ ID NO: 5539 - DNA, 282 bp, Homo sapiens
  source 1..282: mol_type = unassigned DNA; mol_type = unassigned DNA
gatatgtgacgcagccacaattcactgtcttttggagcaagaactggcccatgctgtgaatgcctgctcccatgccctgaataaagccaacccaaggtgcccggagagtcttacaagagacactgccactgaaatagccatcaatgtgaaggcgctgtataatgaaacagaatctttgctagttggcagggttcctttgaaaagtgccacctttggggcatcctttgctctgagaagagaagctgaaaggctgcatgaaagccatcactcttacctacctcc

SEQ ID NO: 5540 - DNA, 4202 bp, Homo sapiens
  source 1..4202: mol_type = unassigned DNA; mol_type = unassigned DNA
ttttgaacgtcacaaggaagaaacggtgcccggcgcagcttgccctggagcgtagctggagtgcggctgagttttcgctccgctgaagccggagtcggagaggatggcaggggccggaggccagcaccaccctccgggcgccgctggaggagcggccgccggagccggcgccgcggtcacctccgccgctgcctcggcggggccgggagaggattcgtctgacagcgaagcggagcaagagggaccccagaaactgatccgcaaagtgtctacctcggggcagatccggaccaagaccagtattaaagagggacagctattgaagcaaaccagttctttccaaaggtggaaaaagcgatacttcaaacttcgaggccgcaccctttactatgcaaaggactcaaagtctctgatatttgatgaagttgacctctcagatgctagtgtagctgaagcaagcacgaaaaatgctaacaacagcttcacgatcatcactccattcagaaggctaatgctgtgtgctgagaacagaaaggagatggaggattggatcagctcactgaagtctgtacagaccagagaaccctacgaggtggcccagtttaatgtggaacatttctcagggatgcacaactggtacgcctgctcccacgcccgacccaccttctgtaacgtgtgcagagagagtctttctggagtcacctcccatggcctgtcctgcgaagtgtgtaaattcaaggctcacaaaagatgtgcagtgagagcaacaaataactgtaaatggactaccctggcctccatcgggaaggacattatagaagatgaagatggcgtcgcgatgcctcaccagtggcttgagggcaacctgcctgtaagtgccaagtgtgctgtctgcgacaaaacatgtggcagtgttctccgtctacaggattggaaatgcctttggtgtaagacaatggtacacactgcctgcaaagatttataccatccaatatgtccacttggtcaatgtaaagtatctatcatacctccaattgcactaaacagcaccgattccgatggtttctgtagagcaacattttcgttctgtgttagtcctctattggtttttgtcaattctaagagtggagataatcagggagtaaagttcctccgtcgctttaaacagttgctaaatccggctcaggtgtttgatttaatgaatggaggtcctcatttaggtttaagattatttcagaagtttgacaatttccggattcttgtttgtggaggcgatggaagtgtaggttgggttttgtcagaaatcgataagctcaacttgaataaacagtgtcagctgggagtgttgcctttgggtacaggaaatgaccttgcccgagttcttggctggggaggttcatatgacgatgacacccaacttcctcagatcctagagaaactggaacgagccagtaccaaaatgttggacaggtggagtataatgacatatgaactcaaattgccaccaaaagcttccctacttccaggacctccagaagcatctgaagaattttatatgacgatttatgaagactcagttgcaacgcatcttacaaaaatcctcaattctgatgaacatgcagtggtcatatcttctgccaagacgctatgtgaaactgtaaaggacttcgttgccaaagtagaaaagacgtatgacaaaaccttggaaaatgccgttgtagctgatgccgtggccagtaaatgttcagtcctaaacgagaagctcgaacaactgctgcaggctttgcacacagattcccaggctgcgcctgttctccctggcctcagccctctcattgtggaagaagatgctgtggaatcgtccagtgaagagtccctgggtgaaagcaaagagcagcttggggatgacgttacaaaaccttcctcccagaaagccgtcaaaccaagggaaatcatgttgcgggcaaatagtttaaagaaagcagtgaggcaagtcattgaggaagccggaaaagttatggatgacccgacagttcacccctgtgaaccagctaatcagtcctctgattatgacagcacagaaacagatgaatctaaggaggaagctaaagatgatggtgccaaagaatcaataactgttaaaactgcacctcggtctccagatgcccgggcaagttatggccattcccaaactgattctgtccctggtccagctgtggcagccagcaaagaaaacctccctgtgctcaataccagaataatctgcccaggtttaagagcaggactggctgcctcaattgctgggagttcgattatcaacaaaatgttactggcaaacattgatccttttggtgccacgccgtttattgacccggatctagattccgtagatggatattcagaaaaatgtgtcatgaacaattactttgggattggattagatgcaaaaatttcattagaatttaataataaaagagaggagcaccctgaaaaatgcaggagccgaactaaaaacttgatgtggtatggagtccttggaacccgggagttattacagagatcgtacaagaatttagaacaaagggttcaacttgagtgtgatgggcagtatattcctcttcccagcttgcaaggcatagccgtgttgaacattcccagctatgctggaggcactaacttttggggtggaactaaagaggatgatatatttgctgcaccatcctttgatgacaagatcctggaagttgtagcaatatttgatagcatgcaaatggcagtttcaagggtcattaaactgcagcatcatcgaatagcccagtgccgtacagtgaaaatcactatatttggtgacgaaggagtcccagtgcaagtggatggtgaagcgtgggttcagcctccagggattatcaaaattgtgcacaaaaacagagcacaaatgctaacaagggacagagcctttgagagcactctgaaatcttgggaagataagcagaagtgtgattctggtaaaccagttctccgaacccatttgtacatccatcacgccattgacttggcaacagaagaggtgtcgcagatgcagctatgctcccaggctgcagaggagctcattactaggatatgtgacgcagccacaattcactgtcttttggagcaagaactggcccatgctgtgaatgcctgctcccatgccctgaataaagccaacccaaggtgcccggagagtcttacaagagacactgccactgaaatagccatcaatgtgaaggcgctgtataatgaaacagaatctttgctagttggcagggttcctttgcagctggaatcgccacatgaagagcgagtatccaatgccttacactctgtggaggtggaattacagaaactgacagagattccttggctttattatatcttacacccaaatgaggatgaggaacctcctatggattgcaccaaaaggaacaacagaagcaccgtatttcgaatagtgccaaagtttaaaaaggaaaaggttcagaagcagaagacaagttcacagcctggatctggggataccgaaagtgggtcatgtgaagcgaattctccagggaattaaagagcttggaaggagcactccacagtcggaggtgtaatcatattggtgctatttcttggaagagaagttattgccacttaatacaaagtccttggaagcaagtggctgttcttgtagttttctgcatagataagtaagcaccactgaagcacctctgtggcttgatattttgctgtgggtgaaattttgatttgaggtattagaaaatatttttgtgccgaacaatacattccacaaagccattttctttttgtgcaaacctgacatgttcaaatatattcacaatggtaataaggtaggaggaatctgagacgattgcattgtctaaacagtggaattgcaaaatgtttactttccatagatctggtctgatggaatgttcctactgtgcaactgcataacaatatgtggttaaaacttcctaggtttcattacgggggggcattggccattttcttaaaatcataggttaggagactaaaatataaattaagttgtgatttgaatgtagattggtatcacctccaactcctagtgcttagtggtcaaatatgttgaaaacctttccaatactatgaatgaatgcaaatcttaatgcacgatg

SEQ ID NO: 5541 - DNA, 12928 bp, Homo sapiens
  source 1..12928: mol_type = unassigned DNA
cggccagaaggagaaggacgaagcgctggaggagaagctgaggaacttaactttccggaagcaggtctcgtacagaatctgcacccctagagcaaatagtctctgtcgactgtaaagctgaaggtttgaaaaggcagtgcgagtgagctggagaatgccgtgaatggagaacacctgtggctggagaccaacgtctcgggagacctctgctaccttggagaggagaactgccaagtcagatttgcaaaatcagctctcaggaggaagtgtgcagtctgtaaaatcgtcgtccacaccgcctgcattgagcagctagaaaagattaatttcagatgtaaaccaacatttcgagaaggaggctcaaggtcaccaagagaaaattttgtacgtcatcactgggtgcacaggcgtcggcaggaggggaaatgtaagcagtgtggtaagggcttccagcaaaagttctccttccacagtaaagagattgtggctatcagctgttcctggtgcaagcaggcgtttcacaataaggtgacctgcttcatgctgcatcacattgaagaaccctgctccctgggggctcatgctgctgttattgtcccgcccacttggatcattaaggtgaagaaacctcagaactccctgaaggcttcaaatcggaagaagaagagaacaagctttaaaagaaaagccagtaaaagagggatggaacaggaaaacaaaggtcgtccttttgtgataaaacccatctcttctcctctcatgaaacccttgcttgtatttgtgaatcccaagagtggaggcaaccagggaaccaaagtcctgcagatgttcatgtggtacctgaatccacggcaagtctttgatctttctcaggaagggccaaaagatgcgcttgaattgtataggaaagtaccaaatctgcgaattctggcctgtggtggggatggaacggtgggctggatcctttccatcctggatgaactgcagctgagccctcagcctcctgtgggggtccttcctctggggactgggaatgacctggctcgaactctcaactggggagggggctacactgatgaacctgtttctaagatcctgtgtcaagtggaagatgggacagttgtacagctagatcgctggaacctccatgtggaaagaaaccccgacttgcctccagaagaacttgaagatggcgtatgtaagctccctctgaatgttttcaataactacttcagccttggatttgatgcccatgtcacactggagttccatgaatccagagaagcaaatccagagaaattcaacagtcgttttcgaaataaaatgttctatgcaggggcagctttttctgacttcctacagagaagttctagagatctatccaaacatgttaaagttgtttgtgatggaacagatctcaccccaaagattcaggaactgaagttccagtgtatagtatttttaaatatacccagatattgtgctggcacaatgccctggggaaacccaggtgatcaccatgatttcgaacctcagcgtcatgatgatggttatattgaagtcattggatttaccatggcctctttggcagccctgcaagttgggggccatggagagaggctacaccagtgtcgagaagtcatgcttctaacttacaaatccatccccatgcaagtggatggggagccctgtaggttggccccagctatgattcggatctccctgaggaatcaggccaacatggtacagaagagcaagaggagaacatccatgcctttactcaatgatccccagtctgtcccagatcgtctgaggatccgggtgaacaaaatcagtttacaagactatgaaggattccactatgacaaggagaaactccgagaagcttctatttcagactggttaagaaccattgctggggaactagtgcagtcatttggagcgatacctctgggtattctagttgtgcgtggagactgtgatttggagacttgccgtatgtacatagaccgcctacaggaggacctacagtcagtttcttctggctcccagagagttcattaccaggaccatgaaacctccttccccagggctctctcagcacagaggctctctcctcggtggtgcttcctagatgcaacttctgctgatcgcttttatcgaatagacagatctcaggaacatttgcactttgtgatggagatttcccaagatgagatttttattctggacccagatatggtggtgtcacagccggcggggacacctccgggcatgcctgacctggtggtggaacaagcctcggggtcaccagtctcttcagaagatcatgcaattttgcaggcagtaatagctggtgatcttatgaagctaatagaaagctataaaaatggaggcagtctgctaattcagggaccagaccactgttcactccttcactacgcagctaaaaccggcaacggggagattgtgaaatatatccttgaccacggaccttccgagttattggatatggcagacagtgaaacgggtgagactgcactgcacaaggctgcctgccagcggaaccgggctgtgtgccagcttctggtggatgcaggagcatctctgagaaagacggactccaagggtaagacacctcaagaaagagcacagcaggctggggacccagacttggctgcttacctagaaagccgtcagaactataaggtcattggccatgaggacctggaaactgctgtttgaccctggtattcgggcaaagaggacatgagcaagcgtatcacatctgccctccctgcaattgggcagctcccctggaagaagctgatggaattcatatatctgtctctctcctgcaagaatctacctgagaccatgccactagcttttaagggctaccaagatgtacaacagaacatgatagcccattgagaaggaggcaggatacctggagatttgtggaatacagtacgagttccacaaaatttgatccttattgcttccagcaagtagcatgaacttctgtgttcacctgtataatttattttaaagattcaaaggatgttcgtataaatggcactgctccatcctccccctatgcattggtttttttccctgtaccatacaattctactgtaactacccatcaacttaaagaaaaatattatctcttctctttacattcagtcttggaagaccacaagattgtctgaaggccttctaaaaccttctgaatgtcctgcagaaatataactgtaaaaccacttccatttctaagactaaatatatcaagactatttagtgactctctctgcatgtccccctcacccgccaaccctccgtttcattatataggagctgggaagtgccacatggataatgtcaacttgtgtgctatatctctgaggaatggtgaggtggcatgggagatgtctgtgcttggaggtacctcagagaggtaacccaggggtcagcccaggctgctgggctgtagccaatagccatgcaggactggttcagcttgggctgtctgtacagctccgtactgcctatgtgtagccatctttgccttttgctgcaatagaagatgagcaaaggattaaacagaggcccacagctagtttgcagaaccactcaattttaagtgctgtttaaattgcagagcaaataatcctgtgtgggaactgtggttacaggaaatggagcactctaacaatgtttacttctaaactttgttgaatgataatagaaagcaccctaattgacttggaaaaaaaaaacagcaaaagcaaaagtagcaacatatgtcaacatatgtcactgaaataggaaacagtcattggaatgttgcacagaggctaataactatagactgttggatacagtggtgagaggagccccattttaggtctttcttttaggtttttggttttcattactccaagtaatccttgacccaagaacaaaggcttgttgtatgagttccactgccagatttatgggatgcctggatcattcagaaggatgcttcaactattatttgtcaggtccaaaggtcgtacttaataaccccattttctatgtatggggtagtctaatatattattttatctactttatttttcccttttcagaaagtccttagtgcaaaccaccattggaatctagccagaaatgtctgtcagatagttagaattgtaacatctaaacctgccacggatcgaatggtacttacaggtacctctcttagggactctgtgatccctaaaatatcagaagaaaatgtctgtctttctgtccaaatatctacttgacttgggggtaagtcaaaaataaaagtaggtgtccaaggattttacttttggcgaaatctgacgtctcctgagcttattttcattttgtccttggacatagcatagtgcttccctaatgtttctacatatgaccatgaatgatagtgtctctacatttaatttaaaagtctaatggtgacattttgcttatctgagtcacatttcggtaacatatcatcattttgaaagtgcggctatgacgtgctatattaaacaggaacagcctttcagtggatggggattttattaccacagtctttccatagtcatttcaaaatcaaattgttggtgggaggatggattgggttgtgagtaatctacttccatatatcagcctcagaaatggaactatcctttggatattacaggagacactgcagcagattgtttccagaagctggaaaaatatgctccaggagaatttaatcactgggcttttgctgggggatttttagttggcgggactgtcaaggaaatgtgatgacagaaatataatccttaacacaaactggaatctggctttgaatggcatcttccattccctggattgagtcaaatgtttggccaagcagtcagttatctagctgttactgttgggatgaagaactctgttttcatcaactaccatctcacatttctctaaatacttccaagtagcccagagaaaatttagggtacaggtggctatgggccaatttctaaatagctccaattgaagacataaatctgtgttatgaaaaatgatgagttggtactgtaagattcctgatgcatttggaaattttttcaaaccaaaaaaaaaaaaggcattagagtcctgtgttattcatggagaccaatatttgatatatcgctttgaaaaaagcaagtaccactaggacttgggatttccaaaataaagtgagcagaataaccacatgtttaatggcttcaacattaaaccacctcctgtagcatgttttaaaaattggtcctgggctttggaaagagctaaggccttatggtctaggagtttccatctcagcttaagtatattgtatccctactattaggacatcaggaaagcaagtgatctagtcctggtctgaagtgccatgtaactttaacagacataaaaatatgtacctatagaaatatcatttctacaaagcctactgagacagcactgaagaggcagctagcttggctgactcctctgtgtttgtttctttgtgtcatggcactgactgctttgagattccatttttagatgtggttgatagaggaatggaaaatgaagagttattaaaagacaacattctgtaacctgaaaggtagtcatttttgcaagcttatattttaatattgtgcatttaacaaaatagaacacagttaaactgtgctttatcgtattcaaggacttcataaagaataagagagaagattagtaagccaagaatggaataaataccatgactaggaattttgctttcagagcttatgtttcctctgtagatgtgataaccaaaaaccagtgcaagttttgaaacataatttagctggcaaatgcacagtgatggaaattagtaatgactgatggagagccgtacatacctgttgctccttatcctttcagaatggctgctttggcagatctgcctgtgctgggagctactcaacatcacttcattttcatctggacctagtgagagtccctttgcctaacgaatttctgaaatttatttatttactagaccccttataatattcatggctttaaaaaatgacacagcatctttattttattacatgtcaattttattaataatatttaggggtttttttaaattataaaaatggcacatgctttttataaaatgttttaataccacagatgagtatcacatccacagtcaaggcatccctttgttctggtgttgtgtcccacttcccaaaaataaatacggttaacactgatgaacactgttgcttgtatgtgatgtcagaaataccccatccgttcatgcacaagtatgtatgtatatacgcatatacatttacacacatatatagacatttatttatatacacatgcaagtatgtatactatattcatgtatattgcataggtttagaaaagagcaaacattttaaaagcatgctgatcatttgtatatgtctagtgaacaccagtaggcaaagacaggttaaacagagaagttccatttatttttttgtttccaccattgctaggcttagatctgttatggcattactacaattgcacttagcattttctattacctgtgtcataaaattcatgaccaagagttcctgtaattgtttatgttgccttccatgaagcatgaaacctaccatagccccaagacttatctatgctatgtttgtatttcaagtaaaggagagttctttcctctgtgatgcttacaccactttacaaggctgtttgtaacactaacactcagtaggttgcctagtgatatttaattagggcaggctacttccgggaaggtgtaacttcagtgtagtatgggggtctgagcagcttgtcttccttccagaaggagtagctaatgaaatcactgagaacagcatattttattcaattatgctatttaaaaatgggactttgttaaaatggctcatcataaccatcaaataaaactactaattgttctatttaaatgaattatattcattttaggaaaagaagtagaaaaacatctaataaattagctttctgattaatctttaacacttatttaatataaaatggcttctgcctgcatcttaattgaaccacctttgaatctctcaactcctttcactctgaatctcatactcagctgattagaagtcctacaggtccttctctgccaggtctgtcagatcgacttggaccctacccttttctgtgtccccagtcatccattatctcttgtctctctaagttttgggccatagcggcagtcctgtccctgaactttctgcctactactgtcaataattttgtcacgcagttgcaaaaatcttccccagatattatgctcaaaatacatcaaaatgaaattaccctctgggacaagtataccttttactcaaaggacacatggatgtccactgaccttgatcatcttatagaattatggcaagcatgattctgaaaatctatcaggtttagcaaatatctgtcttagtcccatgagggtacacaatcacggctgctgcttcctcattcaacaatgtaagccacatgcctctttgacggcacctggaggactaggttatagattttacactgctgagggccatctttggttttacactgtctcctcacagcttaatgagaaacctgaaaataagaaccaagaaaagagtcatgcccttggacaacctcctctcccaggacactgagatttactgaccaggtcccagaaagaaagcagaaaaataattcttaggctcttgtagcatggattttaaaatagaaacgtgaaaattgaatggtatcttcataatgcatagactccagagtctatttacatatgtattcagttatgcatgtaatcatatgtccatgaatcaatcataagtgcatgtatttaatcattatttgaaaaatatttgtcactctgaggcaggcatcatactaaggatataacaatgaatgtaatagacaaaactcttgatttcatgaagctggcatctagaagaaaagacaaattccaatgtgataagtgcagtgcaggagaaccccagggtgtccagcatgggctggaaattcaaccaaggctttattgtaccagccactcattagccagcaatgttttggttcaatgaaaacataagtaggaagagaataatattttgcatttccattttactggagtcatagtagatttctaaaaatgtatctgaaactaagattttaaaacaagacttagaaacactattaaaatgaaagctaagactgatttattctagctctcaggatagaactaggaaaaataagcagagttttcagtgggttttgactaaatataaagaagatgaagtacaaataatatgtaatagtggagtggatatcacagttataaactttcagcctctgttagcatttaaacagaggatacctgaccactctgaggggtgttgtgattaggaatatgtgatttgagggggctaaaattagatgctgtgatttttcaaaagatattttttaatggctttgttgaatggcaggattttattttaaaaactcatgaaaatcttgatttttgatttgttaaactttgctttataactgagaattttaaaaatatctaggggaatggccgttagttatcatttaaaaaattttaaactaagcatgaatttaagagctagtcaaaagaaaacatactaaaaggtgtaatttaattaaaaatacttctggaagcttataaattttgatcagtattcttagtcattgtcaagtaaaattctattagaaatctgtcttactgtccatccaatataaaaaagtgctgtggtttgatattctaagagttaagtgtaatctagtataaccacagaagaaaattctgcctgtaaggtatttgggagccaagtaaatgtacatgaaaggcaatcatggaaaactctttggcttctgccaccagcgtggcaaccacaagggaggtcctacccatggaaataagaaaatagtgatccaagttttcacccaacttttgaaatttcaatattttgagccaaatgccttctgaaatgggaggctttgatagtgggaaatactgaaattatcttttccctcagacctttagtgaaacacacatatagttttcactctatgacagtataaacaactcaaatctatactgtttgttaagaacagtttcaagaattaaaaagtgctttagcgttatgatgtattgacatgtttgagcttcagttggggttcaaaacaaccccaacgaggtgaataatgcatataatacattttagatgaatgcactgaatctcagagcagtgaattcagcctgtgcagattcatatagcaaatgatagtgctgcagccagaactgggtctttagaaattacatattaacatgttttctaagtaagtcattttccatcattgccttcaaggatgttttatatcaattgttcagatttccataatatagaagttgcctccatgaaaaaaaaatgtttacctaagtttccacggaaagaatgagttagaaataagggagaatgtgaaatcaaaaagtcagagtttttgctgtcggagagaggcttgtcagcttgtacatagttcaagcaaagaaaagtctaatgtttgcataccagggtggatttcaagagaagaaattaacagtgagcgttaatggcttctttaacttatttgtgattctcagcatttaaaaaatgttagtcctatttttcttcctttgaagtcactattaggatgatataatttctgaatgctgcaacaaaaaatgttaaaaatggccctgacatccaagactctattgctctaagtttatgggtgggtatgcaagctaagtgttatgataatacatagtcatatacatagaggtttaatacacctatgggaaattccggcatatttgaagtagagaaaaacaaacaggcttgaaatgtccttcagttcagaatctcatactttacaagggacatttatgggcagattggtgaatatgtagaaggaggatgtttgatctggaaagaagacaaaattggattaggaataagaatatgtagaggagttaggttaagtaggactgttagtttcaaattctgcagggaagatgatttgtagaataaaataaggaaagaaaagagcagtaacacatgaaaaggagttagctttattacttataaggatttatttttcctaaacattgcatccagaaaaacagtttgggctttctgaaaaacagtgaagttgttatcactgtttcttctagtagttaagtgaagattgaacaactaactcagagatcaaaggcatatctttaattgtgagagatcttggactagaaaaactctgtgagattttcttggtttaaatgtctataattttagactggaacagaactcaatttgagcctatttttttcccccaggttcctgccaactagatagcaatgaaggcattttttaaaaaagcttccatcattgcaaatatatcccaaatcacttagcagcggggatttcatgaccctaaaaagttgccttgcttacacaaacacacctatgctttagtagaaacatatcttttttaggagatttgggaattggctagcatttttgccaattgttagccaatttaggagatttggaaattggctagcaattttgccaattgttagccaattcccaaatctcctaaaaaagatatgtttctactaaagcaaaaaggtcacagattcaggagtcaaagtgaaaacaaaggatttagtgttctttcccctacttactacccatttgttgtttgggatgtagagtcaggactggagaagagggtgggaaattctatatcctctgccaatacagaggcatggaggcactttctataactttgtgtcatgaaacaagacttaaccccatatcagtagactaatgtttctgtcatatttctgtctaggtggattacagttttaattgcccatcatcccttaattctgtaatacagcttgagttcctagatttcaggttgactgggtgagggaggaagtcacttgaggtaattttaagaaatgaatccatatccagagtcttgcagaaaagacctgcttctactccaccttctttcttgttctacttcttgcctctggtttgggggcataaaagaggggcagagttgtgaggaaaggaaaaaagattctcaaaagtagtacaataagaagaccctagtagtaacacaaattctcatggtaatctcaaacaactgatagtgttagcagatattgaaaatcaaactcaggaaacatacagaaagattaaatttgttcaaagtggcttcaaggggtattagttgtgaaaatttcagtttatgcagcatagaagaattagattgtgtgtggaacttgggggaagtagggtcagctaatagaagaactttttaatggagctttccaaaggacgaggtggtttttggaaggagtttgtccaacctcttataatacattatgcctgtccacaaacttgttctggtccctgataaagtttgaaaaaaataaggaatatttagggttttttcccacaaatctcaatatattcacttaaaaattcagagactgtgaccttgttattttgggtttaaatatacattttcctcttaaaaatgatagatatatgtttacaaattgtctttactcttcacttataaaacacacacatacagataggatagtcctgtcagtttaccctattttttgtttcaaatttataggtaatttcaaatttataggtgttggtgagatttatcacttttaagataccatctagccttgatatttgttgtaccttctatatgcaaccaaatggctcctgatctcctgatcttctggagatcaaagaatttttattcgccactctccccacccatcattggttggattgagactctaattacatacaagcataatttccaatgcaagtagaactttgatgctctccctgacttaccgattataagttgggaaagtttggattcttgccatcctggggaaggagatttagaactctcatagacaaaatattctaacacaacagaatattttgcaaaacacatctttgaaaagtcaggggccaaaatagtctcagcaaaggttagcttggctgttttttaaaattaccaatagttaagtgggcaaccatgaatctgaatattatacagaccaccactgactgaaactgaggaaaaccattcttgtgaaaaactaaggaatagaggacaatctcagttctaaaagaatgaatatatttgatttaatttgatttctgagtgggaaaacgttcccaggcatccagggtacccttggctgtgggtattccactcgcaaaggctacatctgtatgaagagttgcagtcacattataaagggctttttcatgatttctgattctgccctatcacatcccagagccatgcttttgcaaagctgccagctggcaggtggaatccataaacaagtagcagctgtggcagtagaaagattaaagttttatttccaggtaaaggaggattcagataatacgaagtggagggagggtgggtgggggggggggggtgggatgggaaagggaagaatgaagttttttgtaacaaagtcataaagtatttttccctaattttcttgcatttcctatttatataaagtatcttgatcactgtgttgcactacagagattttcaatggagttaatttgggagactgaactaatctctgaaaaagaaattgactagttacagttactttttggacactttttctgtattgtgaattgtgtggaaatgtacagaataaaaatgaagaaatgta

SEQ ID NO: 5542 - DNA, 3223 bp, Homo sapiens
  source 1..3223: mol_type = unassigned DNA
agtaaatcatacctttgctcacttgatttgaatgaagattcttgtctaccaacagttttaggaaatagatggaatttgtgtagcatcaccacttcacggtaaaacagaagaaaaagatgaggtttctgcagttgtgatgcagaccgttgaaatgtgcctggagagaatgcccaactgggaaatcggttttcattcgggactacgtaggagtgtaacagaggacaagcatcatggctcaagaagcagggaggaaagtggaacctggggaatgctgaccaggcatgaacattcttacatgttcaccataggaaaaaggtgtgagcacatgatgggaggctgttctatccaggaaagactggattccacccaactgtgacaaaggtcaccagtctcttcagaagatcatgcaattttgcaggcagtaatagctggtgatcttatgaagctaatagaaagctataaaaatggaggcagtctgctaattcagggaccagaccactgttcactccttcactacgcagctaaaaccggcaacggggagattgtgaaatatatccttgaccacggaccttccgagttattggatatggcagacagtgaaacgggtgagactgcactgcacaaggctgcctgccagcggaaccgggctgtgtgccagcttctggtggatgcaggagcatctctgagaaagacggactccaagggtaagacacctcaagaaagagcacagcaggctggggacccagacttggctgcttacctagaaagccgtcagaactataaggtcattggccatgaggacctggaaactgctgtttgaccctggtattcgggcaaagaggacatgagcaagcgtatcacatctgccctccctgcaattgggcagctcccctggaagaagctgatggaattcatatatctgtctctctcctgcaagaatctacctgagaccatgccactagcttttaagggctaccaagatgtacaacagaacatgatagcccattgagaaggaggcaggatacctggagatttgtggaatacagtacgagttccacaaaatttgatccttattgcttccagcaagtagcatgaacttctgtgttcacctgtataatttattttaaagattcaaaggatgttcgtataaatggcactgctccatcctccccctatgcattggtttttttccctgtaccatacaattctactgtaactacccatcaacttaaagaaaaatattatctcttctctttacattcagtcttggaagaccacaagattgtctgaaggccttctaaaaccttctgaatgtcctgcagaaatataactgtaaaaccacttccatttctaagactaaatatatcaagactatttagtgactctctctgcatgtccccctcacccgccaaccctccgtttcattatataggagctgggaagtgccacatggataatgtcaacttgtgtgctatatctctgaggaatggtgaggtggcatgggagatgtctgtgcttggaggtacctcagagaggtaacccaggggtcagcccaggctgctgggctgtagccaatagccatgcaggactggttcagcttgggctgtctgtacagctccgtactgcctatgtgtagccatctttgccttttgctgcaatagaagatgagcaaaggattaaacagaggcccacagctagtttgcagaaccactcaattttaagtgctgtttaaattgcagagcaaataatcctgtgtgggaactgtggttacaggaaatggagcactctaacaatgtttacttctaaactttgttgaatgataatagaaagcaccctaattgacttggaaaaaaaaaacagcaaaagcaaaagtagcaacatatgtcaacatatgtcactgaaataggaaacagtcattggaatgttgcacagaggctaataactatagactgttggatacagtggtgagaggagccccattttaggtctttcttttaggtttttggttttcattactccaagtaatccttgacccaagaacaaaggcttgttgtatgagttccactgccagatttatgggatgcctggatcattcagaaggatgcttcaactattatttgtcaggtccaaaggtcgtacttaataaccccattttctatgtatggggtagtctaatatattattttatctactttatttttcccttttcagaaagtccttagtgcaaaccaccattggaatctagccagaaatgtctgtcagatagttagaattgtaacatctaaacctgccacggatcgaatggtacttacaggtacctctcttagggactctgtgatccctaaaatatcagaagaaaatgtctgtctttctgtccaaatatctacttgacttgggggtaagtcaaaaataaaagtaggtgtccaaggattttacttttggcgaaatctgacgtctcctgagcttattttcattttgtccttggacatagcatagtgcttccctaatgtttctacatatgaccatgaatgatagtgtctctacatttaatttaaaagtctaatggtgacattttgcttatctgagtcacatttcggtaacatatcatcattttgaaagtgcggctatgacgtgctatattaaacaggaacagcctttcagtggatggggattttattaccacagtctttccatagtcatttcaaaatcaaattgttggtgggaggatggattgggttgtgagtaatctacttccatatatcagcctcagaaatggaactatcctttggatattacaggagacactgcagcagattgtttccagaagctggaaaaatatgctccaggagaatttaatcactgggcttttgctgggggatttttagttggcgggactgtcaaggaaatgtgatgacagaaatataatccttaacacaaactggaatctggctttgaatggcatcttccattccctggattgagtcaaatgtttggccaagcagtcagttatctagctgttactgttgggatgaagaactctgttttcatcaactaccatctcacatttctctaaatacttccaagtagcccagagaaaatttagggtacaggtggctatgggccaatttctaaatagctccaattgaagacataaatctgtgttatgaaaaatgatgagttggtactgtaagattcctgatgcatttggaaattttttcaaacc

SEQ ID NO: 5543 - DNA, 3895 bp, Homo sapiens
  source 1..3895: mol_type = unassigned DNA
gatggatgctgcgggaaggggctgccatttgctgcccctgccagcggcgcgcggacctgcccgcgctcctgcagccgccgccgccgccgccgccagcccgcccggcccctgcagcggcgccgcctgcgctccctccgcggccgccggagcgggcgccatgaaccccagctcctcggcgggagaggagaaaggggcgacgggcggcagcagcagcagcggaagcggcgccgggagctgctgcctgggcgccgagggcggcgcggacccgcggggcgcagggtcagccgcggcggcgggggccgctgccctggacgagcccgcggccgccggccagaaggagaaggacgaagcgctggaggagaagctgaggaacttaactttccggaagcaggtctcgtacaggaaagcaatctcccgggcaggcctccagcatctggctcctgcacatcccctcagccttcctgtggcaaatggtccagccaaggagcccagagcgactttggactggagtgagaatgccgtgaatggagaacacctgtggctggagaccaacgtctcgggagacctctgctaccttggagaggagaactgccaagtcagatttgcaaaatcagctctcaggaggaagtgtgcagtctgtaaaatcgtcgtccacaccgcctgcattgagcagctagaaaagattaatttcagatgtaaaccaacatttcgagaaggaggctcaaggtcaccaagagaaaattttgtacgtcatcactgggtgcacaggcgtcggcaggaggggaaatgtaagcagtgtggtaagggcttccagcaaaagttctccttccacagtaaagagattgtggctatcagctgttcctggtgcaagcaggcgtttcacaataaggtgacctgcttcatgctgcatcacattgaagaaccctgctccctgggggctcatgctgctgttattgtcccgcccacttggatcattaaggtgaagaaacctcagaactccctgaaggcttcaaatcggaagaagaagagaacaagctttaaaagaaaagccagtaaaagagggatggaacaggaaaacaaaggtcgtccttttgtgataaaacccatctcttctcctctcatgaaacccttgcttgtatttgtgaatcccaagagtggaggcaaccagggaaccaaagtcctgcagatgttcatgtggtacctgaatccacggcaagtctttgatctttctcaggaagggccaaaagatgcgcttgaattgtataggaaagtaccaaatctgcgaattctggcctgtggtggggatggaacggtgggctggatcctttccatcctggatgaactgcagctgagccctcagcctcctgtgggggtccttcctctggggactgggaatgacctggctcgaactctcaactggggagggggctacactgatgaacctgtttctaagatcctgtgtcaagtggaagatgggacagttgtacagctagatcgctggaacctccatgtggaaagaaaccccgacttgcctccagaagaacttgaagatggcgtatgtaagctccctctgaatgttttcaataactacttcagccttggatttgatgcccatgtcacactggagttccatgaatccagagaagcaaatccagagaaattcaacagtcgttttcgaaataaaatgttctatgcaggggcagctttttctgacttcctacagagaagttctagagatctatccaaacatgttaaagttgtttgtgatggaacagatctcaccccaaagattcaggaactgaagttccagtgtatagtatttttaaatatacccagatattgtgctggcacaatgccctggggaaacccaggtgatcaccatgatttcgaacctcagcgtcatgatgatggttatattgaagtcattggatttaccatggcctctttggcagccctgcaagttgggggccatggagagaggctacaccagtgtcgagaagtcatgcttctaacttacaaatccatccccatgcaagtggatggggagccctgtaggttggccccagctatgattcggatctccctgaggaatcaggccaacatggtacagaagagcaagaggagaacatccatgcctttactcaatgatccccagtctgtcccagatcgtctgaggatccgggtgaacaaaatcagtttacaagactatgaaggattccactatgacaaggagaaactccgagaagcttctatttcagactggttaagaaccattgctggggaactagtgcagtcatttggagcgatacctctgggtattctagttgtgcgtggagactgtgatttggagacttgccgtatgtacatagaccgcctacaggaggacctacagtcagtttcttctggctcccagagagttcattaccaggaccatgaaacctccttccccagggctctctcagcacagaggctctctcctcggtggtgcttcctagatgacagatctcaggaacatttgcactttgtgatggagatttcccaagatgagatttttattctggacccagatatggtggtgtcacagccggcggggacacctccgggcatgcctgacctggtggtggaacaagcctcggggatctcagactggtggaatcctgccctgcggaaacgcatgctgagtgacagtgggctggggatgatagctccctattatgaggactcagatctgaaagatctcagccactcccgcgtgctacagtcaccagtctcttcagaagatcatgcaattttgcaggcagtaatagctggtgatcttatgaagctaatagaaagctataaaaatggaggcagtctgctaattcagggaccagaccactgttcactccttcactacgcagctaaaaccggcaacggggagattgtgaaatatatccttgaccacggaccttccgagttattggatatggcagacagtgaaacgggtgagactgcactgcacaaggctgcctgccagcggaaccgggctgtgtgccagcttctggtggatgcaggagcatctctgagaaagacggactccaagggtaagacacctcaagaaagagcacagcaggctggggacccagacttggctgcttacctagaaagccgtcagaactataaggtcattggccatgaggacctggaaactgctgtttgaccctggtattcgggcaaagaggacatgagcaagcgtatcacatctgccctccctgcaattgggcagctcccctggaagaagctgatggaattcatatatctgtctctctcctgcaagaatctacctgagaccatgccactagcttttaagggctaccaagatgtacaacagaacatgatagcccattgagaaggaggcaggatacctggagatttgtggaatacagtacgagttccacaaaatttgatccttattgcttccagcaagtagcatgaacttctgtgttcacctgtataatttattttaaagattcaaaggatgttcgtataaatggcactgctccatcctccccctatgcattggtttttttccctgtaccatacaattctactgtaactacccatcaacttaaagaaaaatattatctcttctctttacattcagtcttggaagaccacaagattgtctgaaggccttctaaaaccttctgaatgtcctgcagaaatataactgtaaaaccacttccatttctaagactaaatatatcaagactatttagtgactctctctgcatgtccccctcacccgccaaccctccgtttcattatataggagctgggaagtgccacatggataatgtcaacttgtgtgctatatctctgaggaatggtgaggtggcatgggagatgtctgtgc

SEQ ID NO: 5544 - DNA, 4070 bp, Homo sapiens
  source 1..4070: mol_type = unassigned DNA
gggtcgcagcctgtcctcctctctctccccctccgccgcagcccgtcgcctccgggcagagttcatgttcagcttgggctttcgctcgggatttaggaagaggccggcggggctggagggtgcgggccggcgcgggagggcgcgggaggcggggagcggcggcctctgattggccggggcgggggagtgagcggagtttcccacaatgccccggtgcggtgcagccgcggatggatgctgcgggaaggggctgccatttgctgcccctgccagcggcgcgcggacctgcccgcgctcctgcagccgccgccgccgccgccgccagcccgcccggcccctgcagcggcgccgcctgcgctccctccgcggccgccggagcgggcgccatgaaccccagctcctcggcgggagaggagaaaggggcgacgggcggcagcagcagcagcggaagcggcgccgggagctgctgcctgggcgccgagggcggcgcggacccgcggggcgcagggtcagccgcggcggcgggggccgctgccctggacgagcccgcggccgccggccagaaggagaaggacgaagcgctggaggagaagctgaggaacttaactttccggaagcaggtctcgtacaggaaagcaatctcccgggcaggcctccagcatctggctcctgcacatcccctcagccttcctgtggcaaatggtccagccaaggagcccagagcgactttggactggagtgagaatgccgtgaatggagaacacctgtggctggagaccaacgtctcgggagacctctgctaccttggagaggagaactgccaagtcagatttgcaaaatcagctctcaggaggaagtgtgcagtctgtaaaatcgtcgtccacaccgcctgcattgagcagctagaaaagattaatttcagatgtaaaccaacatttcgagaaggaggctcaaggtcaccaagagaaaattttgtacgtcatcactgggtgcacaggcgtcggcaggaggggaaatgtaagcagtgtggtaagggcttccagcaaaagttctccttccacagtaaagagattgtggctatcagctgttcctggtgcaagcaggcgtttcacaataaggtgacctgcttcatgctgcatcacattgaagaaccctgctccctgggggctcatgctgctgttattgtcccgcccacttggatcattaaggtgaagaaacctcagaactccctgaaggcttcaaatcggaagaagaagagaacaagctttaaaagaaaagccagtaaaagagggatggaacaggaaaacaaaggtcgtccttttgtgataaaacccatctcttctcctctcatgaaacccttgcttgtatttgtgaatcccaagagtggaggcaaccagggaaccaaagtcctgcagatgttcatgtggtacctgaatccacggcaagtctttgatctttctcaggaagggccaaaagatgcgcttgaattgtataggaaagtaccaaatctgcgaattctggcctgtggtggggatggaacggtgggctggatcctttccatcctggatgaactgcagctgagccctcagcctcctgtgggggtccttcctctggggactgggaatgacctggctcgaactctcaactggggagggggctacactgatgaacctgtttctaagatcctgtgtcaagtggaagatgggacagttgtacagctagatcgctggaacctccatgtggaaagaaaccccgacttgcctccagaagaacttgaagatggcgtatgtaagctccctctgaatgttttcaataactacttcagccttggatttgatgcccatgtcacactggagttccatgaatccagagaagcaaatccagagaaattcaacagtcgttttcgaaataaaatgttctatgcaggggcagctttttctgacttcctacagagaagttctagagatctatccaaacatgttaaagttgtttgtgatggaacagatctcaccccaaagattcaggaactgaagttccagtgtatagtatttttaaatatacccagatattgtgctggcacaatgccctggggaaacccaggtgatcaccatgatttcgaacctcagcgtcatgatgatggttatattgaagtcattggatttaccatggcctctttggcagccctgcaagttgggggccatggagagaggctacaccagtgtcgagaagtcatgcttctaacttacaaatccatccccatgcaagtggatggggagccctgtaggttggccccagctatgattcggatctccctgaggaatcaggccaacatggtacagaagagcaagaggagaacatccatgcctttactcaatgatccccagtctgtcccagatcgtctgaggatccgggtgaacaaaatcagtttacaagactatgaaggattccactatgacaaggagaaactccgagaagcttcgatacctctgggtattctagttgtgcgtggagactgtgatttggagacttgccgtatgtacatagaccgcctacaggaggacctacagtcagtttcttctggctcccagagagttcattaccaggaccatgaaacctccttccccagggctctctcagcacagaggctctctcctcggtggtgcttcctagatgacagatctcaggaacatttgcactttgtgatggagatttcccaagatgagatttttattctggacccagatatggtggtgtcacagccggcggggacacctccgggcatgcctgacctggtggtggaacaagcctcggggatctcagactggtggaatcctgccctgcggaaacgcatgctgagtgacagtgggctggggatgatagctccctattatgaggactcagatctgaaagatctcagccactcccgcgtgctacagtcaccagtctcttcagaagatcatgcaattttgcaggcagtaatagctggtgatcttatgaagctaatagaaagctataaaaatggaggcagtctgctaattcagggaccagaccactgttcactccttcactacgcagctaaaaccggcaacggggagattgtgaaatatatccttgaccacggaccttccgagttattggatatggcagacagtgaaacgggtgagactgcactgcacaaggctgcctgccagcggaaccgggctgtgtgccagcttctggtggatgcaggagcatctctgagaaagacggactccaagggtaagacacctcaagaaagagcacagcaggctggggacccagacttggctgcttacctagaaagccgtcagaactataaggtcattggccatgaggacctggaaactgctgtttgaccctggtattcgggcaaagaggacatgagcaagcgtatcacatctgccctccctgcaattgggcagctcccctggaagaagctgatggaattcatatatctgtctctctcctgcaagaatctacctgagaccatgccactagcttttaagggctaccaagatgtacaacagaacatgatagcccattgagaaggaggcaggatacctggagatttgtggaatacagtacgagttccacaaaatttgatccttattgcttccagcaagtagcatgaacttctgtgttcacctgtataatttattttaaagattcaaaggatgttcgtataaatggcactgctccatcctccccctatgcattggtttttttccctgtaccatacaattctactgtaactacccatcaacttaaagaaaaatattatctcttctctttacattcagtcttggaagaccacaagattgtctgaaggccttctaaaaccttctgaatgtcctgcagaaatataactgtaaaaccacttccatttctaagactaaatatatcaagactatttagtgactctctctgcatgtccccctcacccgccaaccctccgtttcattatataggagctgggaagtgccacatggataatgtcaacttgtgtgctatatctctgaggaatggtgaggtggcatgggagatgtctgtgc

SEQ ID NO: 5545 - DNA, 4163 bp, Homo sapiens
  source 1..4163: mol_type = unassigned DNA
gggtcgcagcctgtcctcctctctctccccctccgccgcagcccgtcgcctccgggcagagttcatgttcagcttgggctttcgctcgggatttaggaagaggccggcggggctggagggtgcgggccggcgcgggagggcgcgggaggcggggagcggcggcctctgattggccggggcgggggagtgagcggagtttcccacaatgccccggtgcggtgcagccgcggatggatgctgcgggaaggggctgccatttgctgcccctgccagcggcgcgcggacctgcccgcgctcctgcagccgccgccgccgccgccgccagcccgcccggcccctgcagcggcgccgcctgcgctccctccgcggccgccggagcgggcgccatgaaccccagctcctcggcgggagaggagaaaggggcgacgggcggcagcagcagcagcggaagcggcgccgggagctgctgcctgggcgccgagggcggcgcggacccgcggggcgcagggtcagccgcggcggcgggggccgctgccctggacgagcccgcggccgccggccagaaggagaaggacgaagcgctggaggagaagctgaggaacttaactttccggaagcaggtctcgtacaggaaagcaatctcccgggcaggcctccagcatctggctcctgcacatcccctcagccttcctgtggcaaatggtccagccaaggagcccagagcgactttggactggagtgagaatgccgtgaatggagaacacctgtggctggagaccaacgtctcgggagacctctgctaccttggagaggagaactgccaagtcagatttgcaaaatcagctctcaggaggaagtgtgcagtctgtaaaatcgtcgtccacaccgcctgcattgagcagctagaaaagattaatttcagatgtaaaccaacatttcgagaaggaggctcaaggtcaccaagagaaaattttgtacgtcatcactgggtgcacaggcgtcggcaggaggggaaatgtaagcagtgtggtaagggcttccagcaaaagttctccttccacagtaaagagattgtggctatcagctgttcctggtgcaagcaggcgtttcacaataaggtgacctgcttcatgctgcatcacattgaagaaccctgctccctgggggctcatgctgctgttattgtcccgcccacttggatcattaaggtgaagaaacctcagaactccctgaaggcttcaaatcggaagaagaagagaacaagctttaaaagaaaagccagtaaaagagggatggaacaggaaaacaaaggtcgtccttttgtgataaaacccatctcttctcctctcatgaaacccttgcttgtatttgtgaatcccaagagtggaggcaaccagggaaccaaagtcctgcagatgttcatgtggtacctgaatccacggcaagtctttgatctttctcaggaagggccaaaagatgcgcttgaattgtataggaaagtaccaaatctgcgaattctggcctgtggtggggatggaacggtgggctggatcctttccatcctggatgaactgcagctgagccctcagcctcctgtgggggtccttcctctggggactgggaatgacctggctcgaactctcaactggggagggggctacactgatgaacctgtttctaagatcctgtgtcaagtggaagatgggacagttgtacagctagatcgctggaacctccatgtggaaagaaaccccgacttgcctccagaagaacttgaagatggcgtatgtaagctccctctgaatgttttcaataactacttcagccttggatttgatgcccatgtcacactggagttccatgaatccagagaagcaaatccagagaaattcaacagtcgttttcgaaataaaatgttctatgcaggggcagctttttctgacttcctacagagaagttctagagatctatccaaacatgttaaagttgtttgtgatggaacagatctcaccccaaagattcaggaactgaagttccagtgtatagtatttttaaatatacccagatattgtgctggcacaatgccctggggaaacccaggtgatcaccatgatttcgaacctcagcgtcatgatgatggttatattgaagtcattggatttaccatggcctctttggcagccctgcaagttgggggccatggagagaggctacaccagtgtcgagaagtcatgcttctaacttacaaatccatccccatgcaagtggatggggagccctgtaggttggccccagctatgattcggatctccctgaggaatcaggccaacatggtacagaagagcaagaggagaacatccatgcctttactcaatgatattcatcaggtgcaaactgcggacctgcggcgagtgtctgctccccccggctccttcaccattccccagtctgtcccagatcgtctgaggatccgggtgaacaaaatcagtttacaagactatgaaggattccactatgacaaggagaaactccgagaagcttcgatacctctgggtattctagttgtgcgtggagactgtgatttggagacttgccgtatgtacatagaccgcctacaggaggacctacagtcagtttcttctggctcccagagagttcattaccaggaccatgaaacctccttccccagggctctctcagcacagaggctctctcctcggtggtgcttcctagatgcaacttctgctgatcgcttttatcgaatagacagatctcaggaacatttgcactttgtgatggagatttcccaagatgagatttttattctggacccagatatggtggtgtcacagccggcggggacacctccgggcatgcctgacctggtggtggaacaagcctcggggatctcagactggtggaatcctgccctgcggaaacgcatgctgagtgacagtgggctggggatgatagctccctattatgaggactcagatctgaaagatctcagccactcccgcgtgctacagtcaccagtctcttcagaagatcatgcaattttgcaggcagtaatagctggtgatcttatgaagctaatagaaagctataaaaatggaggcagtctgctaattcagggaccagaccactgttcactccttcactacgcagctaaaaccggcaacggggagattgtgaaatatatccttgaccacggaccttccgagttattggatatggcagacagtgaaacgggtgagactgcactgcacaaggctgcctgccagcggaaccgggctgtgtgccagcttctggtggatgcaggagcatctctgagaaagacggactccaagggtaagacacctcaagaaagagcacagcaggctggggacccagacttggctgcttacctagaaagccgtcagaactataaggtcattggccatgaggacctggaaactgctgtttgaccctggtattcgggcaaagaggacatgagcaagcgtatcacatctgccctccctgcaattgggcagctcccctggaagaagctgatggaattcatatatctgtctctctcctgcaagaatctacctgagaccatgccactagcttttaagggctaccaagatgtacaacagaacatgatagcccattgagaaggaggcaggatacctggagatttgtggaatacagtacgagttccacaaaatttgatccttattgcttccagcaagtagcatgaacttctgtgttcacctgtataatttattttaaagattcaaaggatgttcgtataaatggcactgctccatcctccccctatgcattggtttttttccctgtaccatacaattctactgtaactacccatcaacttaaagaaaaatattatctcttctctttacattcagtcttggaagaccacaagattgtctgaaggccttctaaaaccttctgaatgtcctgcagaaatataactgtaaaaccacttccatttctaagactaaatatatcaagactatttagtgactctctctgcatgtccccctcacccgccaaccctccgtttcattatataggagctgggaagtgccacatggataatgtcaacttgtgtgctatatctctgaggaatggtgaggtggcatgggagatgtctgtgc

SEQ ID NO: 5546 - DNA, 582 bp, Homo sapiens
  source 1..582: mol_type = unassigned DNA; mol_type = unassigned DNA
atttacaaaatccagatggattatgtctcaacagaagctgttggccggggttcccagagtcactaggataaagctggcagcttggcttttcctaaagggtccttcctcctggctctccgggtcaccagtctcttcagaagatcatggaccttccgagttattggatatggcagacagtgaaacgggtgagactgcactgcacaaggctgcctgccagcggaaccgggctgtgtgccagcttctggtggatgcaggagcatctctgagaaagacggactccaagggtaagacacctcaagaaagagcacagcaggctggggacccagacttggctgcttacctagaaagccgtcagaactataaggtcattggccatgaggacctggaaactgctgtttgaccctggtattcgggcaaagaggacatgagcaagcgtatcacatctgccctccctgcaattgggcagctcccctggaagaagctgatggaattcatatatctgtctctctcctgcaagaatctacctgagaccatgccactagcttttaagggctaccaagatgtacaacagaacatgatagc

SEQ ID NO: 5547 - DNA, 628 bp, Homo sapiens
  source 1..628: mol_type = unassigned DNA; mol_type = unassigned DNA
cctaaatcaaatagtagtagcttttaaaaaaattactaaacttaatcaacactatttggaaagggggctagagtcagatattatgatcagttgatggctagctcaaggaatttttagaaatccccttccctacctccccagaatgtaccctacagccaaagtctcagcagcctacagggaaggaggctgaggagcaccctacatcagctcccctcacccattccctgctgcctccaacccctttatgggtggtttcccatttcatctttgatttaggggtgagactgcactgcacaaggctgcctgccagcggaaccgggctgtgtgccagcttctggtggatgcaggagcatctctgagaaagacggactccaagggtaagacacctcaagaaagagcacagcaggctggggacccagacttggctgcttacctagaaagccgtcagaactataaggtcattggccatgaggacctggaaactgctgtttgaccctggtattcgggcaaagaggacatgagcaagcgtatcacatctgccctccctgcaattgggcagctcccctggaagaagctgatggaattcatatatctgtctctctcctgcaagaatctacctgagaccatg

SEQ ID NO: 5548 - DNA, 632 bp, Homo sapiens
  source 1..632: mol_type = unassigned DNA; mol_type = unassigned DNA
gaacatttgcactttgtgatggagatttcccaagatgagatttttattctggacccagatatggtggtgtcacagccggcggggacacctccgggcatgcctgacctggtggtggaacaagcctcggggtcaccagtctcttcagaagatcatgcaattttgcaggcagtaatagctggtgatcttatgaagctaatagaaagctataaaaatggaggcagtctgctaattcagggaccagaccactgttcactccttcactacgcagctaaaaccggcaacggggagattgtgaaatatatccttgaccacggaccttccgagttattggatatggcagacagtgaaacgggtgagactgcactgcacaaggctgcctgccagcggaaccgggctgtgtgccagcttctggtggatgcaggagcatctctgagaaagacggactccaagggtaagacacctcaagaaagagcacagcaggctggggacccagacttggctgcttacctagaaagccgtcagaactataaggtcattggccatgaggacctggaaactgctgtttgaccctggtattcgggcaaagaggacatgagcaagcgtatcacatctgccctccctgcaattgggca

SEQ ID NO: 5549 - DNA, 1127 bp, Homo sapiens
  source 1..1127: mol_type = unassigned DNA; mol_type = unassigned DNA
ctccctctgaatgttttcaataactacttcagccttggatttgatgcccatgtcacactggagttccatgaatccagagaagcaaatccagagaaattcaacagtcgttttcgaaataaaatgttctatgcaggggcagctttttctgacttcctacagagaagttctagagatctatccaaacatgttaaagttgtttgtgatggaacagatctcaccccaaagattcaggaactgaagttccagtgtatagtatttttaaatatacccagatattgtgctggcacaatgccctggggaaacccaggtgatcaccatgatttcgaacctcagcgtcatgatgatggttatattgaagtcattggatttaccatggcctctttggcagccctgcaagttgggggccatggagagaggctacaccagtgtcgagaagtcatgcttctaacttacaaatccatccccatgcaagtggatggggagccctgtaggttggccccagctatgattcggatctccctgaggaatcaggccaacatggtacagaagagcaagaggagaacatccatgcctttactcaatgatccccagtctgtcccagatcgtctgaggatccgggtgaacaaaatcagtttacaagactatgaaggattccactatgacaaggagaaactccgagaagcttcgatacctctgggtattctagttgtgcgtggagactgtgatttggagacttgccgtatgtacatagaccgcctacaggaggaccatgaaacctccttccccagggctctctcagcacagaggctctctcctcggtggtgcttcctagatgcaacttctgctgatcgcttttatcgaatagacagatctcaggaacatttgcactttgtgatggagatttcccaagatgagatttttattctggacccagatatggtggtgtcacagccggcggggacacctccgggcatgcctgacctggtggtggaacaagcctcggggatctcagactggtggaatcctgccctgcggaaacgcatgctgagtgacagtgggctggggatgatagctccctattatgaggactcagatctgaaagatctcagccactcccgcgtgctaca

SEQ ID NO: 5550 - DNA, 922 bp, Homo sapiens
  source 1..922: mol_type = unassigned DNA; mol_type = unassigned DNA
gggtcgcagcctgtcctcctctctctccccctccgccgcagcccgtcgcctccgggcagagttcatgttcagcttgggctttcgctcgggatttaggaagaggccggcggggctggagggtgcgggccggcgcgggagggcgcgggaggcggggagcggcggcctctgattggccggggcgggggagtgagcggagtttcccacaatgccccggtgcggtgcagccgcggatggatgctgcgggaaggggctgccatttgctgcccctgccagcggcgcgcggacctgcccgcgctcctgcagccgccgccgccgccgccgccagcccgcccggcccctgcagcggcgccgcctgcgctccctccgcggccgccggagcgggcgccatgaaccccagctcctcggcgggagaggagaaaggggcgacgggcggcagcagcagcagcggaagcggcgccgggagctgctgcctgggcgccgagggcggcgcggacccgcggggcgcagggtcagccgcggcggcgggggccgctgccctggacgagcccgcggccgccggccagaaggagaaggacgaagcgctggaggagaagctgaggaacttaactttccggaagcaggtctcgtacaggaaagcaatctcccgggcaggcctccagcatctggctcctgcacatcccctcagccttcctgtggcaaatggtccagccaaggagcccagagcgactttggactggagtgagaatgccgtgaatggagaacacctgtggctggagaccaacgtctcgggagacctctgctaccttggagaggagaactgccaagtcagatttgcaggctacactgatgaacctgtttctaagatcctgtgtcaagtggaagatgggacagttgtacagctagatcgctggaacctccatgt

SEQ ID NO: 5551 - DNA, 551 bp, Homo sapiens
  source 1..551: mol_type = unassigned DNA; mol_type = unassigned DNA
aaagacttgagaacagcttatagatattgacggcagatgaagaattttcatgtcttttcagaaatggttagcagccactcataacagtcctgtgacgtcacagaaatcttgactcctgcttgtctttctcgttctcctttaagcccttccctcctccttttcatataggaccttaacacaagagggtcaggaagagaagagaagggttgctcacaggaggaaagaaggcaaggggtagctgttactttacctggtgggccatgtgtcgctacaaatcaggtggtctctttggaggagatgccacttggtaagggaggcttcctgagcactcgaatactactagcaactcagaatgtgggaccgctggaaggaaaaacacccctggatggggcgaaggaaagcaatctcccgggcaggcctccagcatctggctcctgcacatcccctcagccttcctgtggcaaatggtccagccaaggagcccagagcgactttggactggagtgagaatgccgtgaatggagaacacctgtggctggagaccaacgtct

SEQ ID NO: 5552 - DNA, 650 bp, Homo sapiens
  source 1..650: mol_type = unassigned DNA; mol_type = unassigned DNA
agcaactcagaatgtgggaccgctggaaggaaaaacacccctggatggggcgaagagttctgtgtcatgattttggatttagtggaaaaagaacagaggagattttcttgttaccttaattttcccaacatggaagatttgggaatgaagaaggacactgcaaagagtgaggcctaaaatggaaaccagtcatgatttttattttgctactttctttacggacacgaatgcacacagtgtagagcagccttaactctgaattggaacaaggtcgtgtaagtgccaggacgttatttccagaagcccacagctgctgattcctacacccagtgatttccactgccttttcatgattctggaattcccaagaacagtgtcatcttattagaaggtatttcccagttcgagttggagacaaaccaaccttccctcacaggctgagtccttctggtttcactgccaaagcttccagactcacccagggtctgttagacatatttgaatgaatctgtcagattgttcagtcgttaatgaggtcacactttccatgaagaccatagtggcgtcattttgtgtaccaacaattgtatcaagtcatgatgattttttaaatatcattgaaataatcattaaaatattattgagataaa

SEQ ID NO: 5553 - DNA, 2799 bp, Homo sapiens
  source 1..2799: mol_type = unassigned DNA; mol_type = unassigned DNA
aggaaagcaatctcccgggcaggcctccagcatctggctcctgcacatcccctcagccttcctgtggcaaatggtccagccaaggagcccagagcgactttggactggagtgagaatgccgtgaatggagaacacctgtggctggagaccaacgtctcgggagacctctgctaccttggagaggagaactgccaagtcagatttgcaaaatcagctctcaggaggaagtgtgcagtctgtaaaatcgtcgtccacaccgcctgcattgagcagctagaaaagattaatttcagatgtaaaccaacatttcgagaaggaggctcaaggtcaccaagagaaaattttgtacgtcatcactgggtgcacaggcgtcggcaggaggggaaatgtaagcagtgtggtaagggcttccagcaaaagttctccttccacagtaaagagattgtggctatcagctgttcctggtgcaagcaggcgtttcacaataaggtgacctgcttcatgctgcatcacattgaagaaccctgctccctgggggctcatgctgctgttattgtcccgcccacttggatcattaaggtgaagaaacctcagaactccctgaaggcttcaaatcggaagaagaagagaacaagctttaaaagaaaagccagtaaaagagggatggaacaggaaaacaaaggtcgtccttttgtgataaaacccatctcttctcctctcatgaaacccttgcttgtatttgtgaatcccaagagtggaggcaaccagggaaccaaagtcctgcagatgttcatgtggtacctgaatccacggcaagtctttgatctttctcaggaagggccaaaagatgcgcttgaattgtataggaaagtaccaaatctgcgaattctggcctgtggtggggatggaacggtgggctggatcctttccatcctggatgaactgcagctgagccctcagcctcctgtgggggtccttcctctggggactgggaatgacctggctcgaactctcaactggggagggggctacactgatgaacctgtttctaagatcctgtgtcaagtggaagatgggacagttgtacagctagatcgctggaacctccatgtggaaagaaaccccgacttgcctccagaagaacttgaagatggcgtatgtaagctccctctgaatgttttcaataactacttcagccttggatttgatgcccatgtcacactggagttccatgaatccagagaagcaaatccagagaaattcaacagtcgttttcgaaataaaatgttctatgcaggggcagctttttctgacttcctacagagaagttctagagatctatccaaacatgttaaagttgtttgtgatggaacagatctcaccccaaagattcaggaactgaagttccagtgtatagtatttttaaatatacccagatattgtgctggcacaatgccctggggaaacccaggtgatcaccatgatttcgaacctcagcgtcatgatgatggttatattgaagtcattggatttaccatggcctctttggcagccctgcaagttgggggccatggagagaggctacaccagtgtcgagaagtcatgcttctaacttacaaatccatccccatgcaagtggatggggagccctgtaggttggccccagctatgattcggatctccctgaggaatcaggccaacatggtacagaagagcaagaggagaacatccatgcctttactcaatgatccccagtctgtcccagatcgtctgaggatccgggtgaacaaaatcagtttacaagactatgaaggattccactatgacaaggagaaactccgagaagcttctatttcagactggttaagaaccattgctggggaactagtgcagtcatttggagcgatacctctgggtattctagttgtgcgtggagactgtgatttggagacttgccgtatgtacatagaccgcctacaggaggacctacagtcagtttcttctggctcccagagagttcattaccaggaccatgaaacctccttccccagggctctctcagcacagaggctctctcctcggtggtgcttcctagatgacagatctcaggaacatttgcactttgtgatggagatttcccaagatgagatttttattctggacccagatatggtggtgtcacagccggcggggacacctccgggcatgcctgacctggtggtggaacaagcctcggggatctcagactggtggaatcctgccctgcggaaacgcatgctgagtgacagtgggctggggatgatagctccctattatgaggactcagatctgaaagatctcagccactcccgcgtgctacagtcaccagtctcttcagaagatcatgcaattttgcaggcagtaatagctggtgatcttatgaagctaatagaaagctataaaaatggaggcagtctgctaattcagggaccagaccactgttcactccttcactacgcagctaaaaccggcaacggggagattgtgaaatatatccttgaccacggaccttccgagttattggatatggcagacagtgaaacgggtgagactgcactgcacaaggctgcctgccagcggaaccgggctgtgtgccagcttctggtggatgcaggagcatctctgagaaagacggactccaagggtaagacacctcaagaaagagcacagcaggctggggacccagacttggctgcttacctagaaagccgtcagaactataaggtcattggccatgaggacctggaaactgctgtttga

SEQ ID NO: 5554 - DNA, 3338 bp, Homo sapiens
  source 1..3338: mol_type = unassigned DNA; mol_type = unassigned DNA
gcagcgcccaaagatgacgtgttctgccagcgccacgtcatgaggaagtgccggcccactgaagccgtggggacgcgcccagcggagctaatcagattacctggctggtgtttgcttgttctggagtgatcttctgactggaaaagaactatgtcatggatcaaggaaggagagctgtcactttgggagcggttctgtgccaacatcataaaggcaggcccaatgccgaaacacattgcattcataatggacgggaaccgtcgctatgccaagaagtgccaggtggagcggcaggaaggccactcacagggcttcaacaagctagctgagctccttgccttctcccctctcagactctgcggtggtgtttgaacctgggcatcctagaggtgacagtctacgcattcagcattgagaacttcaaacgctccaagagtgaggtagacgggcttatggatctggcccggcagaagttcagccgcttgatggaagaaaaggagaaactgcagaagcatggggtgtgtatccgggtcctgggcgatctgcacttgttgcccttggatctccaggagctgattgcacaagctgtacaggccacgaagaactacaacaagtgtttcctgaatgtctgttttgcatacacatcccgtcatgagatcagcaatgctgtgagagagatggcctggggggtggagcaaggcctgttggatcccagtgatatctctgagtctctgcttgataagtgcctctataccaaccgctctcctcatcctgacatcttgatacggacttctggagaagtgcggctgagtgacttcttgctatggcagacctctcactcctgcctggtgttccaacccgttctgtggccagagtatacattttggaacctcttcgaggccatcctgcagttccagatgaaccatagcgtgcttcagaaggcccgagacatgtatgcagaggagcggaagaggcagcagctggagagggaccaggctacagtgacagagcagctgctgcgagaggggctccaagccagtggggacgcccagctccgaaggacacgcttgcacaaactctcggccagacgggaagagcgagtccaaggcttcctgcaggccttggaactcaagcgagctgactggctggcccgtctgggcactgcatcagcctgaatgaggctggccacctgccactttgccctgccctctgcctccagggctccactccccttccttttcttggtgaaaggcacctcctttcctgataatgaatggtgttccctttgcttggctggggagccccccaggccaggtttgctggccatagatacctttgggctgcctgggacaggctcctgaggaggattgagggtgaaagtctcccacgagtacactaaacctaggtctggtcaccaatagggtttggagagcaaagggccacaactcatcagctgcctgtctcttagatgcactttctttttccaccagcacatccttcaacacacagaatttcagggaagagttctccccaaaaccctagctctttacccttccattttagccttccacccagcttccacaaaagatttggctctaccttggatctgctagtaaataactaataggcaggcagttatttgggtaaggaaaaaaggggtgggagagacagaaaatttgcccatctgctgctcctcccccttggctctccacctgggatttgctattgaatctctaccctctcccaccacacagtactgattgctcactgaaagactcagcacccccaatggtgcgcggaagccaggcgggcgattacaatccaattacctattgtcgactcagcccacacaagcttttctcctcctcttgcagggcatggggccaggctccactcccaaatgagactggccccctccatggttcagggtaacagaagggcctgtaggccctggtgaactgaatccagcacaggcctcccctgtaacacaacaggactgagcagaaccaaacacttcttccaactgactctgctccctgccctcaccatctcaaactctgattcccactccactcttcgaggtttctctcagctttttgacctggctccctaagtaggccctagatgatttattcttggcatggcaaagcttgttctaggtcctctgcttgtgagggtcaaagctgtgtcctttcccttacctccctctgccaggacttgctgcagagctgctgagaggattagtgcctttgaagagctgtctgcctgagcaactctatttcaggtgccccacaccggcaagtaccagccagcaacaccaaccaaatgctactctctttaaagtccattttccttcttctttttttttttttttttggagacagcatctcaccctgtcctggctggtctcgaactcctgacctcaggtgatccgccggcctcaccctcccaaagtgctgggattacaggcatgagccaccatgccagacttcccattttactttctgcaagctgtttccctagcagctccctctaggggagaggtgaaatcttgcaagttgtagcaagagcacacaggaaacccctaactttcctataccccacccgcctcttcccctttctgtcccgggatacctggcggcaagagacttcttggctattgtccatgctcccagaatcaagcataaatgccagacacggcgattgagaagccaatcagtgaaccctttggcaaagcccccatccacacctggcactcccctctaccaatccctggcacagggttcctggagagcaggtgctgtacattttacagctttacaatggggctgttgacagccataattagggaggcatgaattatgcggctataatgcagagccctacaattaaggcgggaatgaggggctggaggcagcaaacggaatctgccctatgagcgtggctgttgagtcctgtctcctgggtctgactttccgtaatatgattggggtacagtagaggtgattaatggggctggcatctctctttggcctgaggttctgtattctgggaaaggtacacagggtggagtagggagaagctgccccaggaggcgatgtagtggtggaaagaagaggcagagaggtcgtcgtcgtcgcccagcagcaagggctgcaaaatagtagaactcgtggttgctttggacaggtgtgatttgtgcaagccaggttcaacccttgcctcaagaaatcagatgggaccaatttagtgtccttccacctgtgagccaagcccccatttgaggacatctatcgtattcttgtgtgctgggtctcaaatagaatttttaaagattc

SEQ ID NO: 5555 - DNA, 868 bp, Homo sapiens
  source 1..868: mol_type = unassigned DNA; mol_type = unassigned DNA
acgtcatgaggaagtgccggcccactgaagccgtggggacgcgcccagcggagctaatcagattacctggctggtgtttgcttgttctggagtgatcttctgactggaaaagaactatgtcatggatcaaggaaggagagctgtcactttgggagcggttctgtgccaacatcataaaggcaggcccaatgccgaaacacattgcattcataatggacgggaaccgtcgctatgccaagaagtgccaggtggagcggcaggaaggccactcacagggcttcaacaagctagctgagactctgcggtggtgtttgaacctgggcatcctagaggtgacagtctacgcattcagcattgagaacttcaaacgctccaagagtgaggtagacgggcttatggatctggcccggcagaagttcagccgcttgatggaagaaaaggagaaactgcagaagcatggggtgtgtatccgggtcctgggcgatctgcacttgttgcccttggatctccaggagctgattgcacaagctgtacaggccacgaagaactacaacaagtgtttcctgaatgtctgttttgcatacacatcccgtcatgagatcagcaatgctgtgagagagatggcctggggggtggagcaaggcctgttggatcccagtcgagacaggtttcaccatattggccaggctagtctcgaactcctgacgtcgtgatctgcctgcctcagcctcccaaagtgctgggattacaggcgtgagtcaccatgcccagccgattcagggatttttcaaaaagaaaattattaattattgtcaacatagtggaatcctaattattaaaggtggagagacttttgaagccatttaaa

SEQ ID NO: 5556 - DNA, 297 bp, Homo sapiens
  source 1..297: mol_type = unassigned DNA; mol_type = unassigned DNA
gaggaagtgccggcccactgaagccgtggggacgcgcccagcggagctaatcagattacctggctggtgtttgcttgttctggagtgatcttctgactggaaaagaactatgtcatggatcaaggaaggagagctgtcactttgggagcggttctgtgccaacatcataaaggtgagcaatggcccagagcaccggttggccttctggtcagttggataatcttatataaaaacctgttattaaagttgatgatgttaagtgcaattcatgatgttaagtggaatttagcaaggaaa

SEQ ID NO: 5557 - DNA, 656 bp, Homo sapiens
  source 1..656: mol_type = unassigned DNA; mol_type = unassigned DNA
gtgccggcccactgaagccgtggggacgcgcccagcggagctaatcagattacctggctggtgtttgcttgttctggagtgatcttctgactggaaaagaactatgtcatggatcaaggaaggagagctgtcactttgggagcggttctgtgccaacatcataaaggcaggcccaatgccgaaacacattgcattcataatggacgggaaccgtcgctatgccaagaagtgccaggtggagcggcaggaaggccactcacagggcttcaacaagctagctgagctccttgccttctcccctctcagactctgcggtggtgtttgaacctgggcatcctagaggtgacagtctacgcattcagcattgagaacttcaaacgctccaagagtgaggtagacgggcttatggatctggcccggcagaagttcagccgcttgatggaagaaaagtaagatgctatcagaggggagagcatgttcttccaccacccccagccttatcctaacccttgaaattctgttatctgaggcttacttaagggacttgcaactctttttaatgttagttagatatcttgggtggcaaatatcagaaatacaagatagtctttcattctttatttctaactttttaataaaaaagggggcatttattt

SEQ ID NO: 5558 - DNA, 1235 bp, Homo sapiens
  source 1..1235: mol_type = unassigned DNA; mol_type = unassigned DNA
actgaagccgtggggacgcgcccagcggagctaatcagattacctggctggtgtttgcttgttctggagtgatcttctgactggaaaagaactatgtcatggatcaaggaaggagagctgtcactttgggagcggttctgtgccaacatcataaaggcaggcccaatgccgaaacacattgcattcataatggacgggaaccgtcgctatgccaagaagtgccaggtggagcggcaggaaggccactcacagggcttcaacaagctagctgagactctgcggtggtgtttgaacctgggcatcctagaggtgacagtctacgcattcagcattgagaacttcaaacgctccaagagtgaggtagacgggcttatggatctggcccggcagaagttcagccgcttgatggaagaaaaggagaaactgcagaagcatggggtgtgtatccgggtcctgggcgatctgcacttgttgcccttggatctccaggagctgattgcacaagctgtacaggccacgaagaactacaacaatgatatctctgagtctctgcttgataagtgcctctataccaaccgctctcctcatcctgacatcttgatacggacttctggagaagtgcggctgagtgacttcttgctatggcagacctctcactcctgcctggtgttccaacccgttctgtggccagagtatacattttggaacctcttcgaggccatcctgcagttccagatgaaccatagcgtgcttcagaaggcccgagacatgtatgcagaggagcggaagaggcagcagctggagagggaccaggctacagtgacagagcagctgctgcgagaggggctccaagccagtggggacgcccagctccgaaggacacgcttgcacaaactctcggccagacgggaagagcgagtccaaggcttcctgcaggccttggaactcaagcgagctgactggctggcccgtctgggcactgcatcagcctgaatgaggctggccacctgccactttgccctgccctctgcctccagggctccactccccttccttttcttggtgaaaggcacctcctttcctgataatgaatggtgttccctttgcttggctggggagccccccaggccaggtttgctggccatagatacctttgggctgcctgggacaggctcctgaggaggattgagggtgaaagtctcccacgagtacactaaacctaggtctggtcacca

SEQ ID NO: 5559 - DNA, 1403 bp, Homo sapiens
  source 1..1403: mol_type = unassigned DNA; mol_type = unassigned DNA
actgaagccgtggggacgcgcccagcggagctaatcagattacctggctggtgtttgcttgttctggagtgatcttctgactggaaaagaactatgtcatggatcaaggaaggagagctgtcactttgggagcggttctgtgccaacatcataaaggcaggcccaatgccgaaacacattgcattcataatggacgggaaccgtcgctatgccaagaagtgccaggtggagcggcaggaaggccactcacagggcttcaacaagctagctgagactctgcggtggtgtttgaacctgggcatcctagaggtgacagtctacgcattcagcattgagaacttcaaacgctccaagagtgaggtagacgggcttatggatctggcccggcagaagttcagccgcttgatggaagaaaaggagaaactgcagaagcatggggtgtgtatccgggtcctgggcgatctgcacttgttgcccttggatctccaggagctgattgcacaagctgtacaggccacgaagaactacaacaagtgtttcctgaatgtctgttttgcatacacatcccgtcatgagatcagcaatgctgtgagagagatggcctggggggtggagcaaggcctgttggatcccagtgatatctctgagtctctgcttgataagtgcctctataccaaccgctctcctcatcctgacatcttgatacggacttctggagaagtgcggctgagtgacttcttgctatggcagacctctcactcctgcctggtgttccaacccgttctgtggccagagtatacattttggaacctcttcgaggccatcctgcagttccagatgaaccatagcgtgcttcagaaggcccgagacatgtatgcagaggagcggaagaggcagcagctggagagggaccaggctacagtgacagagcagctgctgcgagaggggctccaagccagtggggacgcccagctccgaaggacacgcttgcacaaactctcggccagacgggaagagcgagtccaaggcttcctgcaggccttggaactcaagcgagctgactggctggcccgtctgggcactgcatcagcctgaatgaggctggccacctgccactttgccctgccctctgcctccagggctccactccccttccttttcttggtgaaaggcacctcctttcctgataatgaatggtgttccctttgcttggctggggagccccccaggccaggtttgctggccatagatacctttgggctgcctgggacaggctcctgaggaggattgagggtgaaagtctcccacgagtacactaaacctaggtctggtcaccaatagggtttggagagcaaagggccacaactcatcagctgcctgtctcttagatgcactttcttttt

SEQ ID NO: 5560 - DNA, 1072 bp, Homo sapiens
  source 1..1072: mol_type = unassigned DNA; mol_type = unassigned DNA
ctgaagccgtggggacgcgcccagcggagctaatcagattacctggctggtgtttgcttgttctggagtgatcttctgactggaaaagaactatgtcatggatcaaggaaggagagctgtcactttgggagcggttctgtgccaacatcataaaggcaggcccaatgccgaaacacattgcattcataatggacgggaaccgtcgctatgccaagaagtgccaggtggagcggcaggaaggccactcacagggcttcaacaagctagctgagactctgcggtggtgtttgaacctgggcatcctagaggtgacagtctacgcattcagcattgagaacttcaaacgctccaagagtgaggtagacgggcttatggatctggcccggcagaagttcagccgcttgatggaagaaaagtgtttcctgaatgtctgttttgcatacacatcccgtcatgagatcagcaatgctgtgagagagatggcctggggggtggagcaaggcctgttggatcccagtgatatctctgagtctctgcttgataagtgcctctataccaaccgctctcctcatcctgacatcttgatacggacttctggagaagtgcggctgagtgacttcttgctatggcagacctctcactcctgcctggtgttccaacccgttctgtggccagagtatacattttggaacctcttcgaggccatcctgcagttccagatgaaccatagcgtgcttcagaaggcccgagacatgtatgcagaggagcggaagaggcagcagctggagagggaccaggctacagtgacagagcagctgctgcgagaggggctccaagccagtggggacgcccagctccgaaggacacgcttgcacaaactctcggccagacgggaagagcgagtccaaggcttcctgcaggccttggaactcaagcgagctgactggctggcccgtctgggcactgcatcagcctgaatgaggctggccacctgccactttgccctgccctctgcctccagggctccactccccttccttttcttggtgaaaggcacctcctttcctgataa

SEQ ID NO: 5561 - DNA, 1148 bp, Homo sapiens
  source 1..1148: mol_type = unassigned DNA; mol_type = unassigned DNA
gaagccgtggggacgcgcccagcggagctaatcagattacctggctggtgtttgcttgttctggagtgatcttctgactggaaaagaactatgtcatggatcaaggaaggagagctgtcactttgggagcggttctgtgccaacatcataaaggcaggcccaatgccgaaacacattgcattcataatggacgggaaccgtcgctatgccaagaagtgccaggtggagcggcaggaaggccactcacagggcttcaacaagctagctgagactctgcggtggtgtttgaacctgggcatcctagaggtgacagtctacgcattcagcattgagaacttcaaacgctccaagagtgaggtagacgggcttatggatctggcccggcagaagttcagccgcttgatggaagaaaaggagaaactgcagaagcatggggtgtgtatccgggtcctgggcgatctgcacttgttgcccttggatctccaggagctgattgcacaagctgtacaggccacgaagaactacaacaagtgtttcctgaatgtctgttttgcatacacatcccgtcatgagatcagcaatgctgtgagagagatggcctggggggtggagcaaggcctgttggatcccaggtatcccgagttgttttgcatggtaattgttaaggaaaacaggcctgggccagcatggcagctcacgcctgtaatcctagcacattaggaggccgaggtgggcagtccacttgaggcaggccaggagttcaagaccagcctggccaacatggcaaaactccctcttttcaacaacaacaacaaaaaagcaggcctgtaccaaaccataaagcccctctgtgccatgtacttggccagaggtctaattaggggagcatgtggaaagatttaaggggatctcccaaatttagagattaggattggcttattacaacctgcttcagaactagagttcaccacacaccaagaaaccccagagaaagagcaaagcagatgacaaagccatgttattattcctttacaaattataccctcctggccctttggtagtgtttttccaagaatgacttttcatgaatgcagtttgttggggctagagttctttaggtctctcatgttctagttccacacaagatt

SEQ ID NO: 5562 - DNA, 717 bp, Homo sapiens
  source 1..717: mol_type = unassigned DNA; mol_type = unassigned DNA
gccgtggggacgcgcccagcggagctaatcagattacctggctggtgtttgcttgttctggagtgatcttctgactggaaaagaactatgtcatggatcaaggaaggagagctgtcactttgggagcggttctgtgccaacatcataaaggcaggcccaatgccgaaacacattgcattcataatggacgggaaccgtcgctatgccaagaagtgccaggtggagcggcaggaaggccactcacagggcttcaacaagctagctgaggtgggtgtgtatggcagagcccaaagtgaacagtctgtggagaggtagattatagctagaaaaccaggctctgagtttgctgtggttggagagtgttttttgtatctgtctctgtgttttattgtttgcttgctagctatagatctcatcttgacattggccagacgtggttgcttttgcctctaatcccacactttgggaggccaaggcaggaggattgcttgagcccaggggttcaggactagcccgggtaacatagtcagaccctgtctctacaaaaaaatttaaaaattagccagacttgatggtgcacacctgtgcccccagctactcaggaggctgaggtgggaggactatctgagcccaggaagcttgaggctgcagtgaatagagattgtgcccctgtactctagcctgggtgacagagtgacaccatctcaagaaaaaaaa

SEQ ID NO: 5563 - DNA, 3245 bp, Homo sapiens
  source 1..3245: mol_type = unassigned DNA; mol_type = unassigned DNA
cgcgcccagcggagctaatcagattacctggctggtgtttgcttgttctggagtgatcttctgactggaaaagaactatgtcatggatcaaggaaggagagctgtcactttgggagcggttctgtgccaacatcataaaggcaggcccaatgccgaaacacattgcattcataatggacgggaaccgtcgctatgccaagaagtgccaggtggagcggcaggaaggccactcacagggcttcaacaagctagctgagactctgcggtggtgtttgaacctgggcatcctagaggtgacagtctacgcattcagcattgagaacttcaaacgctccaagagtgaggtagacgggcttatggatctggcccggcagaagttcagccgcttgatggaagaaaaggagaaactgcagaagcatggggtgtgtatccgggtcctgggcgatctgcacttgttgcccttggatctccaggagctgattgcacaagctgtacaggccacgaagaactacaacaagtgtttcctgaatgtctgttttgcatacacatcccgtcatgagatcagcaatgctgtgagagagatggcctggggggtggagcaaggcctgttggatcccagtgatatctctgagtctctgcttgataagtgcctctataccaaccgctctcctcatcctgacatcttgatacggacttctggagaagtgcggctgagtgacttcttgctatggcagacctctcactcctgcctggtgttccaacccgttctgtggccagagtatacattttggaacctcttcgaggccatcctgcagttccagatgaaccatagcgtgcttcagcagaaggcccgagacatgtatgcagaggagcggaagaggcagcagctggagagggaccaggctacagtgacagagcagctgctgcgagaggggctccaagccagtggggacgcccagctccgaaggacacgcttgcacaaactctcggccagacgggaagagcgagtccaaggcttcctgcaggccttggaactcaagcgagctgactggctggcccgtctgggcactgcatcagcctgaatgaggctggccacctgccactttgccctgccctctgcctccagggctccactccccttccttttcttggtgaaaggcacctcctttcctgataatgaatggtgttccctttgcttggctggggagccccccaggccaggtttgctggccatagatacctttgggctgcctgggacaggctcctgaggaggattgagggtgaaagtctcccacgagtacactaaacctaggtctggtcaccaatagggtttggagagcaaagggccacaactcatcagctgcctgtctcttagatgcactttctttttccaccagcacatccttcaacacacagaatttcagggaagagttctccccaaaaccctagctctttacccttccattttagccttccacccagcttccacaaaagatttggctctaccttggatctgctagtaaataactaataggcaggcagttatttgggtaaggaaaaaaggggtgggagagacagaaaatttgcccatctgctgctcctcccccttggctctccacctgggatttgctattgaatctctaccctctcccaccacacagtactgattgctcactgaaagactcagcacccccaatggtgcgcggaagccaggcgggcgattacaatccaattacctattgtcgactcagcccacacaagcttttctcctcctcttgcagggcatggggccaggctccactcccaaatgagactggccccctccatggttcagggtaacagaagggcctgtaggccctggtgaactgaatccagcacaggcctcccctgtaacacaacaggactgagcagaaccaaacacttcttccaactgactctgctccctgccctcaccatctcaaactctgattcccactccactcttcgaggtttctctcagctttttgacctggctccctaagtaggccctagatgatttattcttggcatggcaaagcttgttctaggtcctctgcttgtgagggtcaaagctgtgtcctttcccttacctccctctgccaggacttgctgcagagctgctgagaggattagtgcctttgaagagctgtctgcctgagcaactctatttcaggtgccccacaccggcaagtaccagccagcaacaccaaccaaatgctactctctttaaagtccattttccttcttctttttttttttttttttggagacagcatctcaccctgtcctggctggtctcgaactcctgacctcaggtgatccgccggcctcaccctcccaaagtgctgggattacaggcatgagccaccatgccagacttcccattttactttctgcaagctgtttccctagcagctccctctaggggagaggtgaaatcttgcaagttgtagcaagagcacacaggaaacccctaactttcctataccccacccgcctcttcccctttctgtcccgggatacctggcggcaagagacttcttggctattgtccatgctcccagaatcaagcataaatgccagacacggcgattgagaagccaatcagtgaaccctttggcaaagcccccatccacacctggcactcccctctaccaatccctggcacagggttcctggagagcaggtgctgtacattttacagctttacaatggggctgttgacagccataattagggaggcatgaattatgcggctataatgcagagccctacaattaaggcgggaatgaggggctggaggcagcaaacggaatctgccctatgagcgtggctgttgagtcctgtctcctgggtctgactttccgtaatatgattggggtacagtagaggtgattaatggggctggcatctctctttggcctgaggttctgtattctgggaaaggtacacagggtggagtagggagaagctgccccaggaggcgatgtagtggtggaaagaagaggcagagaggtcgtcgtcgtcgcccagcagcaagggctgcaaaatagtagaactcgtggttgctttggacaggtgtgatttgtgcaagccaggttcaacccttgcctcaagaaatcagatgggaccaatttagtgtccttccacctgtgagccaagcccccatttgaggacatctatcgtattcttgtgtgctgggtctcaaatagaatttttaaagattc

SEQ ID NO: 5564 - DNA, 582 bp, Homo sapiens
  source 1..582: mol_type = unassigned DNA; mol_type = unassigned DNA
gagctaatcaggtgccactgaactgaagggattacctggctggtgtttgcttgttctggagtgatcttctgactggaaaagaactatgtcatggatcaaggaaggagagctgtcactttgggagcggttctgtgccaacatcataaaggcaggcccaatgccgaaacacattgcattcataatggacgggaaccgtcgctatgccaagaagtgccaggtggagcggcaggaaggccactcacagggcttcaacaagctagctgagactctgcggtggtgtttgaacctgggcatcctagaggtgacagtctacgcattcagcattgagaacttcaaacgctccaagagtgaggtagacgggcttatggatctggcccggcagaagttcagccgcttgatggaagaaaaggagaaactgcagaagcatggggtgtgtatccgggtcctgggcgatctgcacttgttgcccttggatctccaggagctgattgcacaagctgtacaggccacgaagaactacaacaagtgtttcctgaatgtctgttttgcatacacatcccgtcatgagatcagcaatgctgt

SEQ ID NO: 5565 - DNA, 496 bp, Homo sapiens
  source 1..496: mol_type = unassigned DNA; mol_type = unassigned DNA
agctaatcaggtgccactgaactgaaggggtgaactagaggagaagaggattacctggctggtgtttgcttgttctggagtgatcttctgactggaaaagaactatgtcatggatcaaggaaggagagctgtcactttgggagcggttctgtgccaacatcataaaggcaggcccaatgccgaaacacattgcattcataatggacgggaaccgtcgctatgccaagaagtgccaggtggagcggcaggaaggccactcacagggcttcaacaagctagctgagactctgcggtggtgtttgaacctgggcatcctagaggtgacagtctacgcattcagcattgagaacttcaaacgctccaagagtgaggtagacgggcttatggatctggcccggcagaagttcagccgcttgatggaagaaaaggagaaactgcagaagcatggggtgtgtatccgggtcctgggcgatctgcacttgttgcccttggatct

SEQ ID NO: 5566 - DNA, 573 bp, Homo sapiens
  source 1..573: mol_type = unassigned DNA; mol_type = unassigned DNA
gctaatcaggtgccactgaactgaaggggtgaactagaggagaagagggtgactgggcggggagcagctgcgggagaagcaaagggacgactgagggaataatcaggagaccactgaggcgtgaagtactaggcgtgcgataactgaaggaattacctggctggtgtttgcttgttctggagtgatcttctgactggaaaagaactatgtcatggatcaaggaaggagagctgtcactttgggagcggttctgtgccaacatcataaaggcaggcccaatgccgaaacacattgcattcataatggacgggaaccgtcgctatgccaagaagtgccaggtggagcggcaggaaggccactcacagggcttcaacaagctagctgagactctgcggtggtgtttgaacctgggcatcctagaggtgacagtctacgcattcagcattgagaacttcaaacgctccaagagtgaggtagacgggcttatggatctggcccggcagaagttcagccgcttgatggaagaaaaggagaaactgcagaagcatggggtgtgtatccgggtcctgggcg

SEQ ID NO: 5567 - DNA, 492 bp, Homo sapiens
  source 1..492: mol_type = unassigned DNA; mol_type = unassigned DNA
aatcaggtgccactgaactgaaggggtgaactagaggagaagagggtgactgggcggggagcagctgcgggagaagcaaagggacgactgagggaataatcaggagaccactgaggcgtgaagtactaggcgtgcgataactgaaggagttagtaactgggagcacagagttggaaacagcttaggggaagatggagaaggaagaaacggggaatgatcaagatattacctggctggtgtttgcttgttctggagtgatcttctgactggaaaagaactatgtcatggatcaaggaaggagagctgtcactttgggagcggttctgtgccaacatcataaaggcaggcccaatgccgaaacacattgcattcataatggacgggaaccgtcgctatgccaagaagtgccaggtggagcggcaggaaggccactcacagggcttcaacaagctagctgagactctgcggtggtgtttgaacctgggcatccta

SEQ ID NO: 5568 - DNA, 581 bp, Homo sapiens
  source 1..581: mol_type = unassigned DNA; mol_type = unassigned DNA
aatcaggtgccactgaactgaaggggtgaactagaggagaagagggtgactgggcggggagcagctgcgggagaagcaaagggacgactgagggaataatcaggagaccactgaggcgtgaagtactaggcgtgcgataactgaaggagttagtaactgggagcacagagttggaaacagcttaggggaagatggagaaggaagaaacggggaatgatcaagatgtgggcaccatgatgtggcaggaaaccgacttagatgttcagaagaaattacctggctggtgtttgcttgttctggagtgatcttctgactggaaaagaactatgtcatggatcaaggaaggagagctgtcactttgggagcggttctgtgccaacatcataaaggcaggcccaatgccgaaacacattgcattcataatggacgggaaccgtcgctatgccaagaagtgccaggtggagcggcaggaaggccactcacagggcttcaacaagctagctgagactctgcggtggtgtttgaacctgggcatcctagaggtgacagtctacgcattcagcattgagaacttcaaacgc

SEQ ID NO: 5569 - DNA, 516 bp, Homo sapiens
  source 1..516: mol_type = unassigned DNA; mol_type = unassigned DNA
aatcaggtgccactgaactgaaggggtgaactagaggagaagagggtgactgggcggggagcagctgcgggagaagcaaagggacgactgagggaataatcaggagaccactgaggcgtgaaattacctggctggtgtttgcttgttctggagtgatcttctgactggaaaagaactatgtcatggatcaaggaaggagagctgtcactttgggagcggttctgtgccaacatcataaaggcaggcccaatgccgaaacacattgcattcataatggacgggaaccgtcgctatgccaagaagtgccaggtggagcggcaggaaggccactcacagggcttcaacaagctagctgagactctgcggtggtgtttgaacctgggcatcctagaggtgacagtctacgcattcagcattgagaacttcaaacgctccaagagtgaggtagacgggcttatggatctggcccggcagaagttcagccgcttgatggaagaaaagtaagatgctatcaga

SEQ ID NO: 5570 - DNA, 548 bp, Homo sapiens
  source 1..548: mol_type = unassigned DNA; mol_type = unassigned DNA
aactgaaggggtgaactagaggagaagaggattacctggctggtgtttgcttgttctggagtgatcttctgactggaaaagaactatgtcatggatcaaggaaggagagctgtcactttgggagcggttctgtgccaacatcataaaggcaggcccaatgccgaaacacattgcattcataatggacgggaaccgtcgctatgccaagaagtgccaggtggagcggcaggaaggccactcacagggcttcaacaagctagctgagctccttgccttctcccctctcagactctgcggtggtgtttgaacctgggcatcctagaggtgacagtctacgcattcagcattgagaacttcaaacgctccaagagtgaggtagacgggcttatggatctggcccggcagaagttcagccgcttgatggaagaaaaggagaaactgcagaagcatggggtgtgtatccgggtcctgggcgatctgcacttgttgcccttggatctccaggagctgattgcacaagctgtacaggccacgaagaactacaacaa

SEQ ID NO: 5571 - DNA, 705 bp, Homo sapiens
  source 1..705: mol_type = unassigned DNA
gaaggggtgaactagaggagaagagggtgactgggcggggagcagctgcgggagaagcaaagggacgactgagggaataatcaggagaccactgaggcgtgaagtactaggcgtgcgataactgaaggaattacctggctggtgtttgcttgttctggagtgatcttctgactggaaaagaactatgtcatggatcaaggaaggagagctgtcactttgggagcggttctgtgccaacatcataaaggcaggcccaatgccgaaacacattgcattcataatggacgggaaccgtcgctatgccaagaagtgccaggtggagcggcaggaaggccactcacagggcttcaacaagctagctgagactctgcggtggtgtttgaacctgggcatcctagaggtgacagtctacgcattcagcattgagaacttcaaacgctccaagagtgaggtagacgggcttatggatctggcccggcagaagttcagccgcttgatggaagaaaaggagaaactgcagaagcatggggtgtgtatccgggtcctgggcgatctgcacttgttgcccttggatctccaggagctgattgcacaagctgtacaggccacgaagaactacaacaagtgtttcctgaatgtctgttttgcatacacatcccgtcatgagatcagcaatgctgtgagagagatggcctggggggtgga

SEQ ID NO: 5572 - DNA, 589 bp, Homo sapiens
  source 1..589: mol_type = unassigned DNA
gaactagaggagaagagggtgactgggcggggagcagctgcgggagaagcaaagggacgactgagggaataatcaggagaccactgaggcgtgaagtactaggcgtgcgataactgaaggaattacctggctggtgtttgcttgttctggagtgatcttctgactggaaaagaactatgtcatggatcaaggaaggagagctgtcactttgggagcggttctgtgccaacatcataaaggcaggcccaatgccgaaacacattgcattcataatggacgggaaccgtcgctatgccaagaagtgccaggtggagcggcaggaaggccactcacagggcttcaacaagctagctgagctccttgccttctcccctctcagactctgcggtggtgtttgaacctgggcatcctagaggtgacagtctacgcattcagcattgagaacttcaaacgctccaagagtgaggtagacgggcttatggatctggcccggcagaagttcagccgcttgatggaagaaaaggagaaactgcagaagcatggggtgtgtatccgggtcctgggcgatctgcacttgttgcccttggat

SEQ ID NO: 5573 - DNA, 556 bp, Homo sapiens
  source 1..556: mol_type = unassigned DNA
agaggagaagagggtgactgggcggggagcagctgcgggagaagcaaagggacgactgagggaataatcaggagaccactgaggcgtgaagtactaggcgtgcgataactgaaggagttagtaactgggagcacagagttggaaacagcttaggggaagatggagaaggaagaaacggggaatgatcaagatgtgggcaccatgatgtggcaggaaaccgacttagatgttcagaagaagtcagtgcagatacggaggaaatgggaatgggaagaagtctgcaaagccaggagaaccgaggaaaggcttttgcctccagagattacctggctggtgtttgcttgttctggagtgatcttctgactggaaaagaactatgtcatggatcaaggaaggagagctgtcactttgggagcggttctgtgccaacatcataaaggcaggcccaatgccgaaacacattgcattcataatggacgggaaccgtcgctatgccaagaagtgccaggtggagcggcaggaaggccactcacagggcttcaacaagctagctgag

SEQ ID NO: 5574 - DNA, 559 bp, Homo sapiens
  source 1..559: mol_type = unassigned DNA
cacattgcgttataaaactctgggtggtaaaagattataggcttagaccagtgtctttggattctaatgctggctgctctccatagtccatctgattccccagaagtcagttatagctcttcgcaaaccttggtgacttcttattttctttcttgtttatccaagattacctggctggtgtttgcttgttctggagtgatcttctgactggaaaagaactatgtcatggatcaaggaaggagagctgtcactttgggagcggttctgtgccaacatcataaaggcaggcccaatgccgaaacacattgcattcataatggacgggaaccgtcgctatgccaagaagtgccaggtggagcggcaggaaggccactcacagggcttcaacaagctagctgagactctgcggtggtgtttgaacctgggcatcctagaggtgacagtctacgcattcagcattgagaacttcaaacgctccaagagtgaggtagacgggcttatggatctggcccggcagaagttcagccgcttgatggaagaaaagtaagatgctatcaga

SEQ ID NO: 5575 - DNA, 595 bp, Homo sapiens
  source 1..595: mol_type = unassigned DNA; mol_type = unassigned DNA
gtctttggattctaatgctggctgctctccatagtccatctgattccccagaagtcagttatagctcttcgcaaaccttggtgacttcttattttctttcttgtttatccaagattacctggctggtgtttgcttgttctggagtgatcttctgactggaaaagaactatgtcatggatcaaggaaggagagctgtcactttgggagcggttctgtgccaacatcataaaggcaggcccaatgccgaaacacattgcattcataatggacgggaaccgtcgctatgccaagaagtgccaggtggagcggcaggaaggccactcacagggcttcaacaagctagctgagctccttgccttctcccctctcagactctgcggtggtgtttgaacctgggcatcctagaggtgacagtctacgcattcagcattgagaacttcaaacgctccaagagtgaggtagacgggcttatggatctggcccggcagaagttcagccgcttgatggaagaaaaggagaaactgcagaagcatggggtgtgtatccgggtcctgggcgatctgcacttgttgcccttggatctccaggagctgat

SEQ ID NO: 5576 - DNA, 703 bp, Homo sapiens
  source 1..703: mol_type = unassigned DNA
attacctggctggtgtttgcttgttctggagtgatcttctgactggaaaagaactatgtcatggatcaaggaaggagagctgtcactttgggagcggttctgtgccaacatcataaaggcaggcccaatgccgaaacacattgcattcataatggacgggaaccgtcgctatgccaagaagtgccaggtggagcggcaggaaggccactcacagggcttcaacaagctagctgagactctgcggtggtgtttgaacctgggcatcctagaggtgacagtctacgcattcagcattgagaacttcaaacgctccaagagtgaggtagacgggcttatggatctggcccggcagaagttcagccgcttgatggaagaaaagtgtttcctgaatgtctgttttgcatacacatcccgtcatgagatcagcaatgctgtgagagagatggcctggggggtggagcaaggcctgttggatcccagtgatatctctgagtctctgcttgataagtgcctctataccaaccgctctcctcatcctgacatcttgatacggacttctggagaagtgcggctgagtgacttcttgctatggcagacctctcactcctgcctggtgttccaacccgttctgtggccagagtatacattttggaacctcttcgaggccatcctgcagttccagatgaaccatagcgtgcttcag

SEQ ID NO: 5577 - DNA, 2673 bp, Homo sapiens
  source 1..2673: mol_type = unassigned DNA
ctggcccggcagaagttcagccgcttgatggaagaaaaggagaaactgcagaagcatggggtgtgtatccgggtcctgggcgatctgcacttgttgcccttggatctccaggagctgattgcacaagctgtacaggccacgaagaactacaacaatgatatctctgagtctctgcttgataagtgcctctataccaaccgctctcctcatcctgacatcttgatacggacttctggagaagtgcggctgagtgacttcttgctatggcagcagaaggcccgagacatgtatgcagaggagcggaagaggcagcagctggagagggaccaggctacagtgacagagcagctgctgcgagaggggctccaagccagtggggacgcccagctccgaaggacacgcttgcacaaactctcggccagacgggaagagcgagtccaaggcttcctgcaggccttggaactcaagcgagctgactggctggcccgtctgggcactgcatcagcctgaatgaggctggccacctgccactttgccctgccctctgcctccagggctccactccccttccttttcttggtgaaaggcacctcctttcctgataatgaatggtgttccctttgcttggctggggagccccccaggccaggtttgctggccatagatacctttgggctgcctgggacaggctcctgaggaggattgagggtgaaagtctcccacgagtacactaaacctaggtctggtcaccaatagggtttggagagcaaagggccacaactcatcagctgcctgtctcttagatgcactttctttttccaccagcacatccttcaacacacagaatttcagggaagagttctccccaaaaccctagctctttacccttccattttagccttccacccagcttccacaaaagatttggctctaccttggatctgctagtaaataactaataggcaggcagttatttgggtaaggaaaaaaggggtgggagagacagaaaatttgcccatctgctgctcctcccccttggctctccacctgggatttgctattgaatctctaccctctcccaccacacagtactgattgctcactgaaagactcagcacccccaatggtgcgcggaagccaggcgggcgattacaatccaattacctattgtcgactcagcccacacaagcttttctcctcctcttgcagggcatggggccaggctccactcccaaatgagactggccccctccatggttcagggtaacagaagggcctgtaggccctggtgaactgaatccagcacaggcctcccctgtaacacaacaggactgagcagaaccaaacacttcttccaactgactctgctccctgccctcaccatctcaaactctgattcccactccactcttcgaggtttctctcagctttttgacctggctccctaagtaggccctagatgatttattcttggcatggcaaagcttgttctaggtcctctgcttgtgagggtcaaagctgtgtcctttcccttacctccctctgccaggacttgctgcagagctgctgagaggattagtgcctttgaagagctgtctgcctgagcaactctatttcaggtgccccacaccggcaagtaccagccagcaacaccaaccaaatgctactctctttaaagtccattttccttcttctttttttttttttttttggagacagcatctcaccctgtcctggctggtctcgaactcctgacctcaggtgatccgccggcctcaccctcccaaagtgctgggattacaggcatgagccaccatgccagacttcccattttactttctgcaagctgtttccctagcagctccctctaggggagaggtgaaatcttgcaagttgtagcaagagcacacaggaaacccctaactttcctataccccacccgcctcttcccctttctgtcccgggatacctggcggcaagagacttcttggctattgtccatgctcccagaatcaagcataaatgccagacacggcgattgagaagccaatcagtgaaccctttggcaaagcccccatccacacctggcactcccctctaccaatccctggcacagggttcctggagagcaggtgctgtacattttacagctttacaatggggctgttgacagccataattagggaggcatgaattatgcggctataatgcagagccctacaattaaggcgggaatgaggggctggaggcagcaaacggaatctgccctatgagcgtggctgttgagtcctgtctcctgggtctgactttccgtaatatgattggggtacagtagaggtgattaatggggctggcatctctctttggcctgaggttctgtattctgggaaaggtacacagggtggagtagggagaagctgccccaggaggcgatgtagtggtggaaagaagaggcagagaggtcgtcgtcgtcgcccagcagcaagggctgcaaaatagtagaactcgtggttgctttggacaggtgtgatttgtgcaagccaggttcaacccttgcctcaagaaatcagatgggaccaatttagtgtccttccacctgtgagccaagcccccatttgaggacatctatcgtattcttgtgtgctgggtctcaaatagaatttttaaagattc

SEQ ID NO: 5578 - DNA, 629 bp, Homo sapiens
  source 1..629: mol_type = unassigned DNA; mol_type = unassigned DNA
gcacttgttgcccttggatctccaggagctgattgcacaagctgtacaggccacgaagaactacaacaagtgtttcctgaatgtctgttttgcatacacatcccgtcatgagatcagcaatgctgtgagagagatggcctggggggtggagcaaggcctgttggatcccagtgatatctctgagtctctgcttgataagtgcctctataccaaccgctctcctcatcctgacatcttgatacggacttctggagaagtgcggctgagtgacttcttgctatggcagacctctcactcctgcctggtgttccaacccgttctgtggccagagtatacattttggaacctcttcgaggccatcctgcagttccagatgaaccatagcgtgcttcagcacccagggagcctcctgaccaaggcctggaagaagcccttccagcaagacggagagctctacggcaactgttcaagcccgaagtcctcatagctccacatgtaattcattgtaatagcagaagagaagtattcttgaatgcctgggattattcaggagccgggggggacagtccagaattctcatttgtcatccttattcatgcagtaaacctttattgctgagagacagcaaa

SEQ ID NO: 5579 - DNA, 3917 bp, Homo sapiens
  source 1..3917: mol_type = unassigned DNA; mol_type = unassigned DNA
agtcccagacagaacctactatgtgcggcggcagctggggcgggaaggcgggagctgggggcgctgggggcgctgcggccgctgcggccgctgcagccgctgcagcgccagggtccacctggtcggctgcacctgtggaggaggaggtggatttcaggcttcccgtagactggaagaatcggctcaaaaccgcttgcctcgcaggggctgagctggaggcagcgaggccgcccgacgcaggcttccggcgagacatggcagggcaaggatggcagcccggcggcagggcctggcgaggagcgcgagcccgcggccgcagttcccaggcgtctgcgggcgcgagcacgccgcgaccctgcgtgcgccggggcgggggggcggggcctcgcctgcacaaatggggacgaggggggcggggcggccacaatttcgcgccaaacttgaccgcgcgttctgctgtaacgagcgggctcggaggtcctcccgctgctgtcatggttggttcgctaaactgcatcgtcgctgtgtcccagaacatgggcatcggcaagaacggggacctgccctggccaccgctcaggaatgaattcagatatttccagagaatgaccacaacctcttcagtagaaggtaaacagaatctggtgattatgggtaagaagacctggttctccattcctgagaagaatcgacctttaaagggtagaattaatttagttctcagcagagaactcaaggaacctccacaaggagctcattttctttccagaagtctagatgatgccttaaaacttactgaacaaccagaattagcaaataaagtagacatggtctggatagttggtggcagttctgtttataaggaagccatgaatcacccaggccatcttaaactatttgtgacaaggatcatgcaagactttgaaagtgacacgttttttccagaaattgatttggagaaatataaacttctgccagaatacccaggtgttctctctgatgtccaggaggagaaaggcattaagtacaaatttgaagtatatgagaagaatgattaatatgaaggtgttttctagtttaagttgttccccctccctctgaaaaaagtatgtatttttacattagaaaaggttttttgttgactttagatctataattatttctaagcaactagtttttattccccactactcttgtctctatcagataccatttatgagacattcttgctataactaagtgcttctccaagaccccaactgagtccccagcacctgctacagtgagctgccattccacacccatcacatgtggcactcttgccagtccttgacattgtcgggcttttcacatgttggtaatatttattaaagatgaagatccacatacccttcaactgagcagtttcactagtggaaataccaaaagcttcctacgtgtatatccagaggtttgtagataaatgttgccaccttgtttgtaacagtgaaaaattgaaaacaacctggaagtccagtgatgggaaaatgagtatgtttctgtcttagattggggaacccaaagcagattgcaagactgaaatttcagtgaaagcagtgtatttgctaggtcataccagaaatcatcaattgaggtacggagaaactgaactgagaaggtaagaaaagcaatttaaagtcagcgagcaggttctcattgataacaagctccatactgctgagatacagggaaatggaggggggaaagctggagtattgatcccgcccccctccttggttgtcagctccctgtcctgtgtgtgggcggaacatagtccagctgctctatagcaagtctcaggtgtttgcagtaagaagctgctggcatgcacgggaacagtgaatgccaaacacttaaagcaattcgatgtttaagtatgtaagttcttttttttttagacagcgtttcgctcttgttgcccaggctagcatgcaatggtgtgacctcggcttactgcaacctccgccttcccagattcaagcgattctcctgcctcaggctcccaagtagctaggaccaggtgcgcgccaccacgcccggctaatttttgtattttgtatttttagtagagatggggtttcaccatgttggtcaggctagtctcgaactcgtgaccgcaagcgattcacccacctcagcctcccaaagtgctgggattaccggcttgagccaccacacccggcacatcttcattctttttatgtagtaaaaagtataaggccacacatggtttatttgaagtattttataatttaaaaaaatacagaagcaggaaaaccaattataagttcaagtgagggatgatggttgcttgaaccaaagggttgcatgtagtaagaaattgtgatttaagatatattttaaagttataagtagcaggatattctgatggagtttgactttggttttgggcccagggagtttcagatgcctttgagaaatgaatgaagtagagagaaaataaaagaaaaaccagccaggcacagtggctcacacctgtaatcccagcgctttgggaggctaaggcaggcagatcacttgagaccagcttgggcaacatggcaaagccccatctctacaaaaaacacaaaaattagctgggcattgtggcgcacacctgtattcccatctagtcaggaagctgagatggaagaattaattgagcccacgagttcaaggctgcagtgagtcgtgattgtgccactgcactccagccggggtgacagaagagaccttgtctcgaaaaggaatctgaaaacaatggaaccatgccttcataattctagaaagttattttcaactgataaatctatattcacccaaataatcaagggtgaaggtaaaataatacatttttagacaagcaaagactcaggggttacctccatgtgccctttttagggaagctgttggagaaaatactccagcaaaatgaaggagtacacaaaccagagaatgacatgaatccagcaaataggatccaacacaggcaatattccagctatggagctagctttaaaaaggaacagtaaaaatattaatcggttagctgggtggaatggcccatgcctgtagtcccagctactcaggaggctcagcagcaggacgacttgagcccaagagttccagaccagcctggccaccttagtgagatcccttctcttaaaaataataacttattgccagatttggggcatttggaaagaagttcattgaagataaagcaaaagtaaaaaaaaaaaaaaaaaaaacaaggggaaagggttggttaggcaatcattctagggcagaaagaagtacaggataggaagagcataatacactgtttttctcaacaaggagcagtatgtacacagtcataatgatgtgactgcttagcccctaaatatggtaactactctgggacaatatgggaggaaaagtgaagattgtgatggtgtaagagctaaatcctcatctgtcatatccagaaatcactatataatatataataatgaaatgactaagttatgtgaggaaaaaaacagaagacattgctaaaagagttaaaagtcattgctctggagaattaggagggatggggcaggggactgttaggatgcattataaactgaaaagcctttttaaaattttatgtattaatatatgcattcacttgaaaaactaaaaaaaaacaataatttggaaaaacccatgaaggtaactaacggaaggaaaaactaagagaatgaaaagtatttgcctctggaaagaacaactggcaggactgttgttttcattgtaagacttttggagccatttaattgtacttaaccattttcatctatttctttaataagaacaattccatcttaataaagagttacacttgttaataa

SEQ ID NO: 5580 - DNA, 1719 bp, Homo sapiens
  source 1..1719: mol_type = unassigned DNA; mol_type = unassigned DNA
gcggccgcagttcccaggcgtctgcgggcgcgagcacgccgcgaccctgcgtgcgccggggcgggggggcggggcctcgcctgcacaaatggggacgaggggggcggggcggccacaatttcgcgccaaacttgaccgcgcgttctgctgtaacgagcgggctcggaggtcctcccgctgctgtcatggttggttcgctaaactgcatcgtcgctgtgtcccagaacatgggcatcggcaagaacggggacctgccctggccaccgctcaggaatgaattcagatatttccagagaatgaccacaacctcttcagtagaaggtaaacagaatctggtgattatgggtaagaagacctggttctccattcctgagaagaatcgacctttaaagggtagaattaatttagttctcagcagagaactcaaggaacctccacaaggagctcattttctttccagaagtctagatgatgccttaaaacttactgaacaaccagaattagcaaataaagtagacatggtctggatagttggtggcagttctgtttataaggaagccatgaatcacccaggccatcttaaactatttgtgacaaggatcatgcaagactttgaaagtgacacgttttttccagaaattgatttggagaaatataaacttctgccagaatacccaggtgttctctctgatgtccaggaggagaaaggcattaagtacaaatttgaagtatatgagaagaatgattaatatgaaggtgttttctagtttaagttgttccccctccctctgaaaaaaataccatttatgagacattcttgctataactaagtgcttctccaagaccccaactgagtccccagcacctgctacagtgagctgccattccacacccatcacatgtggcactcttgccagtccttgacattgtcgggcttttcacatgttggtaatatttattaaagatgaagatccacatacccttcaactgagcagtttcactagtggaaataccaaaagcttcctacgtgtatatccagaggtttgtagataaatgttgccaccttgtttgtaacagtgaaaaattgaaaacaacctggaagtccagtgatgggaaaatgagtatgtttctgtcttagattggggaacccaaagcagattgcaagactgaaatttcagtgaaagcagtgtatttgctaggtcataccagaaatcatcaattgaggtacggagaaactgaactgagaaggtaagaaaagcaatttaaagtcagcgagcaggttctcattgataacaagctccatactgctgagatacagggaaatggaggggggaaagctggagtattgatcccgcccccctccttggttgtcagctccctgtcctgtgtgtgggcggaacatagtccagctgctctatagcaagtctcaggtgtttgcagtaagaagctgctggcatgcacgggaacagtgaatgccaaacacttaaagcaattcgatgtttaagtatgtaagttcttttttttttagacagcgtttcgctcttgttgcccaggctagcatgcaatggtgtgacctcggcttactgcaacctccgccttcccagattcaagcgattctcctgcctcaggctcccaagtagctaggaccaggtgcgcgccaccacgcccggctaatttttgtattttgtatttttagtagagatggggtttcaccatgtt

SEQ ID NO: 5581 - DNA, 1474 bp, Homo sapiens
  source 1..1474: mol_type = unassigned DNA; mol_type = unassigned DNA
gcgccaaacttgaccgcgcgttctgctgtaacgagcgggctcggaggtcctcccgctgctgtcatggttggttcgctaaactgcatcgtcgctgtgtcccagaacatgggcatcggcaagaacggggacctgccctggccaccgctcaggaatgaattcagatatttccagagaatgaccacaacctcttcagtagaaggtaaacagaatctggtgattatgggtaagaagacctggttctccattcctgagaagaatcgacctttaaagggtagaattaatttagttctcagcagagaactcaaggaacctccacaaggagctcattttctttccagaagtctagatgatgccttaaaacttactgaacaaccagaattagcaaataaagtagacatggtctggatagttggtggcagttctgtttataagatacccaggtgttctctctgatgtccaggaggagaaaggcattaagtacaaatttgaagtatatgagaagaatgattaatatgaaggtgttttctagtttaagttgttccccctccctctgaaaaaagtatgtatttttacattagaaaaggttttttgttgactttagatctataattatttctaagcaactagtttttattccccactactcttgtctctatcagataccatttatgagacattcttgctataactaagtgcttctccaagaccccaactgagtccccagcacctgctacagtgagctgccattccacacccatcacatgtggcactcttgccagtccttgacattgtcgggcttttcacatgttggtaatatttattaaagatgaagatccacatacccttcaactgagcagtttcactagtggaaataccaaaagcttcctacgtgtatatccagaggtttgtagataaatgttgccaccttgtttgtaacagtgaaaaattgaaaacaacctggaagtccagtgatgggaaaatgagtatgtttctgtcttagattggggaacccaaagcagattgcaagactgaaatttcagtgaaagcagtgtatttgctaggtcataccagaaatcatcaattgaggtacggagaaactgaactgagaaggtaagaaaagcaatttaaagtcagcgagcaggttctcattgataacaagctccatactgctgagatacagggaaatggaggggggaaagctggagtattgatcccgcccccctccttggttgtcagctccctgtcctgtgtgtgggcggaacatagtccagctgctctatagcaagtctcaggtgtttgcagtaagaagctgctggcatgcacgggaacagtgaatgccaaacacttaaagcaattcgatgtttaagtatgtaagttcttttttttttagacagcgtttcgctcttgttgcccaggctagcatgcaatggtgtgacctcggcttactgcaacctccgccttcccagattcaagc

SEQ ID NO: 5582 - DNA, 1447 bp, Homo sapiens
  source 1..1447: mol_type = unassigned DNA; mol_type = unassigned DNA
aatttcgcgccaaacttgaccgcgcgttctgctgtaacgagcgggctcggaggtcctcccgctgctgtcatggttggttcgctaaactgcatcgtcgctgtgtcccagaacatgggcatcggcaagaacggggacctgccctggccaccgctcaggtaaacagaatctggtgattatgggtaagaagacctggttctccattcctgagaagaatcgacctttaaagggtagaattaatttagttctcagcagagaactcaaggaacctccacaaggagctcattttctttccagaagtctagatgatgccttaaaacttactgaacaaccagaattagcaaataaagtagacatggtctggatagttggtggcagttctgtttataaggaagccatgaatcacccaggccatcttaaactatttgtgacaaggatcatgcaagactttgaaagtgacacgttttttccagaaattgatttggagaaatataaacttctgccagaatacccaggtgttctctctgatgtccaggaggagaaaggcattaagtacaaatttgaagtatatgagaagaatgattaatatgaaggtgttttctagtttaagttgttccccctccctctgaaaaaagtatgtatttttacattagaaaaggttttttgttgactttagatctataattatttctaagcaactagtttttattccccactactcttgtctctatcagataccatttatgagacattcttgctataactaagtgcttctccaagaccccaactgagtccccagcacctgctacagtgagctgccattccacacccatcacatgtggcactcttgccagtccttgacattgtcgggcttttcacatgttggtaatatttattaaagatgaagatccacatacccttcaactgagcagtttcactagtggaaataccaaaagcttcctacgtgtatatccagaggtttgtagataaatgttgccaccttgtttgtaacagtgaaaaattgaaaacaacctggaagtccagtgatgggaaaatgagtatgtttctgtcttagattggggaacccaaagcagattgcaagactgaaatttcagtgaaagcagtgtatttgctaggtcataccagaaatcatcaattgaggtacggagaaactgaactgagaaggtaagaaaagcaatttaaagtcagcgagcaggttctcattgataacaagctccatactgctgagatacagggaaatggaggggggaaagctggagtattgatcccgcccccctccttggttgtcagctccctgtcctgtgtgtgggcggaacatagtccagctgctctatagcaagtctcaggtgtttgcagtaagaagctgctggcatgcacgggaacagtgaatgccaaacacttaaagcaattcgatgtttaagtatgtaag

SEQ ID NO: 5583 - DNA, 994 bp, Homo sapiens
  source 1..994: mol_type = unassigned DNA; mol_type = unassigned DNA
aaacttgaccgcgcgttctgctgtaacgagcgggctcggaggtcctcccgctgctgtcatggttggttcgctaaactgcatcgtcgctgtgtcccagaacatgggcatcggcaagaacggggacctgccctggccaccgctcaggtaaacagaatctggtgattatgggtaagaagacctggttctccattcctgagaagaatcgacctttaaagggtagaattaatttagttctcagcagagaactcaagaagccatgaatcacccaggccatcttaaactatttgtgacaaggatcatgcaagactttgaaagtgacacgttttttccagaaattgatttggagaaatataaacttctgccagaatacccaggtgttctctctgatgtccaggaggagaaaggcattaagtacaaatttgaagtatatgagaagaatgattaatatgaaggtgttttctagtttaagttgttccccctccctctgaaaaaagtatgtatttttacattagaaaaggttttttgttgactttagatctataattatttctaagcaactagtttttattccccactactcttgtctctatcagataccatttatgagacattcttgctataactaagtgcttctccaagaccccaactgagtccccagcacctgctacagtgagctgccattccacacccatcacatgtggcactcttgccagtccttgacattgtcgggcttttcacatgttggtaatatttattaaagatgaagatccacatacccttcaactgagcagtttcactagtggaaataccaaaagcttcctacgtgtatatccagaggtttgtagataaatgttgccaccttgtttgtaacagtgaaaaattgaaaacaacctggaagtccagtgatgggaaaatgagtatgtttctgtcttagattggggaacccaaagcagattgcaagactgaaatttcagtgaaagcagtgtatttgcta

SEQ ID NO: 5584 - DNA, 545 bp, Homo sapiens
  source 1..545: mol_type = unassigned DNA; mol_type = unassigned DNA
ccaagggataatgtttcgagtaacgctgtttctctaacttgtaggaatgaattcagatatttccagagaatgaccacaacctcttcagtagaaggtaaacagaatctggtgattatgggtaagaagacctggttctccattcctgagaagaatcgacctttaaagggtagaattaatttagttctcagcagagaactcaaggaacctccacaaggagctcattttctttccagaagtctagatgatgccttaaaacttactgaacaaccagaattagcaaataaagtagacatggtctggatagttggtggcagttctgtttataaggaagccatgaatcacccaggccatcttaaactatttgtgacaaggatcatgcaagactttgaaagtgacacgttttttccagaaattgatttggagaaatataaacttctgccagaatacccaggtgttctctctgatgtccaggaggagaaaggcattaagtacaaatttgaagtatatgagaagaatgattaatatgaaggtgttttctagtttaa

SEQ ID NO: 5585 - DNA, 582 bp, Homo sapiens
  source 1..582: mol_type = unassigned DNA; mol_type = unassigned DNA
agaatgaccacaacctcttcagtagaaggtaaacagaatctggtgattatgggtaagaagacctggttctccattcctgagaagaatcgacctttaaagggtagaattaatttagttctcagcagagaactcaagtaagtaccttaacataaattcaccacaagaaaatcatgtctcatagtggagatcagtatatgataaaatgaaattgtataaaaggagctattgatgaagctgcttaatatcacaaaggtgattatagaaaattaataagcagttatttatactacatgacaataacttattctactacctgagtaattgatttcatcaccttgaaaagttacattaaacattaaatagctcactgtggtatcagatttgcaagttatcttgaaccatcattcagtaggcccaaatataaattatacagtgtaatcaataacctgtagtttcacataaagtcaaaacaactattttttgggacttgctaaaattaagtgatgatcccctttctggacccaaccctaaatgcaataaaatgtgaattttaggatgggctgaaatgggtcataatcttct

SEQ ID NO: 5586 - DNA, 4386 bp, Homo sapiens
  source 1..4386: mol_type = unassigned DNA; mol_type = unassigned DNA
atttaagcaggagcagcagcctctgcagcagttggcacatctgagaaggcagagattgaagagagtaggaggagcgtgcagcggcggtgacagtgccaggccggagcggctcaggccagcgcaggtgcaggggctgcgagcgggtggagcgcgagggcgctgggcgcagggagcacggccggtgggcggtgcagggcgcacggcgggcgagcagctgacagcatcgtcacggcggcgggagggagtgcgctgcgcctgcctccgggaggagccgcatccacacaccctgcgctgccctgtcctgcgcgagtggagctctgaagaagctctgagcggagttgtgttcttccccaggtgcgtcctggctgagagttggagctctccagcaacatgcctgagcagagtaacgattaccgggtggccgtgtttggggctggcggtgttggcaagagctccctggtgttgaggtttgtgaaaggcacattccgggagagctacatcccgacggtggaagacacctaccggcaagtgatcagctgtgacaagagcatatgcacattgcagatcaccgacacgacggggagccaccagttcccggccatgcagcggctgtccatctccaaagggcacgccttcatcctggtgtactccattaccagccgacagtccttggaggagctcaagcccatctacgaacaaatctgcgagatcaaaggggacgtggagagcatccccatcatgctggtggggaacaagtgtgatgagagccccagccgcgaggtgcagagcagcgaggcggaggccttggcccgcacatggaagtgtgccttcatggagacctcagccaagctcaaccataacgtgaaggagcttttccaggagctgctcaacctggagaagcgcaggaccgtgagtctccagatcgacgggaaaaagagcaagcagcagaaaaggaaagagaagctcaaaggcaagtgcgtgatcatgtgaaggcccttcctgcgggaggagcagctgtgtgtccccggcacctcactcccccaaaatgacacccaccgtcgtcagggtagcatgtataatgcccacgtgttaaacattgcatttaatcgagatgcgtcctattgtccttaagagggcgtttcacaccaccaacagtaagccacccactctggagtcacagaatctgccaggcggttcaagtgaaaaccaacacactcagcatccctgggaactgagaggtgccagcaattgctgaaggtggcgatgaacacccgaaggtgggagggaggactggtacccacaaagcaacatgtaccgagaggactaaatgtcatctacgtgcatgtgagagcgtgttaacctagagttacctgcaccaaccccagacagaagccaatcacatctttgggggaggggaggggcaggaagaggtgagaagatcagatggtccaaagtggaccacacttggtccattttacacttttttaaaggggattaaaaaacacagcctctcccccaaagggtgtccgttcttaattcccacctggcctgttaggagccttgctaccctgaggggatgtgttcaccttacctagacctagttaggaagtatcattttaagctattagagtatttatcttcatgtgcagggataagtgcactaacagtgtgctgctctgtcggaagttcttcagtttttaagtgaggatatcgtgacagtattaaaacatcgcaataatgttcctgtgtgttatacatcgagggttttagaaatgtgattttcttcttttgacctgtgaggagtataacttctttcagccctcagattttaaatacaagcaaataaactcactatttttagacgtttttttcctccaaggtggttttcttctcttaaataactcgatctgtacccagctgggtagcagccagcaaaggccatcagacaaccagaagcacatccatttttgtagtgtcacaaacatgtatatgccacactttgcaccttaatgaaatactttgaaacagaagttattcactgtgtttttgatgatctatctgtattggaaatatgttcctggaaaatgcatttaaataatagtaaattctcttgcatgttccattatacgtgtcttctaagagctgttcaatacagtattcactctagaaacaattatctttttctcttaatgattttgtgtgcatctttaatctttcaagccaaattacagctatttcaggtttcctgtgttagcttggggataggatggtggctggagacaggcaggcttctctgccctgggaagagcccactcagcttaattgctctgccatcgtagagcctggttggacttggcttcctgaaaactcccactgatagtgcctgttagatctcctgtttgtttcagttggcagaacatttactggccccaactgtggcatcatcctctcagcagtcttcctgtcacccgcctggcaggcagaaggagctgcagtcccacgtgggcctgcctgggggggtgggggctgcatggctgttgggtggcagtgtcagcacagggagggcttaagttggggatgtttgaccaggccacctcctgcaactgctgtttctcctgtccctcctatgcagggcttgcagcagcagcagtgtggccatctccatcccccaaagcacacttgctctctcaatatgtcctagttttcttcagccttttctggttcagttcccttgtcctgatctcatcctctctggtctcccaataactcacccttgggatgtgtttagagcgtgggaggtgcctttgagaactgcttgactccatgatctcctagaacaaaaccgccctgactttacagggggaacactcatgctgagctgagaaagcagagaagtggcgtgggagccagctgggggtgaagagcatttgggccagtcccgtggcccccttcagattcctcaagcaggattgttctgttctaaaaagctgttgcacagcattcgcaatgagatctttagttggcggattttctggaacatttgtttttcaacttgtcccgacattttttttctgtttctattctgagagagagatgatcaagttttaatttgggtataggttaaatggaagaagaaacagaacttcatggccaaagtagacctatagattttgattgggttctttgttaacagtagaatgcgatctttgccactgactgtagtattaataaggttttaatgtgagatattcctgcaaaccatcccatttctactgattgtaagtcagaatttcttttatccctttcaaatcagtttctacatgtttaagtgttcagggcttcatcagcatgagaagtttgtaattactgaaagtctgatttcattcaggacacattttttccttcatattttttctgtgaatttataggctaggaaggctattgaagcctcaattatgggtcttcattttgagatcgttttctatgagctgaactgaggatatcaatggttatctcaaaatcgtcttttaggagatccccaattgactcagagtttgaggagttagtatcacagaattagatttttttaaagcatttgtacgtttccattcccaaatatgtagctgtggttcttgaaaacacatcctacattgcatatgggcatagcagtttttgacccaggcagaataagttaatatttaattaaatattgctttgaagatggcgctctgggcatgagcatggggctccatgacttcccttctatccccatgagcccctcctccatccagcgacaagccatgggcatgcatacaatgcagcaagaccaacacaagagcaatattgaattgttcattctatctaaaattacatgtatataaaatatataatttatcttcctgcatttttgaagtataaagtcataaattgtacatatctgtaagctagtatatttgtttcactgtttgtaatatttaagaaatgctcattctttgtagaacaaaaatgtattaaatattttaaaaattgctctgtgatacttaatttttttccccaaaatttgtaatgtgttgcttctacataagttctctggaaatatctacaactaataggacacatgtaaatccttgaagacacatcctggaattcataccccacaaggacagtgtgtatacaaagtatttgcagagcatgacttttatatgtgtgggatatcaatgtgtatatttatatttaaagtgtatttattgttacaagtctattctctattatattttatttactctgcggttataaaaatcacccttgcatacaagtttctagttgccagtgatgttctggaaataatgggagatattacaataaagctacagttatgacaccctg

SEQ ID NO: 5587 - DNA, 565 bp, Homo sapiens
  source 1..565: mol_type = unassigned DNA; mol_type = unassigned DNA
acaccctgcgctgccctgtcctgcgcgagtggagctctgaagaagctctgagcggagttgtgttcttccccagagtctcgtgctgtcacccaggctggagtatagtggcacaatctcggctcactgcaacctctgcctcctgggttcaagcgattctcctgcctcagcctccagagtagctgggattacaggtgcgtcctggctgagagttggagctctccagcaacatgcctgagcagagtaacgattaccgggtggccgtgtttggggctggcggtgttggcaagagctccctggtgttgaggtttgtgaaaggcacattccgggagagctacatcccgacggtggaagacacctaccggcaagtgatcagctgtgacaagagcatatgcacattgcagatcaccgacacgacggggagccaccagttcccggccatgcagcggctgtccatctccaaagggcacgccttcatcctggtgtactccattaccagccgacagtccttggaggagctcaagcccatctacgaacaaatctgcgagatcaaaggggacgtggagag

SEQ ID NO: 5588 - DNA, 576 bp, Homo sapiens
  source 1..576: mol_type = unassigned DNA; mol_type = unassigned DNA
agtgcgctgcgcctgcctccgggaggagccgcatccacacaccctgcgctgccctgtcctgcgcgagtggagctctgaagaagctctgagcggagttgtgttcttccccagagtctcgtgctgtcacccaggctggagtatagtggcacaatctcggctcactgcaacctctgcctcctgggttcaagcgattctcctgcctcagcctccagagtagctgggattacaggcacgtaccaccacacctggctaattttttgtatttttagtagagatggggtttcaccatgttagccaggatggtcttgatctcctgacctcatgatccatccaccccagtcttctaaagtgctgggattacagatgtgagtcaccgcgcccagacaagaaggatctcttttaattttcttggtgcgtcctggctgagagttggagctctccagcaacatgcctgagcagagtaacgattaccgggtggccgtgtttggggctggcggtgttggcaagagctccctggtgttgaggtttgtgaaaggcacattccgggagagctacatcccgacggtggaagacacc

SEQ ID NO: 5589 - DNA, 12614 bp, Homo sapiens
  source 1..12614: mol_type = unassigned DNA; mol_type = unassigned DNA
cgccgccgctgccgccgccaccgccgccgccgccgccgccgccgcggcttcagcaccagcgcccggacagcggtgccgcccacgggcatggacggtgacagcagcagcagcagcggcggcagcggtccggctcccggcccgggtccggaaggggagcaacggcccgagggggagcccttggccccagacggcggctccccggacagcacccagaccaaggctgtgccccctgaggcaagcccagagagaagctgctccctccacagctgccccctggaggacccttccagctcttcaggacccccaccaacaacttccaccctccagcctgtgggtccatccagccccttggcccctgcccacttcacctatccccgggcactgcaggaataccaggggggcagttccctgccaggacttggggatcgggcagctctctgctcccacggctccagcctcagcccttctccagccccctcacagcgcgatgggacctggaagccacccgctgtgcagcaccatgtggtcagcgtcaggcaggaacgagccttccagatgccaaagagctattcccagctgattgctgagtggccagtggccgtgctgatgctgtgtctggctgtcatcttcctctgcaccctggctggactgttgggggcccggctgcccgacttctccaagcctttgctgggctttgagccacgggacacagacattgggagcaagttagtggtctggagagcactacaagccctcacaggccccaggaagctgcttttcctttccccagaccttgagctgaacagctcgagctcccacaacactctgaggcctgcacccagaggcagtgcccaggagagcgctgtccggcctcggagaatggtggagcccctggaggacagaaggcaagagaacttcttctgtggcccccctgagaagagctatgcaaagctggtgttcatgtccacctcctcgggcagcctatggaacctgcatgccatccattccatgtgtcgcatggaacaggaccagatccgctcccataccagcttcggggctctgtgccagcggacagcagccaaccagtgctgccccagctggtccctgggcaactatctggctgtgctctccaaccgctcctcctgcctggacactacccaagctgacgcagcccgcacactggccctgcttcggacctgtgccctctactaccacagtggcgccttggtgccctcttgtctgggacctgggcagaacaagtccccacgctgtgcccaggttcccaccaagtgctcccagagtagtgccatctaccaactcctgcactttctgcttgacagggactttctgagtccccagaccactgactaccaggtgccttccctcaagtacagcctgctcttcctgcccaccccaaagggtgcttccctcatggacatctacctggaccggctggccaccccctgggggcttgctgacaactacacctctgtcactggcatggacctgggcctcaagcaggagctgctgaggcacttcctggtccaggacacggtgtaccccttgctggctctggttgccatcttcttcggcatggccctgtacctgcgctcactcttcctcacgctcatggtgctgctgggggtgctgggctcactgctggtggccttcttcctttaccaggtggccttccgcatggcctacttccccttcgtcaatctggcagccctcctcctgctgagcagcgtctgcgccaaccacacgctcatcttcttcgacctgtggcgccttagcaagagccagctgccgtcgggggggctggcgcagcgcgtgggccgcaccatgcaccacttcggctacctgctgctggtctccggcctcaccacgagcgcggccttctatgccagctacctgagccgcctgccggccgttcgctgcctcgccctcttcatgggcacggctgtgctggtgcacctggcgctcacgctggtctggctgcccgcctccgccgtgctccacgagcgctacctggcgcgcggctgtgcgcgccgggcgcggggccggtgggagggcagcgcgccccggcggctactgctggcgctgcaccggcggctccgcggcctgcggagggcggcggctggcacctcgcgtctgctcttccagcgcctgctgccctgcggcgtcatcaagttccgctacatctggatctgctggttcgcagcactggcggcagggggcgcctacatcgccggagtcagcccccgcctgcggctgcccacgctgccgccgcccggcggccaggtcttccggcccagccaccccttcgagcgcttcgacgcggagtatcgccagctgttcctgttcgagcagctgccgcagggcgagggcggccacatgcccgtggttttggtgtggggcgtcctgcctgtggacactggcgaccctctggaccctcgtagcaacagcagcctggtgagggaccctgccttctcggccagcggccctgaggcccagcgctggctgctggcactctgtcaccgggcccggaatcagagcttcttcgacaccctgcaggaaggctggcccacgctgtgtttcgtggagaccctccagcgctggatggagagccccagctgcgcccgcctggggcctgacctctgctgcggccactcggacttcccctgggccccccagtttttcctgcactgcctgaaaatgatggctctggagcaaggccccgatggcacccaggacctgggactccgctttgatgcccatggcagcctggccgccctggtcctacaattccagaccaacttccggaacagtccggactacaaccagacccagctcttctacaatgaggtcagccactggctggcagcggagctgggcatggcacctccaggcctccgccgtggttggttcactagccgtctagagctgtatagcctgcagcacagcctgagcactgagcctgctgtggtgctgggcctggctttggcgctggcctttgccacactgctcctgggcacctggaatgttcccctcagcctattctccgtggcagctgtggcaggcaccgtgctgctcactgtaggactcctggttctcctcgagtggcagctcaacactgccgaggccctgtttctctctgcctcagtgggcctctcagtagacttcactgtcaactactgcatctcctatcacctgtgcccacaccctgaccgcctgagccgtgtggccttctctctgcgccagaccagctgcgccacagccgtgggggctgcagccctgtttgcggcaggcgtgctcatgctgcctgccacagtgctgctctatcgcaagctgggcatcatcctcatgatggtcaaatgcgtcagttgtggctttgccagcttcttcttccaatctctctgctgtttcttcgggccagagaagaactgtgggcagatcctctggccctgtgcccacctgccatgggatgctggtactggggaccctggtggggagaaggcaggccgcccacgaccagggtcagtgggagggatgcccgggtcctgctcagagcaatatgagctacagcccctggcacggcgtcggagccccagctttgacaccagcacagccaccagcaagctgtcccaccggccctcagtactctctgaggatctgcagctccatgatggtccgtgctgttcccggcccccaccagcccctgcctccccaagggagctgctgctggaccaccaggcagtcttcagccagtgccctgccctgcagacctcctccccctataagcaggctggccccagccccaaaacccgggccaggcaggactcccaaggggaggaggctgagcccctgccagcctcaccagaagccccagcccactctcctaaggccaaggctgcagatcctcctgatggcttctgttcctcagccagcaccctggaggggctcagcgtctctgatgagacctgcctaagcacctctgagcccagtgcccgtgtaccagattccgtgggtgtgtccccagatgacctggatgacactgggcagccagtccttgagcgaggccagctcaatgggaagcgggacaccctgtggctggcgctgagggagacagtgtatgacccatcattgcccgcttcccatcacagcagcttgtcctggaagggccgaggggggccaggggatggcagccctgtggtgctgcccaatagccagccagacctgccagatgtttggctgcgcaggcccagcactcacacgtcaggctatagcagctgagggggacccggggaggctggacagggcgcggaaccctgtcatggatgacaaggcaagggcagcaataggctggagcccgaaggtatttctccagatccacagggagaggtctcaccctccagctgtggatgttaaaccctgccagatgtcccagccttgatctgtctgctcctactcctcacatctggaggattccagcaggaggggttttggaggggacctgcttgcgacctgctgagggcttgtctgctcccacagcaccatctaagacccctcctctagaagtggggaaggccagatgtgtagcttcgggtatcagaggaggctgacctggcccccatcccaagttacaagaacttcagtgagactaagggacccccatcctagggatcttgtcagggttccttactgaccagaggagcccgcagcaatctccacagcctcctgggtctcacccctttcatgggctcttcatcaggacacttccctctcttttgggagcttctctgggcagaattgggctgggacctctctccccaactgccctgctctcctcatactcaccggtttgaccagaaattctccaaatccagccatagatggctgctgggtgtgcagcaggagaaggaggatggtcagccttggagcatctctcaattacgggacagtccctctttggaagcaggctcctgtgctttcctgtgttaataaacagtaataatcctttccatctctgcacattttagtctccttggaatctatctcactacttcactacagggtagcctgacattggtcaggttcttttgacacccaatttataggtaaagacattgagactaagtaagatgaactgacctcagggtcacttagccactaaatggcagagcggtttcattccaccactacaacctccagtttccctttggctacctgccttctttcaccgctagcaccctcctccaatctgctttctctggtgtctctgactgaatccagccaccctctttgggcctccacttcctgagagagctgtattccaaaaaaacccaggagttcctctccatctcccccgtgcctccctctggaatctggctgagatgtctgctggccctggggcgtcctagctgacctgattcccaggcttcaggaccgtgcctcttctacagccacagtgtataagaggccccaccagaagaggtactgaggggcagaagaggtgaagccaaatccaatcaaggcaggaactcagacctgccctttgggaagtgtatgagtctgaagctgcttcccaggttagggtccccagctttttaaggacaagtctctctgtggagcgttaagcagaccaaaggctggttcctccttcccaaacttcctggtagggaagttttatcccatgtgagagctcatgacaccaggtggcatcaacatgtttattgaacacctactttgcatatggtattacaaggggacagaggtgtggaagaaaaattgaacaccaccctcaaagagctcaccttctagctggggagacagcttatgcacacatgcaggcatcggatggctcacggacggcaccatatgcctgccatcatcattattgttggagctcaagtacccaggactgggtaacaagaaaggctttctggaggaggaaaaacttgagctgggcttcagaagaccaagcgtctcagactggaaggggccttggcgatcgtttattccagcagttttcaaattttgtagcctcaggactctttcttcaaagaagctctgtgtggaaaaacaatatataaaacaggtaaaaggcagctactctggtgggcgctgggtgttgggggtggagtcagcttagcctgtctttccactgcagcctctccgggtatctggggaacccctccggctcctggcagcttcacagaatgtaatatgaaagctactgatccaggctattttacagaggagtatcaggaaagggaagggattgttctagggccaaatagtctgtggcagagctggaggcaaatcagatgatgtttttgttttatttagttttttattattgagacctacttcctactccaagtagcccatgagaagtggagcagaaaccgaaaagagacatgggagttgtggaagagacagaaggcaataggcaggtacggcaggataccttggctcctttgcaagataagtaaatcaagatgagtaactcctgacaccaggaaggggaagctggaacctaatttgaacctgtccccagggggtctgctgggacctctctcttcatgtccaggtagcattcggcctctctgacctagagctgctcatcagccctggtttctctgataatggtgtccctctgtcatcatgcagccaggctgagagagccctggtatcctcagggacaatgagccacagggaggttaagggaactcttcctcccaagcatgagcagaagacactttgcctgaacataaccactgaaatgttagaatgcagaggggtggatgggtgggcatgagggatctgagcacacccgagggccctacctggggatttccaggtcatattcttgcaggctgtggccacacaacacttcaggaaggtgaatgagccatagcagctgatgcattgattagatttgttctttatgttgccaggcccagaagaacccagcagtaatctaaaacattaccttatacctagaatggcccaaaccaacagcaggcaatccacatcagcaggaaatccagcctgcctctctagccctgactttggaatgtggaacttaaagcacttcctatttcctttgagttgcagcagatcctttgctttattattattaggggcacttacaatgagtgtatggccctggagacatggcttacaagcacgctgtgaggcgtacaaaaatgagtcaaagcacttatgcttgccctgcaaaattcaagaaatgatttctccccactcagacactctaatagaactacattaacatttggaacttgaggtcatttcccctatttgtgccactgatccttgaactcacattctgagtacgagtatgtatcctgtatgctattaaaatataacttgaggccggacatgatggctcatgcctgtaatcccagcactttgggaggctgaggcaggtggatcactagacgttaggagtttgagaccagcctggccaacatggtgaaaccccgcctctactaaaaatacaaaaattagttgggcgtggtgggggatgcctgtagtcctagctacccaggaggctgaggcaggaaaatcatttgaacccgggatgcagaggttgaagtgagccgagatcgtgccactgcactccagcctggatgacagagcaagacaccgtctcaaaaaataaataaataaataagtcgggcacggtggctcacgcctgtaatcccagcactttgggaggccaaggcaggtggatcatgaggtcaggagatcgaaaccatcctggctaacatggtgaaaccccgtctctactaaaaatacaaaaattagccgggtgtggtggcgggcgcctgtagtcccagctactcgggaggctgaggcaggagaatgatgtgaacccaggaggcagagcttgcagtaagccgagattgcgccactgcactccagcctgggcaacagagcgagactccatcttaaaaaaaaaaaatatatatatatatatatgtaaacttgatatagtctgttaccatgggaaaaccatccttccatggctgtggtgatttggggacttttagagtgacagtgttagacagactgattttattggctgaatcttagattttactgatatatagcatatcccataccatgatatgcgggcaatattccagcttgagacaattttttttttttttttttgagacagagtcttgctctgtcgcccaggctggagtgcagtggcacaatttcggctcactgcactaattttttgtatttttagtagagacagtagagtatttttagtgttagccaggatggtctcgatctcctgacctcatgatccgcctgcctcggcctcccagagtgctgggattacaggcatgagccaccgcgcctggccgagacaatttttaaaaagacatttctcaagagagttataagccaaaatttccctagccccctccaactcattctgtccttctcccagtgcatgtcaggacagggaagaaggctttaaatcagattttaagaaagaggatacattggtttacaacctttgcctatcgtccagagagtttctgatcttttctttttttttgagacggagtcttgctctgtcgcccaggctggagtgtagtggcacgatcttggctcactgcaagctctgcctcccaggttcacgccattctcctgccccagcctcccgagcagttgggactacaggcacctgccaccacgcctggcaaattttttgtatttttagtaaagacggggtttcattgtgttagccaggatggtttcgatctcctgaccttgtgatccgcccacctcggcctcccagagtgctgggattacaggtgtgagccactacacccggccctgatcttttctttgacggtggcagtatctcattttttgataatacacatgggtaatggcaagctcttgggaccccatgccaagcatcaagatcccatttacctggtgataggaaagacagacattcctcaccctttctacccacacccttgttcacagggatgactgtaactaaggtctgcaggtatttatgcttaggagaagaaatcgtagttcaattcaccaggaatatgagaaacaaaagaaagccactatgtgctatgtaaatgtctggccatccaaagccaccttatgcagaggaacactggaagggccttgataaatttctcataattattatcgggcctctttgtgattactcacatttttctcaatataggggaaagatcagcattttaccaaatccacaaccatcaaacaaacaagagctttaatattgctaaagaaaatcacacagctgagcagattgatgtagatttgaattcatgaccacctatcttaactggaccctcagctctgcctagctagtattcattctagctactagttttgattatttgtattgactcttttatattttctccaccttcctcaaatatctcaccttcccccacccctcagtggacaaaaaaaaaaaaaaaattcttcatgaagaaaactgaagccttcaaatagaaatttcctcaccttcaaggcaccaaagccacaacttacctacccccgctcctgcctgctcctctccccatcccttctgctacaacgaaggaagcagtaatggctccatcaatggcttctcacacttggtgtcagaggccttcacacgagggtttgcactcccctacaaggacatgaagactttctagaaggtaggtggacacagatagttttaaagtaatcagtttccagagccgccttctccatatgttcccctccttatattggtgggcctaagaagccacaggcctgacagctgtccttcccaacttccactttcccagttgcctcccctccctcattctgaatcctactctggctccttgctctgcgctgtaaaaaacaaataaaagggccacttgagaatgctctgcttgaggaagtccttgaaagagcaaagcctggagagcttctttgagaaagttcacaggggcagccctgtggctcagttctgtgccttcttcatttaagaattcaaattcattgacatgttatattgtaaaatatataaatatatattaaaaaggaaaaaataataaaaatttttaaaaataattcaacttcaggtgagacacagtggctcatgcctataatcccagtgttttgaaaggctgaagtgggaggatggcttgaggccaggagtttgagaccagcttgggcaacatagcaagatcccgtatctacaaaaaataattttaaaaattagctgggcatgggccgggcgcggtggctcacgcctgtaatcccagcactctgggaggccgaggcaggtagatcatctgaggtcaggagttcaacaccagcctggccaacatggcaaaaccctgtctctactaaaaatacaaaaattagccgggcgtggtggagcatgcctgtagtcccagctactcaggaggctgaggaaggacaatcgcttgaaccctggaggcagaggttgcagtgagccaagatcatgccattgcactccagcctgggtgacagagcgagactacatctcaaaataaataaataaataataaaataaaaataaaaattagctgggcatggtgatatgcgcctgtagacccagctactccagaggctgaagcaagaggatcacttgaactctggagttcgaggttacagtgagccataatcacattatggcactccagcctggcaacagagcgagaccttaactctaaaaaaagaaataaagaagaatttaaactgaaagtgagatggttgacacaggatacatattaaccacattgatttgaatggaaaaataaaatcagactttttctgttagaaggtcagaattggctcacaggtttgacagagaggatagtctttgcaagtaggatgtatggtggacattttccctaaaatggaataactttaatctgcagctccacagtttgaacaaaaacagactgaaggctgggcgtggtggctcatgcctgtaatcccaacactttgggaggcctaggcgggcagatcacgaggtcaggagatcgagaccatcctggctaacatggtgaaacctcatctctactaaaaatacaaaaaaatagctgggcgtggtggcgggcacctgtagtcccagctactcaggaggctgaggcaggcgaatggcgtgaacccgggaggcggagcttgcagtgagccgagattgcgccactgcactccatcctgggcaacagagtctcaaaaaaaaaaaaaaaaatttttgactgaaagtacagatacaacttccctttccagccaagatggaggagcaggggccaagtttatcctcctgcctgaaacaaccaaccaaacagtaaatacatgaaataatgagtttcaagacactggacatgaggtaacaaaagacagtgatctctcagaggcaagaaacaaacaaggagaacccctcggttgcccagcttaccgcttgagaggatgtatttcacggagggagaacccaggcaaagcaagtgactctgaggtgaggggatagctgggagtgtggagcagccaagctggctagagtgctcaggacagggtactggagaggagaaaggtggatatatagagaattctggggatctgcaaagggccccccttgagtgttccacagagcatgattcatcatataagtgtaaggaaaccacttgagacaaaggaaaggaccacccaaaacaatgggccggaacagtagccagaagtcacacacagcctggaccacgcctgtccccatcagccagattggaaaacctcaaatttatggagcattggtcagaggtctcagaagggccttgcctcgtagtggggattcattagccctagtttaaacattgctggaacctacctaacaaatctcaaaagcaagacctgaattcaggaatcaagctgtttctaagtaactgaagtgtatcccagaacaaaacccaagaacattaacagaaatccaaaattaacgagcacccaaaaatgtaaaattcacaatggctggttttccaataaaaaattaccagtcatgcaaactataacccatcataaggagaaaaatcagttgaaaccactacagctgacacctatgtgagaattagacaaggacactaaaagaattattataactgtattccatatgtactaagtagagactaggaagatatttttaaatacccactttgaattttagagacgaaaactaaaatgtctgagatgatggggtgggtggggtaggcagaaagaggaggatgggaagaagtaccaaggggaaggaggaatgatttggggatgacggctgtgtttattatcttaattgtggtgatggtttcacaggtatatgtaatttctaaacttatcaaattgtacacttaaaatatgtggtctatggaatgttaattatatctcaataaagctgttaaaattgtactgaaacaaaaccattgggggaaactgggtaaagagtccaaaggacctccctatactatcattgtaacttcctgtcaattataacgattccaaaataaagaatttaaaagtgt

SEQ ID NO: 5590 - DNA, 335 bp, Homo sapiens
  source 1..335: mol_type = unassigned DNA; mol_type = unassigned DNA
caggaaggggacattgggtgacccaccccaaggcaggtcagaggggcttgccaaggaaggctccctggggagtggtctctggcctcctctgagtcttccaaccctaatggtgcctggcatagatattctctccacttcagctcgagctcccacaacactctgaggcctgcacccagaggcagtgcccaggagagcgctgtccggcctcggagaatggtggagcccctggaggacagaaggcaagagaacttcttctgtggcccccctgagaagagctatgcaaagctggtgttcatgtccacctcctcgggcagcctatggaacctgcatgccat

SEQ ID NO: 5591 - DNA, 519 bp, Homo sapiens
  source 1..519: mol_type = unassigned DNA; mol_type = unassigned DNA
ccaggcaggactcccaaggggaggaggctgagcccctgccagcctcaccagaagccccagcccactctcctaaggccagatgtgtagcttcgggtatcagaggaggctgacctggcccccatcccaagttacaagaacttcagtgagactaagggacccccatcctagggatcttgtcagggttccttactgaccagaggagcccgcagcaatctccacagcctcctgggtctcacccctttcatgggctcttcatcaggacacttccctctcttttgggagcttctctgggcagaattgggctgggacctctctccccaactgccctgctctcctcatactcaccggtttgaccagaaattctccaaatccagccatagatggctgctgggtgtgcagcaggagaaggaggatggtcagccttggagcatctctcaattacgggacagtccctctttggaagcaggctcctgtgctttcctgtgttaataaacagtaataatcctttccatctctgca

SEQ ID NO: 5592 - DNA, 401 bp, Homo sapiens
  source 1..401: mol_type = unassigned DNA; mol_type = unassigned DNA
ctcaaagagctcaccttctagctggggagacagcttatgcacacatgcaggcatcggatggctcacggacggcaccatatgcctgccatcatcattattgttggagctcaagtacccaggactgggtaacaagaaaggctttctggaggaggaaaaacttgagctgggcttcagaagaccaagcgtctcagactggaaggggccttggcgatcgtttattccagcagttttcaaattttgtagcctcaggactctttcttcaaagaagctctgtgtggaaaaacaatatataaaacagttttttattattgagacctacttcctactccaagtagcccatgagaagtggagcagaaaccgaaaagagacatgggagttgtggaagagacagaaggcaatag

SEQ ID NO: 5593 - DNA, 910 bp, Homo sapiens
  source 1..910: mol_type = unassigned DNA; mol_type = unassigned DNA
tgaggactgggattcgcgcgcagcttcccgcggtctgcttgccctggagcggagggggagccccagcctcctgcggctccgagaagcttccccctgcgacttccgcgaggagacgagtctgcgcagcgtggtggccgccgccccccgaccctctgcgcactctctcccgcgccggcggctcagcctagccccgttcggccggccgaggttccatgtccccgttactctctctttggaaatctgacgaccctccaccgtggcctcagcagcttctgttcccctccccaggaagttttctagggccagatgccacagagccccagtgatctctccaaggggccaagaactttgggtgaagcattctggaacccccctcgagatctggctagccatgagatctggtagccatgacctggcttgccctttgacacctctcctgctgttgtccttcaaatccagaaactgggttgaaagaagagtagtcccagcatggtgtggtggaaggagcactggactggaagtgaggggacctggatcctagtccgagcttaaccacagactcccagtttgcccttgggcaaactacttcccttctctgagcttcaggtttcccgtctgttaaaggactgcctgaggtgacctgtagggtcactttctggccctaataatctggaacattgactctctagtgagtctcttgagtgtgggtgggattgaaaattgtgattctaaccccaaagattaccctacctttccccttccttagagcacccaccactagtgaagtcatcctgttccctgagtgagggatgtttagatgatttccttaataggaccagagatgtcaagtaattttcttgaggtcatactgctgaagtgcaatcttcattggggcaggcattacttctac

SEQ ID NO: 5594 - DNA, 5215 bp, Homo sapiens
  source 1..5215: mol_type = unassigned DNA; mol_type = unassigned DNA
gcggctccgagaagcttccccctgcgacttccgcgaggagacgagtctgcgcagcgtggtggccgccgccccccgaccctctgcgcactctctcccgcgccggcggctcagcctagccccgttcggccggccgagactatggacacggaggatgaccccttgctgcaggatgtgtggctagaggaggagcaggaggaggaagaagcaacgggtgaaacctttttaggggcccagaagccagggccccaacctggggcagggggacagtgttgctggcggcactggcccctggcttcccgacccccagcttcgggcttctggagtaccctgggctgggccttcaccaatccgtgctgtgctgggctggtgctcttcctgggctgcagcatccccatggccctgtcagccttcatgttcctttactacccaccgctggacattgacatctcctacaacgcctttgagatccgcaaccacgaggcctcacagcgtttcgacgctctcactctggcgcttaagtcccagtttggatcctgggggcggaaccggcgcgatttggccgacttcacctccgagacgcttcagcgccttatctcagagcagctgcagcagctgcatctcggcaaccgctcgcggcaagcctcccgagccccccgcgtcatccccgcggcctcactcggtggcccaggcccttaccgggacacttccgcggctcaaaagcccacagccaatcggagcgggcgacttcggcgtgagaccccgcccctggaggatctggcagccaaccagagtgaagacccgcgaaaccagcggctgagcaagaatgggcggtaccagcccagcatcccgccccacgcggcagtcgcggccaatcagagccgtgcccgccgaggcgcctcgcgctgggactactcgcgcgcctatgtgagtgccaacactcagacgcacgcgcactggcgcatcgagctcatcttcctggcgcgcggcgacgcggagcgcaacattttcaccagtgagcgcctggtcacgatccatgagatcgagcgcaagatcatggaccacccaggcttccgggagttctgctggaagccccacgaggtgctcaaggatctgccgctgggctcctactcctactgctcgccccccagctcgctcatgacctacttttttcccaccgagaggggcggcaagatctactatgacggcatgggccaggacctggcggacatccggggctccctggagctggccatgactcaccctgagttctactggtatgtggatgagggcctctctgcagacaatctgaagagctccctcctgcgcagtgagatcctgtttggagcacccctgcccaactactactcagtagatgaccgctgggaggaacaacgggctaagtttcagagcttcgtggtcacctacgtggccatgctggccaagcagtctaccagcaaagtccaggttctctatggggggacagacctgtttgactatgaagtgcgcaggacgttcaacaatgacatgctcctggccttcatcagcagcagctgcattgctgccctggtctacatcctcacctcctgctcagtgttcctgtccttctttgggattgccagcattggtctcagctgcctggtggccctcttcctgtaccacgtggtctttggtatccagtacttgggcatcctgaatggggtggccgccttcgtgatcgtgggcattggtgtggacgatgtctttgtgttcatcaacacctaccgccaggccacccacctggaagacccacagctgcgcatgatccacaccgtccaaactgcaggcaaggccaccttcttcacctccctgaccacagccgccgcctacgcagctaacgtcttctcccagatcccagccgtccacgactttggcctgttcatgtctctcatcgtgtcctgttgctggctggccgtgcttgtcaccatgcctgcagctctgggcctctggagcctctacctggcaccactggagagctcctgccagaccagctgccaccagaattgcagccggaagacctccctgcacttccccggagacgtgtttgccgctcccgagcaggttggaggcagccctgcccagggccccataccctacctggatgatgacatccccttgctggaggtcgaggaagagccagtgtcactggagctgggagacgtgtccctggtgtctgtgtcccccgagggtctgcagccagcctccaacacgggcagccgcggccatctcatcgtgcagctgcaggagctgctgcaccactgggtcctgtggtcagccgtcaagagccgctgggtgattgtggggctgttcgtctccatcctcatcttgtccctggtgttcgccagccggctccgccccgccagccgggccccgctactcttccggcctgataccaacatccaggtgctgctggacctcaagtacaacctgagcgccgagggcatctcctgcatcacctgttcaggtctgttccaggagaagccccacagcctgcagaacaacatccggacgtccctggagaagaagaggcgaggctcaggggtcccctgggctagccggcctgaggccaccctgcaggatttcccaggcaccgtgtacatctctaaagtgaagagtcaaggccaccccgctgtctacaggctctccctcaatgccagcctgcctgctccttggcaggctgtgtcgcctggggatggagaggtgccctccttccaggtgtatagagcgccttttggtaacttcaccaagaagctgaccgcttgtatgtctacagtagggctgctccaggcggcgagcccctcccgcaagtggatgctgacgaccttggcctgtgatgccaagcggggctggaagtttgacttcagcttctacgtggccaccaaggagcagcagcacacccggaagctgtacttcgcccagtcccacaagccccccttccacgggcgcgtatgcatggcaccccctggctgcctgcttagctccagccccgatgggcctaccaaaggcttcttcttcgtgcctagtgagaaagtgcccaaggcccgtctctcagccaccttcggcttcaacccctgcgtgaacacgggctgcgggaagccggcggtgcggccactagtggataccggggccatggtctttgtggtcttcggcattattggcgtcaaccgcactcggcaggtggacaaccacgtcattggagacccgggtagtgttgtctacgacagcagctttgacctcttcaaggaaattgggcacctgtgtcacctctgcaaggccatcgcagccaactccgagctggtgaagccgggtggggcccagtgcctgccttcaggctacagcatctcctccttcctgcagatgttgcaccctgagtgcaaggagctgcccgagcccaacctgctcccggggcagctgtcccacggggcagtgggcgtcagggagggccgcgtgcagtggatctccatggctttcgagtcgaccacgtacaagggcaaatcctccttccagacctactcggactacctgcgctgggagagcttcctccagcagcagctgcaggccttgcccgagggctcagtcctgcgccggggcttccagacctgcgagcactggaagcagatattcatggaaatcgtaggggtgcagagcgccctgtgcggcctggtgctatccctgctcatctgcgtggccgcggtggccgtgttcaccacccacatcctgctcctgctgcccgtgctcctcagcatcttgggcatcgtgtgcctggtggtgaccatcatgtactggagcggctgggagatgggggctgtggaagccatctccctgtccatcctcgttggctcctccgtggattactgcgtccacctggtcgagggctacctgctggctggagagaacctgcccccccaccaggccgaggacgcccgaacgcagcgccagtggcgtacgctggaggccgtgcggcacgtgggcgtggccatcgtctccagtgccctcaccacggtcatcgccacagtgcccctcttcttctgcatcatcgccccatttgccaagttcggcaagattgtggcactcaacacgggcgtgtccatcctctacacgctgaccgtcagcaccgccctgctgggcatcatggcgcccagctctttcactcggacccggacttccttcctcaaggccctgggtgccgtgctgctggcaggggccctggggctgggtgcctgcctcgtgctcctgcagagcggctataagattcccctgcccgcaggggcctccctatagcccgggacgggctctggacacttgcacctttggtcccatgggtgggggacaggagctgcttcccagctcgacttcagctagctgtgtccccaggcctgggcccagggcgccctgcgggccagcgtggaggctgacacccacacagatggtgtggaccatgctgccttgtggagctgggagttggagacagccgccaccccacaggccgggctactggcagccacactcggctttttgcccagtggcagaagagaccagccctcctcccatgcccggtcaccatgggggtcaggttatttttgtagggggtctccctctcacactgcctcagtgctcacaaccttccagtgtggatgttacagggtggcccccattctaccgatgtgaaaactgaggcgccaggacacagtggctgccctgtcgctggatcagtagcagagccagagctgcctccgagcgccatgccgccctcgggaatcatacaggaagagcacagtggatccagggtgggggcctctcaccccctaaccccgcccccccgcaaccctccccttcagctttacggcggccagtgctgaatggccctgtggccctccctgggccttttggtcttggccagagaagacagaaggacccggcttgggcttctgcatgtcctacccctgaccccagcctcaaggggcccctcaaaggccctctctgggggctctggggctcagcacagctttcctcatggatctaagcccctgtctttcccacctgactctgagtggatgttttgggggatggcccctgtggggaggagctgccatgccggccgcctgctcacggcagaaggttgctattaaaatgacataggattgcagactgctgctgttaatacgagcattttaagcac

SEQ ID NO: 5595 - DNA, 1495 bp, Homo sapiens
  source 1..1495: mol_type = unassigned DNA; mol_type = unassigned DNA
ggctcaccacacggcaaggtgcccgcttccaagctgaccccaccagcactcagacacgcatgcacacacacacgcagacctactatgaactggcttgtgctcagcaagagcagaattgatgagcagataccttaagaatcttttagagcaggaccacgtacaagggcaaatcctccttccagacctactcggactacctgcgctgggagagcttcctccagcagcagctgcaggccttgcccgagggctcagtcctgcgccggggcttccagacctgcgagcactggaagcagatattcatggaaatcgtaggggtgcagagcgccctgtgcggcctggtgctatccctgctcatctgcgtggccgcggtggccgtgttcaccacccacatcctgctcctgctgcccgtgctcctcagcatcttgggcatcgtgtgcctggtggtgaccatcatgtactggagcggctgggagatgggggctgtggaagccatctccctgtccatcctcgttggctcctccgtggattactgcgtccacctggtcgagggctacctgctggctggagagaacctgcccccccaccaggccgaggacgcccgaacgcagcgccagtggcgtacgctggaggccgtgcggcacgtgggcgtggccatcgtctccagtgccctcaccacggtcatcgccacagtgcccctcttcttctgcatcatcgccccatttgccaagttcggcaagattgtggcactcaacacgggcgtgtccatcctctacacgctgaccgtcagcaccgccctgctgggcatcatggcgcccagctctttcactcggacccggacttccttcctcaaggccctgggtgccgtgctgctggcaggggccctggggctgggtgcctgcctcgtgctcctgcagagcggctataagattcccctgcccgcaggggcctccctatagcccgggacgggctctggacacttgcacctttggtcccatgggtgggggacaggagctgcttcccagctcgacttcagctagctgtgtccccaggcctgggcccagggcgccctgcgggccagcgtggaggctgacacccacacagatggtgtggaccatgctgccttgtggagctgggagttggagacagccgccaccccacaggccgggctactggcagccacactcggctttttgcccagtggcagaagagaccagccctcctcccatgcccggtcaccatgggggtcaggttatttttgtagggggtctccctctcacactgcctcagtgctcacaaccttccagtgtggatgttacagggtggcccccattctaccgatgtgaaaactgaggcgccaggacacagtggctgccctgtcgctggatcagtagcagagccagagctgcctccgagcgccatgccgccctcgggaatcatacaggaagagcacagtggatccagggtgggggcctctcaccccctaaccccgcccccc

SEQ ID NO: 5596 - DNA, 1945 bp, Homo sapiens
  source 1..1945: mol_type = unassigned DNA; mol_type = unassigned DNA
gttgggggggatctgggtccagggggcgcggtctgggcctgcaggaggcgggatccggcgggccagaggcgggaccaaggccggcaggggctggctctggctggctggagtcgggcggggcttgtggccggcccccgcatcaccatggcagcgggaaaccgcggcaaagccagagcactggcaggccgagctcaggagggctggggacagagatgctgaaccagacggacccatcatttaagagatggccctgattcgtctcttctagggactcttgaagatggggacccaagtggttatgagattcaataactccttgctgccaacagagccttctcaacagctgcaggcctatgtggcctgggtgaatgcacagctgaagaagaggccagcagtgaagcctgtgcaggacctgcgacaagatctccgggatggggtgatcctggcatatctcatcgagattgttgcaggagaaaagctgagtggggtacagctgagtcccggtaaccaacaggagatgaagaataatgtggagaaagtgctacagtttgtggcctctaaaaagattcgtatgcaccagacttcggctaaagatattgtggatggaaacctgaagtctatcatgaggctggtccttgccttggcagctcatttcaaacctggctccagcaggacggtgaaccaaggacgggactccagagcccctctgcaaagtcaccgaccacactgtgccactgctgttgcccagggagcagctgctgctctggccgatgtgtgtcatgacatgtcccgatcaggacgggatgtctttcgatatagacagaggaacagcagcatggatgaggaaattgagaatccatactggagtgtgcgggccctagtgcagcagtacgaagggcaacaaaggtccccgtctgaatccagctgctccaggtaactgtggcctctgaaacctgaattctggaggattctcggagttctcggcttcaagtaacaatacaacaagcaaaaaggcacctaagccctttttctcccctcagtttatgtttggctttaaagggataccccttagcagtgctttgtgggtttgtgctagtaggagggtaggaaggtagggtggggtgctggtttatttcccacaaatggaatctgtgcagtcccagtgccagtgcttaactgtgaccacatgggggcatggctggaacctgtcagggcccagtccagtggttctgacatttgcatatgaggtgccagtgtttatgatagccagttccattgtgctgtccttgagcctaagtgtaactcttaaggccggaaaagtctgtgtaaagctcatagaagagaagaaattgagcagagttgtcttagagcattagaatgtttccaactttcctctacaggaactgtggctgattagtatgtgtttgagcaaactaatgatgtttgcgactctagctaaaagttgtgtgtatcctttagagccaagtacagagaccaaaacaggatacagtgccctaataaaaaccttatcagtggcagaaaaaagattactttactggctcatgtaaattgtgcttctataaacactccccagatcatgtttttactaacttcattttgttgctgaatcataatttatgctctaatgaccttttctttcctatcccaaccctgtgtaatctgctctatttagggctaattgttccttgtcttgtatgtatgttatgtgtccttgttttcttcctcctatttttttctcataaaactccatcctattttaatgcacatttcctaatttattgaggtcatatggaactctttctagtattttaatatactggtaaacttgctaactttttaccttttttacatttaatagctgtgctctttcttacttataaaattcacataacataaaattaaccattaaacattataaagtgta

SEQ ID NO: 5597 - DNA, 5897 bp, Homo sapiens
  source 1..5897: mol_type = unassigned DNA; mol_type = unassigned DNA
tcccgcaggaaagcggggctgggggcagcccggcagcgccgctcaacctagtgcgcgcccagttgtttccataggaaccgcgaccgcgccgggcccctccagcggaggcccccgtgcgagcatgcccagtgcaagccgctagtttggctccagtctaggtttccagtaagtggcatgcgggactccggagggatcccaatgagctgagccgagagcctttgtgtgcagagggaggaggaggaggcggcggcggccgccgggctggagaccccgcccggggagcccccagcaggaacaatgctagcctgcctgacccgagggaacttactggacgtcctgcaggagggcttcaatgagcaacagctgcaggcctatgtggcctgggtgaatgcacagctgaagaagaggccagcagtgaagcctgtgcaggacctgcgacaagatctccgggatggggtgatcctggcatatctcatcgagattgttgcaggagaaaagctgagtggggtacagctgagtcccggtaaccaacaggagatgaagaataatgtggagaaagtgctacagtttgtggcctctaaaaagattcgtatgcaccagacttcggctaaagatattgtggatggaaacctgaagtctatcatgaggctggtccttgccttggcagctcatttcaaacctggctccagcaggacggtgaaccaaggacgggactccagagcccctctgcaaagtcaccgaccacactgtgccactgctgttgcccagggagcagctgctgctctggccgatgtgtgtcatgacatgtcccgatcaggacgggatgtctttcgatatagacagaggaacagcagcatggatgaggaaattgagaatccatactggagtgtgcgggccctagtgcagcagtacgaagggcaacaaaggtccccgtctgaatccagctgctccagcctgacttcacccagtccaatccacagtgcaaagagcgagtccattataacccagtcagaagagaaggcagattttgtgattattcccgctgaaggaatagagaacagaacagaagggacagattctccattatctcgagactggcggccagggagccctggaacctatctggagacctcatgggaagaacagctgttggaacaacaagaatatttagaaaaagaaatggaggaagcaaagaaaatgatatcaggactacaggccttactgctcaatggatccttacctgaagatgaacaggagaggcccttggccctctgtgaaccaggtgtcaatcccgaggaacaactgattataatccaaagtcgtctggatcagagtatggaggagaatcaggacttaaagaaggaactgctgaaatgtaaacaagaagccagaaacttacaggggataaaggatgccttgcagcagagattgactcagcaggacacatctgttcttcagctcaaacaagagctactgagggcaaatatggacaaagatgagctgcacaaccagaatgtggatctgcagaggaagctagatgagaggaaccggctcttgggagaatataaaaaagagctggggcagaaggatcgccttcttcagcagcaccaggccaagttagaagaagcactccggaaactctctgatgtcagttaccaccaggtggatctagagcgagagctagaacacaaagatgtcctcttggctcactgtatgaaaagagaggcagatgaggcgaccaactacaacagtcacaactctcaaagcaatggttttctccttccaacggcaggaaaaggagctacttcagtcagcaacagagggaccagcgacctgcagcttgttcgagatgctctccgcagcctgcgcaacagcttcagtggccacgatcctcagcaccacactattgacagcttggagcagggcatttctagcctcatggagcgcctgcatgttatggagacgcagaagaaacaagaaagaaaggttcgggtcaagtcacccagaactcaagtaggtagtgaataccgggagtcctggccccctaactcaaagttgcctcactcacagagctctccaactgtcagcagcacctgtactaaagtgctctatttcactgaccggtcacttacgcccttcatggtcaatataccaaagaggttggaggaggtgacgttaaaggattttaaagcagctattgatcgggaaggaaatcaccggtatcacttcaaagcactggatcctgagtttggcactgtcaaagaggagattttccatgatgatgatgccatccctggatgggaagggaaaattgtagcttgggtggaagaagaccatggagagaattaatgccaagtatcagattgagggcttatggaacctggtcactccctggctgcttcactcaggaaagggaactaaaaccagaatacactaagaagtttctagtttgtgtgccaaaacagaagcttctccaagcatgatggccacaggtcagtcctctttctgtgcctggcatatctggtacttaaaattctgtccaaatgtagaccatgggttcatctggagttccttgtccgtgggaacacagtgttctattctactctgaggacaacaaaccgaaggccttaaacgatggggatggatgatcccgcctctgtaggggcatggctgctattatctggaaattaggaattggatgcatcattcctgtgtgttacagtattattttaattggcctcaatggttgcagcaatcagagtcccagcgtttgtactcacagacaaggcaaaggtaccagcttttctgtttctttgaacctactgcaaaccaagaataactcatgaggtggtaccaaagatgaaagcccagacttcagtaatcttttgaaccagacgtggatggtgctgaattgttgcttggatggaaaaagggctgcccatgttgtgctacactatgctaaaactgtaatttagtaagaccttgggctgcctcttctgtcttaactggttctgcagcttgtccttttgcccacatagggcctatttcatgtactgttagttttctctggggactctttaactttagagccatttctttttcttcaaactgatgaacttttgtttgaaaggcataaggagtgaaaagctccttgaaaatccaggcgggtatggaaaggtgctgctacccatatctttttgactttctttgtttcatgactttaactcatggcatctcctttgtagtaaaaggagacagaccattaatttcagcatttctttgtgatttataagtactgagcatgaagtacttgtctgcccctcatttcaaggccagagttattttctatttatgtattagtctaggctgatcttttagggcacaatagaaaccatggggcgtggagcatgagttgtgaatggcagggatcattctgggtaaaaaaaacctagaatcatttctgatgtgcaacattgtcaagtgaagaagctaacagttcaactaccgagattatttgataacctgggttttctcattcatccatcaagcaccatcaaccagtcagccattattatttatatatgtattaccaaaagcagtctatctgcctgtgacctccaatgtacactgccaaacacaagagtaggacacatctgttctgggttcttgacctatctgtctccaattcatctccccttttcagccatttcaacaaactactctttggagctctgagatgacatcttgttgttttatatagatgtatcttttaaaaatagttcacgtttggagaattcttttgtactcatttgctttttgtctgagaaccatgtctatttttataactggagtgtgagttctgtatcttctcacattctgtatactgtatccattttctagagaacccagtagcttttatacagtctcttcttaccaccccttgtggtttcagaacaagctttattttattacgagtatattaatgacaactaattcctgttccaattctacctgttttagttgtgaaggtagttttgtgtaatccagttgattgctcctctggcagagagaaggagctcaaaagatacttgatgtctttcatgtaagtttacctggtcttttcctattgaagaatttttcatcagaaacgactgggaaagtttgggaaagtcagcaaaagaaagaatgcatttcgaaagcaaacagaagaaaaaagtatattctcacagtttttccccaggaagtctggagaaaaagtcctcatgtcaccaatttctctgttgcatgaattttagtgttttgctataagacagcatgagggctatcaggccaaaattcattattgtatttccaatacagtttgtcttgaatgtctgtctcttaaaccagtttttacttgtcagttttctctcagcaaacagtcttactattatgtggaatttaacttttcagagaaaatttccaaagtcctctaccttatttggcttttatctgtgtcttttggaaaaggagctgcatggcctcagtgcctccataaaaagcttaagttgagttcatgggagaacattaagatcgttttttttcccttttagctcggtaatctcatgtaccacaggtaatgaccaagcatctctgctagaggatgtaactctcataactcctgtgtaaaatgaggatcctgttggtgatcctcattccagtttccaaagcgagaggagccttctgagcagaagtatgcaagactgattctgtttggaacagtttcctatttggctgcattctaggaggcctcctgacttattcatagtattgtcgcctggtggcattggtgtggggtagcttgtcctgctacttgctaaagttctctttctttgagaaaactgaggaaccagaatgcttagagttcataaaataatctctaaaccatgttaggttaaaacaaaatgaccatctcacaaaaacgagtttagttgaatgctcaattccttacaaaatcttcatttaaggctgagtgtggtggctcatgcctgtaattccagcactttgggaggccgaggcaggaagactgcttgagcccaggagttcaagaccagcctgggcaacgtaggaagactccgtctctacatagaaattttattataaaagtagctggggatggtggcacacacctgtagtcccagctactcaggaggttgaggtgggaagattgcttgagcccaggagtttgaggttgcagtgagctgatcatgccactgcactctagcctaggctacagagcaggaccccatctccaaaaaaaaaaaaaaaaaagtcatttaaaaactgaagaatgttctcttcttgctcagttccctaaattagctggggggattgggatactttacaatttttacatttttaaatttgaagaatttgttttaaacttacttggtaatggcacttctacttactgaccaacttttcagctctttttgaccaggatggttgcaaattagggaaaatatctttatactatacatccaattcaagaggactttaattacttaaaagcatttaggtcataattaaaattattttcactgtttccataaaataagcattatgattgcacactccttctactgtctgaatttatgtaagaggtatagcttgcttaaaatacatatatatgtaaagttatattttcttagaaacatggatgtttacagccattgctttcaaagagattattactgtgtattctccctgttttacaatatgttttcatgaagactatgttacaccagaggcttctgattatcaaagtgataaccagttttaactgccggtatgtaccagatttgtgaactaatttaaaaaaccacaaactatgaataaaatggggtttgcaaactaaa

SEQ ID NO: 5598 - DNA, 741 bp, Homo sapiens
  source 1..741: mol_type = unassigned DNA; mol_type = unassigned DNA
tttgtgtgcagagggaggaggaggaggcggcggcggccgccgggctggagaccccgcccggggagcccccagcaggaacaatgctagcctgcctgacccgagggaacttactggacgtcctgcaggagggcttcaatgagcaacagctgcaggcctatgtggcctgggtgaatgcacagctgaagaagaggccagcagtgaagcctgtgcaggacctgcgacaagatctccgggatggggtgatcctggcatatctcatcgagattgttgcaggagaaaagctgagtggggtacagctgagtcccggtaaccaacaggagatgaagaataatgtggagaaagtgctacagtttgtggcctctaaaaagattcgtatgcaccagacttcggctaaagatattgtggatggaaacctgaagtctatcatgaggctggtccttgccttggcagctcatttcaaacctggctccagcaggacggtgaaccaaggacgggactccagagcccctctgcaaagtcaccgaccacactgtgccactgctgttgcccagggagcagctgctgctctggccgatgtgtgtcatgacatgtcccgatcaggacgggatgtctttcgatatagacagaggtaagggtagaaatctgggggtgggaactgatccctctctctgatacttcttctgttagatgatacagtgcagtagatagaaacgtcacccaaacagccccagattgcagaaa

SEQ ID NO: 5599 - DNA, 559 bp, Homo sapiens
  source 1..559: mol_type = unassigned DNA; mol_type = unassigned DNA
gagcgtcagagtctccaccccgaggagcggccagagccccatgcgggcctgacctgtccgaccgacccctcgtccaccaagggagggctcagagtggagaagcctgacttcacccagtccaatccacagtgcaaagagcgagtccattataacccagtcagaagagaaggcagattttgtgattattcccgctgaaggaatagagaacagaacagaagggacagattctccattatctcgagactggcggccagggagccctggaacctatctggagacctcatgggaagaacagctgttggaacaacaagaatatttagaaaaagaaatggaggaagcaaagaaaatgatatcaggactacaggccttactgctcaatggatccttacctgaagatgaacaggagaggcccttggccctctgtgaaccaggtgtcaatcccgaggaacaactgattataatccaaagtcgtctggatcagagtatggaggagaatcaggacttaaagaaggaactgctgaaatgtaaacaagaagccagaaacttacaggggataaag

SEQ ID NO: 5600 - DNA, 4825 bp, Homo sapiens
  source 1..4825: mol_type = unassigned DNA; mol_type = unassigned DNA
atccggaaggtggcacggagtgggatcgccgctggggactcgaggcgcagcctgcgccgccgggagcctccctcccagtgggagatgggttgagatgcccccgccaggggggatgcccggcaccgtgcgtccgcggaggccaagatgcagcggccaggggccggcagcctgcgaggggaggcagcttccgccggggccgggctgctgcacagtctgagcggccgggactgcgcgcttcagagcctggagcatcccagtcgctggggccgagacgccgccgccgccgccgttcccgctttctcccgcgagccgggccagtagctttgctagctggccttcccgtggaggcgttttccagccccagcgcggggagacatgcctgaatttgggagcgatgtgactctcagcctcccacttcacccggggacgcaggcttgctgaagcccgagacaggagggggaccatgggagggacgcaagtcaaatgcctgacttcacccagtccaatccacagtgcaaagagcgagtccattataacccagtcagaagagaaggcagattttgtgattattcccgctgaaggaatagagaacagaacagaagggacagattctccattatctcgagactggcggccagggagccctggaacctatctggagacctcatgggaagaacagctgttggaacaacaagaatatttagaaaaagaaatggaggaagcaaagaaaatgatatcaggactacaggccttactgctcaatggatccttacctgaagatgaacaggagaggcccttggccctctgtgaaccaggtgtcaatcccgaggaacaactgattataatccaaagtcgtctggatcagagtatggaggagaatcaggacttaaagaaggaactgctgaaatgtaaacaagaagccagaaacttacaggggataaaggatgccttgcagcagagattgactcagcaggacacatctgttcttcagctcaaacaagagctactgagggcaaatatggacaaagatgagctgcacaaccagaatgtggatctgcagaggaagctagatgagaggaaccggctcttgggagaatataaaaaagagctggggcagaaggatcgccttcttcagcagcaccaggccaagttagaagaagcactccggaaactctctgatgtcagttaccaccaggtggatctagagcgagagctagaacacaaagatgtcctcttggctcactgtatgaaaagagaggcagatgaggcgaccaactacaacagtcacaactctcaaagcaatggttttctccttccaacggcaggaaaaggagctacttcagtcagcaacagagggaccagcgacctgcagcttgttcgagatgctctccgcagcctgcgcaacagcttcagtggccacgatcctcagcaccacactattgacagcttggagcagggcatttctagcctcatggagcgcctgcatgttatggagacgcagaagaaacaagaaagaaaggttcgggtcaagtcacccagaactcaagtaggtagtgaataccgggagtcctggccccctaactcaaagttgcctcactcacagagctctccaactgtcagcagcacctgtactaaagtgctctatttcactgaccggtcacttacgcccttcatggtcaatataccaaagaggttggaggaggtgacgttaaaggattttaaagcagctattgatcgggaaggaaatcaccggtatcacttcaaagcactggatcctgagtttggcactgtcaaagaggagattttccatgatgatgatgccatccctggatgggaagggaaaattgtagcttgggtggaagaagaccatggagagaattaatgccaagtatcagattgagggcttatggaacctggtcactccctggctgcttcactcaggaaagggaactaaaaccagaatacactaagaagtttctagtttgtgtgccaaaacagaagcttctccaagcatgatggccacaggtcagtcctctttctgtgcctggcatatctggtacttaaaattctgtccaaatgtagaccatgggttcatctggagttccttgtccgtgggaacacagtgttctattctactctgaggacaacaaaccgaaggccttaaacgatggggatggatgatcccgcctctgtaggggcatggctgctattatctggaaattaggaattggatgcatcattcctgtgtgttacagtattattttaattggcctcaatggttgcagcaatcagagtcccagcgtttgtactcacagacaaggcaaaggtaccagcttttctgtttctttgaacctactgcaaaccaagaataactcatgaggtggtaccaaagatgaaagcccagacttcagtaatcttttgaaccagacgtggatggtgctgaattgttgcttggatggaaaaagggctgcccatgttgtgctacactatgctaaaactgtaatttagtaagaccttgggctgcctcttctgtcttaactggttctgcagcttgtccttttgcccacatagggcctatttcatgtactgttagttttctctggggactctttaactttagagccatttctttttcttcaaactgatgaacttttgtttgaaaggcataaggagtgaaaagctccttgaaaatccaggcgggtatggaaaggtgctgctacccatatctttttgactttctttgtttcatgactttaactcatggcatctcctttgtagtaaaaggagacagaccattaatttcagcatttctttgtgatttataagtactgagcatgaagtacttgtctgcccctcatttcaaggccagagttattttctatttatgtattagtctaggctgatcttttagggcacaatagaaaccatggggcgtggagcatgagttgtgaatggcagggatcattctgggtaaaaaaaacctagaatcatttctgatgtgcaacattgtcaagtgaagaagctaacagttcaactaccgagattatttgataacctgggttttctcattcatccatcaagcaccatcaaccagtcagccattattatttatatatgtattaccaaaagcagtctatctgcctgtgacctccaatgtacactgccaaacacaagagtaggacacatctgttctgggttcttgacctatctgtctccaattcatctccccttttcagccatttcaacaaactactctttggagctctgagatgacatcttgttgttttatatagatgtatcttttaaaaatagttcacgtttggagaattcttttgtactcatttgctttttgtctgagaaccatgtctatttttataactggagtgtgagttctgtatcttctcacattctgtatactgtatccattttctagagaacccagtagcttttatacagtctcttcttaccaccccttgtggtttcagaacaagctttattttattacgagtatattaatgacaactaattcctgttccaattctacctgttttagttgtgaaggtagttttgtgtaatccagttgattgctcctctggcagagagaaggagctcaaaagatacttgatgtctttcatgtaagtttacctggtcttttcctattgaagaatttttcatcagaaacgactgggaaagtttgggaaagtcagcaaaagaaagaatgcatttcgaaagcaaacagaagaaaaaagtatattctcacagtttttccccaggaagtctggagaaaaagtcctcatgtcaccaatttctctgttgcatgaattttagtgttttgctataagacagcatgagggctatcaggccaaaattcattattgtatttccaatacagtttgtcttgaatgtctgtctcttaaaccagtttttacttgtcagttttctctcagcaaacagtcttactattatgtggaatttaacttttcagagaaaatttccaaagtcctctaccttatttggcttttatctgtgtcttttggaaaaggagctgcatggcctcagtgcctccataaaaagcttaagttgagttcatgggagaacattaagatcgttttttttcccttttagctcggtaatctcatgtaccacaggtaatgaccaagcatctctgctagaggatgtaactctcataactcctgtgtaaaatgaggatcctgttggtgatcctcattccagtttccaaagcgagaggagccttctgagcagaagtatgcaagactgattctgtttggaacagtttcctatttggctgcattctaggaggcctcctgacttattcatagtattgtcgcctggtggcattggtgtggggtagcttgtcctgctacttgctaaagttctctttctttgagaaaactgaggaaccagaatgcttagagttcataaaataatctctaaaccatgttaggttaaaacaaaatgaccatctcacaaaaacgagtttagttgaatgctcaattccttacaaaatcttcatttaaggctgagtgtggtggctcatgcctgtaattccagcactttgggaggccgaggcaggaagactgcttgagcccaggagttcaagaccagcctgggcaacgtaggaagactccgtctctacatagaaattttattataaaagtagctggggatggtggcacacacctgtagtcccagctactcaggaggttgaggtgggaagattgcttgagcccaggagtttgaggttgcagtgagctgatcatgccactgcactctagcctaggctacagagcaggaccccatctcc

SEQ ID NO: 5601 - DNA, 3424 bp, Homo sapiens
  source 1..3424: mol_type = unassigned DNA; mol_type = unassigned DNA
gtgctatgagaacaggttcagaacgcaggtgacctgaacctgtgaacgctaccctgtgaacgctgtctgctggaaatcagttttcttcaacatgaactgtactccctcttttcattttttagaagggacagattctccattatctcgagactggcggccagggagccctggaacctatctggagacctcatgggaagaacagctgttggaacaacaagaatatttagaaaaagaaatggaggaagcaaagaaaatgatatcaggactacaggccttactgctcaatggatccttacctgaagatgaacaggagaggcccttggccctctgtgaaccaggtgtcaatcccgaggaacaactgattataatccaaagtcgtctggatcagagtatggaggagaatcaggacttaaagaaggaactgctgaaatgtaaacaagaagccagaaacttacaggggataaaggatgccttgcagcagagattgactcagcaggacacatctgttcttcagctcaaacaagagctactgagggcaaatatggacaaagatgagctgcacaaccagaatgtggatctgcagaggaagctagatgagaggaaccggctcttgggagaatataaaaaagagctggggcagaaggatcgccttcttcagcagcaccaggccaagttagaagaagcactccggaaactctctgatgtcagttaccaccaggtggatctagagcgagagctagaacacaaagatgtcctcttggctcactgtatgaaaagagaggcagatgaggcgaccaactacaacagtcacaactctcaaagcaatggttttctccttccaacggcaggaaaaggagctacttcagtcagcaacagagggaccagcgacctgcagcttgttcgagatgctctccgcagcctgcgcaacagcttcagtggccacgatcctcagcaccacactattgacagcttggagcagggcatttctagcctcatggagcgcctgcatgttatggagacgcagaagaaacaagaaagaaaggttcgggtcaagtcacccagaactcaagtaggtagtgaataccgggagtcctggccccctaactcaaagttgcctcactcacagagctctccaactgtcagcagcacctgtactaaagtgctctatttcactgaccggtcacttacgcccttcatggtcaatataccaaagaggttggaggaggtgacgttaaaggattttaaagcagctattgatcgggaaggaaatcaccggtatcacttcaaagcactggatcctgagtttggcactgtcaaagaggagattttccatgatgatgatgccatccctggatgggaagggaaaattgtagcttgggtggaagaagaccatggagagaattaatgccaagtatcagattgagggcttatggaacctggtcactccctggctgcttcactcaggaaagggaactaaaaccagaatacactaagaagtttctagtttgtgtgccaaaacagaagcttctccaagcatgatggccacaggtcagtcctctttctgtgcctggcatatctggtacttaaaattctgtccaaatgtagaccatgggttcatctggagttccttgtccgtgggaacacagtgttctattctactctgaggacaacaaaccgaaggccttaaacgatggggatggatgatcccgcctctgtaggggcatggctgctattatctggaaattaggaattggatgcatcattcctgtgtgttacagtattattttaattggcctcaatggttgcagcaatcagagtcccagcgtttgtactcacagacaaggcaaaggtaccagcttttctgtttctttgaacctactgcaaaccaagaataactcatgaggtggtaccaaagatgaaagcccagacttcagtaatcttttgaaccagacgtggatggtgctgaattgttgcttggatggaaaaagggctgcccatgttgtgctacactatgctaaaactgtaatttagtaagaccttgggctgcctcttctgtcttaactggttctgcagcttgtccttttgcccacatagggcctatttcatgtactgttagttttctctggggactctttaactttagagccatttctttttcttcaaactgatgaacttttgtttgaaaggcataaggagtgaaaagctccttgaaaatccaggcgggtatggaaaggtgctgctacccatatctttttgactttctttgtttcatgactttaactcatggcatctcctttgtagtaaaaggagacagaccattaatttcagcatttctttgtgatttataagtactgagcatgaagtacttgtctgcccctcatttcaaggccagagttattttctatttatgtattagtctaggctgatcttttagggcacaatagaaaccatggggcgtggagcatgagttgtgaatggcagggatcattctgggtaaaaaaaacctagaatcatttctgatgtgcaacattgtcaagtgaagaagctaacagttcaactaccgagattatttgataacctgggttttctcattcatccatcaagcaccatcaaccagtcagccattattatttatatatgtattaccaaaagcagtctatctgcctgtgacctccaatgtacactgccaaacacaagagtaggacacatctgttctgggttcttgacctatctgtctccaattcatctccccttttcagccatttcaacaaactactctttggagctctgagatgacatcttgttgttttatatagatgtatcttttaaaaatagttcacgtttggagaattcttttgtactcatttgctttttgtctgagaaccatgtctatttttataactggagtgtgagttctgtatcttctcacattctgtatactgtatccattttctagagaacccagtagcttttatacagtctcttcttaccaccccttgtggtttcagaacaagctttattttattacgagtatattaatgacaactaattcctgttccaattctacctgttttagttgtgaaggtagttttgtgtaatccagttgattgctcctctggcagagagaaggagctcaaaagatacttgatgtctttcatgtaagtttacctggtcttttcctattgaagaatttttcatcagaaacgactgggaaagtttgggaaagtcagcaaaagaaagaatgcatttcgaaagcaaacagaagaaaaaagtatattctcacagtttttccccaggaagtctggagaaaaagtcctcatgtcaccaatttctctgttgcatgaattttagtgttttgctataagacagcatgagggctatcaggccaaaattcattattgtatttccaatacagtttgtcttg

SEQ ID NO: 5602 - DNA, 1350 bp, Homo sapiens
  source 1..1350: mol_type = unassigned DNA; mol_type = unassigned DNA
aatgcattctgaagcaacccagatgtcaccatctgatctaactatatttggtttgcagaaggaactgctgaaatgtaaacaagaagccagaaacttacaggggataaaggatgccttgcagcagagattgactcagcaggacacatctgttcttcagctcaaacaagagctactgagggcaaatatggacaaagatgagctgcacaaccagaatgtggatctgcagaggaagctagatgagaggaaccggctcttgggagaatataaaaaagagctggggcagaaggatcgccttcttcagcagcaccaggccaagttagaagaagcactccggaaactctctgatgtcagttaccaccaggtggatctagagcgagagctagaacacaaagatgtcctcttggctcactgtatgaaaagagaggcagatgaggcgaccaactacaacagtcacaactctcaaagcaatggttttctccttccaacggcaggaaaaggagctacttcagtcagcaacagagggaccagcgacctgcagcttgttcgagatgctctccgcagcctgcgcaacagcttcagtggccacgatcctcagcaccacactattgacagcttggagcagggcatttctagcctcatggagcgcctgcatgttatggagacgcagaagaaacaagaaagaaaggttcgggtcaagtcacccagaactcaagtaggtagtgaataccgggagtcctggccccctaactcaaagttgcctcactcacagagctctccaactgtcagcagcacctgtactaaagtgctctatttcactgaccggtcacttacgcccttcatggtcaatataccaaagaggttggaggaggtgacgttaaaggattttaaagcagctattgatcgggaaggaaatcaccggtatcacttcaaagcactggatcctgagtttggcactgtcaaagaggagattttccatgatgatgatgccatccctggatgggaagggaaaattgtagcttgggtggaagaagaccatggagagaattaatgccaagtatcagattgagggcttatggaacctggtcactccctggctgcttcactcaggaaagggaactaaaaccagaatacactaagaagtttctagtttgtgtgccaaaacagaagcttctccaagcatgatggccacaggtcagtcctctttctgtgcctggcatatctggtacttaaaattctgtccaaatgtagaccatgggttcatctggagttccttgtccgtgggaacacagtgttctattctactctgaggacaacaaaccgaaggccttaaacgatggggatggatgatcc

SEQ ID NO: 5603 - DNA, 509 bp, Homo sapiens
  source 1..509: mol_type = unassigned DNA; mol_type = unassigned DNA
aggcagatgaggcgaccaactacaacagtcacaactctcaaagcaatggttttctccttccaacggcaggaaaaggagctacttcagtcagcaacagagggaccagcgacctgcagcttgttcgagatgctctccgcagcctgcgcaacagcttcagtggccacgatcctcagcaccacactattgacagcttggagcagggcatttctagcctcatggagcgcctgcatgttatggagacgcagaagaaacaagaaagaaaggttcgggtcaagtcacccagaactcaagtaggtagtgaataccgggagtcctggccccctaactcaagtaagtacccatttttgctcagtagggactcctagcatattagaccagaaatttagtatttttcacactacattttggggatgtaatttttcttgtagtacttcacttttatactattttgtttctgtagcaatactgcaattgagttagttctaagactatgaagacatatgccatca

SEQ ID NO: 5604 - DNA, 578 bp, Homo sapiens
  source 1..578: mol_type = unassigned DNA; mol_type = unassigned DNA
atatttaatactgttttcattccctagtgatgactggttctccagcctctgctgttttagtcatctgggttatcggggcagtgacctaacaaggggctatttctgcttattgactttggcagggggctgtgtttaaagttaacatcttatctttccagctattgatcaacagtctattttagtgctctctccttgtgttgcaggttggaggaggtgacgttaaaggattttaaagcagctattgatcgggaaggaaatcaccggtatcacttcaaagcactggatcctgagtttggcactgtcaaagaggagattttccatgatgatgatgccatccctggatgggaagggaaaattgtagcttgggtggaagaagaccatggagagaattaatgccaagtatcagattgagggcttatggaacctggtcactccctggctgcttcactcaggaaagggaactaaaaccagaatacactaagaagtttctagtttgtgtgccaaaacagaagcttctccaagcatgatggccacaggtcagtcctctttctgtgcctggcatatctggtacttaaaat

SEQ ID NO: 5605 - DNA, 894 bp, Homo sapiens
  source 1..894: mol_type = unassigned DNA; mol_type = unassigned DNA
gtcagactttgctcagccgatttcacgcaccttactcagactaaggtttacttctttcagaaaaagcagtgacaaacagacgacgtgctgagctgccagcttagtggaagctctgctctgggtggagagcagcctcgctttggtgacgcacagtgctgggaccctccaggagccccgggattgaaggatggtggcggccgtcctgctggggctgagctggctctgctctcccctgggagctctggtcctggacttcaacaacatcaggagctctgctgacctgcatggggcccggaagggctcacagtgcctgtctgacacggactgcaataccagaaagttctgcctccagccccgcgatgagaagccgttctgtgctacatgtcgtgggttgcggaggaggtgccagcgagatgccatgtgctgccctgggacactctgtgtgaacgatgtttgtactacgatggaagatgcaaccccaatattagaaaggcagcttgatgagcaagatggcacacatgcagaaggaacaactgggcacccagtccaggaaaaccaacccaaaaggaagccaagtattaagaaatcacaaggcaggaagggacaagagggagaaagttgtctgagaacttttgactgtggccctggactttgctgtgctcgtcatttttggacgaaaatttgtaagccagtccttttggagggacaggtctgctccagaagagggcataaagacactgctcaagctccagaaatcttccagcgttgcgactgtggccctggactactgtgtcgaagccaattgaccagcaatcggcagcatgctcgattaagagtatgccaaaaaatagaaaagctataaatatttcaaaataaagaagaatccacattgca

SEQ ID NO: 5606 - DNA, 7447 bp, Homo sapiens
  source 1..7447: mol_type = unassigned DNA; mol_type = unassigned DNA
gggcctggttgtggaggccccttttgcaaaacctcagtctgaatttagtagacagaagtcactaggaatgccttgacaggatcctgccttagctaaggctccctccagctgcagagggtgtttttgttagactcacacactgcgtgaaactgctcagaatagagccatgatctcaaccacgaaatgggaacttagattttggagaaactaacggggacggacttctttcctagcctgagtgttgagcagtgtcatgccttggcgtttcagctcctcgttgtctaggtggtgaaatgacagaactcattcgcttctttgattggtgattttgaaataatctttcatcaagttccatctcctttaccctcatatggaatatatctctctgtctgttgttaaactacgatgacatgtctgtagctatcagaaagagaagctgggaagaacatgtgacccactggatgggacagccttttaattctgatgatcgtaacacagcatgtcatcatggactagtagctgacagcttgcaggcaagtatggaaaaagatgcaactctaaatgtggaccgcaaagagaagtgtgtttcactacctgactgctgtcatggatcagagctgagagattttcctgggaggccaatgggtcatctttcaaaggatgtggacgaaaatgacagccatgaaggtgaagatcagtttctttctctggaagccagcacagaaacactagtgcatgtttctgatgaggataacaatgctgatttatgccttacagatgataaacaggttttaaatacccaagggcagaaaacatcaggccaacatatgatccaaggagcaggctccttagaaaaggcactgcccatcatacaaagtaaccaagtttcttctaactcctggggaatagctggtgaaactgaattagcactggtaaaagaaagtggggagagaaaagttactgactctataagtaaaagcctggagctttgcaatgaaataagcttaagtgaaataaaagatgcacccaaagtaaatgcagtggatactttgaacgtgaaagatattgcacctgagaaacaattgcttaactctgctgtaattgctcagcaacgaaggaaacctgacccccctaaagatgaaaatgaaagaagcacctgcaatgtagtacaaaatgagttcttggatactccttgcacaaacagaggactgccattattaaaaacagattttggaagctgccttctgcagcctccttcctgccccaatggaatgtcagctgaaaatggcctggagaagagtggtttttcacaacatcaaaacaaaagtccaccaaaggtcaaggcagaagatggcatgcagtgtttacaattaaaggagaccctggccacccaggaacccacagataaccaagtcagacttcgtaagagaaaggaaataagagaagatcgagatagggcgcggctggactccatggtgctgctgattatgaaactggaccagcttgatcaggacatagaaaatgccctcagcaccagctcctctccatcaggcacaccaacaaacctgcggcggcacgttcctgatctggaatcaggatctgaaagtggagcagataccatttcagtaaatcagacacgagtaaatttgtcttctgacactgagtccacggacctcccatcttccactccagtagccaattctggaaccaaacccaagactacggctattcaaggtatttcagagaaggaaaaggctgaaattgaagccaaggaagcttgtgattggctacgggcaactggtttcccccagtatgcacagctttatgaagatttcctgttccccatcgatatttccttggtcaagagagagcatgattttttggacagagatgccattgaggctctatgcaggcgtctaaatactttaaacaaatgtgcggtgatgaagctagaaattagtcctcatcggaaacgaagtgacgattcagacgaggatgagccttgtgccatcagtggcaaatggactttccaaagggacagcaagaggtggtcccggcttgaagagtttgatgtcttttctccaaaacaagacctggtccctgggtccccagacgactcccacccgaaggacggccccagccccggaggcacgctgatggacctcagcgagcgccaggaggtgtcttccgtccgcagcctcagcagcactggcagcctccccagccacgcgccccccagcgaggatgctgccaccccccggactaactccgtcatcagcgtttgctcctccagcaacttggcaggcaatgacgactctttcggcagcctgccctctcccaaggaactgtccagcttcagcttcagcatgaaaggccacgaaaaaactgccaagtccaagacgcgcagtctgctgaaacggatggagagcctgaagctcaagagctcccatcacagcaagcacaaagcgccctcaaagctggggttgatcatcagcgggcccatcttgcaagaggggatggatgaggagaagctgaagcagctcaactgcgtggagatctccgccctcaatggcaaccgcatcaacgtccccatggtacgaaagaggagcgtttccaactccacgcagaccagcagcagcagcagccagtcggagaccagcagcgcggtcagcacgcccagccctgttacgaggacccggagcctcagtgcgtgcaacaagcgggtgggcatgtacttagagggcttcgatcctttcaatcagtcaacatttaacaacgtggtggagcagaactttaagaaccgcgagagctacccagaggacacggtgttctacatccctgaagatcacaagcctggcactttccccaaagctctcaccaatggcagtttctccccctcggggaataacggctctgtgaactggaggacgggaagcttccacggccctggccacatcagcctcaggagggaaaacagtagcgacagccccaaggaactgaagagacgcaattcttccagctccatgagcagccgcctgagcatctacgacaacgtgccgggctccatcctctactccagttcaggggacctggcggatctggagaacgaggacatcttccccgagctggacgacatcctctaccacgtgaaggggatgcagcggatagtcaatcagtggtcggagaagttttctgatgagggagattcggactcagccctggactcggtctctccctgcccgtcctctccaaaacagatacacctggatgtggacaacgaccgaaccacacccagcgacctggacagcacaggcaactccctgaatgaaccggaagagccctccgagatcccggaaagaagggattctggggttggggcttccctaaccaggtccaacaggcaccgactgagatggcacagtttccagagctcacatcggccaagcctcaactctgtatcactacagattaactgccagtctgtggcccagatgaacctgctgcagaaatactcactcctaaagctaacggccctgctggagaaatacacaccttctaacaagcatggttttagctgggccgtgcccaagttcatgaagaggatcaaggttccagactacaaggaccggagtgtgtttggggtcccactgacggtcaacgtgcagcgcacaggacaaccgttgcctcagagcatccagcaggccatgcgatacctccggaaccattgtttggatcaggttgggctcttcagaaaatcgggggtcaagtcccggattcaggctctgcgccagatgaatgaaggtgccatagactgtgtcaactacgaaggacagtctgcttatgacgtggcagacatgctgaagcagtattttcgagatcttcctgagccactaatgacgaacaaactctcggaaacctttctacagatctaccaatatgtgcccaaggaccagcgcctgcaggccatcaaggctgccatcatgctgctgcctgacgagaaccgggaggttctgcagaccctgctttatttcctgagcgatgtcacagcagccgtaaaagaaaaccagatgaccccaaccaacctggccgtgtgcttagcgccttccctcttccatctcaacaccctgaagagagagaattcctctcccagggtaatgcaaagaaaacaaagtttgggcaaaccagatcagaaagatttgaatgaaaacctagctgccactcaagggctggcccatatgatcgccgagtgcaagaagcttttccaggttcccgaggaaatgagccgatgtcgtaattcctataccgaacaagagctgaagcccctcactctggaagcactcgggcacctgggtaatgatgactcagctgactaccaacacttcctccaggactgtgtggatggcctgtttaaagaagtcaaagagaagtttaaaggctgggtcagctactccacttcggagcaggctgagctgtcctataagaaggtgagcgaaggaccccctctgaggctttggaggtcagtcattgaagtccctgctgtgccagaggaaatcttaaagcgcctacttaaagaacagcacctctgggatgtagacctgttggattcaaaagtgatcgaaattctggacagccaaactgaaatttaccagtatgtccaaaacagtatggcacctcatcctgctcgagactacgttgttttaagaacctggaggactaatttacccaaaggagcctgtgcccttttactaacctctgtggatcacgatcgcgcacctgtggtgggtgtgagggttaatgtgctcttgtccaggtatttgattgaaccctgtgggccaggaaaatccaaactcacctacatgtgcagagttgacttaaggggccacatgccagaatggtacacaaaatcttttggacatttgtgtgcagctgaagttgtaaagatccgggattccttcagtaaccagaacactgaaaccaaagacaccaaatctaggtgatcactgaagcaacgcaaccgcttccaccaccatggtgtttgtttctagaacttttgccagtccttgaagaatgggttctgtgtctaatcctgaaacaaagaaaactacaagctggagtgtaggaattgactatagcaatttgatacatttttaaagctgcttcctgtttgttgagggtctgtattcatagaccttgactggaatatgtaagactgtgcaaaaaaaaaaaaaaaatttatgtgtattcttattcaaattgcttctgagaagcaaaactctttaaatacattatggaagataatgaagatacttcattctcttgtgatatcagtgtatgcgtacctgtgtcgctttatttgcagtgtgttgagggactggtgtatccactggaatagttggtactcttggatgtgttttctcaccaagatgagcaaagaaaggtttgcacagaggagtgtgaatgtgtgtttgttgctggctgaatggcaatagatgtctaaggtggattcagtgtctggcacactgagacacctccaagaaggagattgatgcatcaggttcagtttaacctggaatatctgactacccctgaatccacccagaaagggggcccaacacccttgtccatttatgggtattttttttcgaagttattaagcatattccttttccacgaacctcttctgtactttgattgtaataggttggctcttacacccattccaaatgcagtttatttttagacccgattgcaaatagtgatgtagttttaaccagtatggattagttcagggatgaactgctccctctagccttactggctctgatccacagggttttgttttgttttgttttgttttttgtttaagtcgagatataaaaactgaacacgataacacttactcttaaatcaagcatcaacactttttccctgttagaattctttgcatttttgtgtttgtaacagaaacgccttaagacactatgtttgggaatataggaaactatgtgtgtcccaaggaaatccctgtaaatttaactcacctacaaaaggctttttccccgcctttggttgttaacggcattcctgaaagccacatgtgtttattcattgggcttgttcttatcagcaaataggttttctggttttatgactttttgtcttattttatttttcctacatttctttttttttttttttcctttagaatgccctggaaatatatttaagtggtaatgaaaaatagtaatcatagtaaaacgcaacaagaagaaaaccaacccaaaccagtgaagttttttagaacctttagaagggtggtctttattcaggttttactgtaatggtaaggattgactcaagagacagtattagtaaatttattgtgtatggatcaaaagtgaataatgtatgaatgagagctgtaagaaggatttttattttgttataatttagttaccattttcagtgttatttcaaaggttctttgaagaattttggggcagggcatcagattagagttttaaaatttgagtattttggatatcagtgttcctcatgaagatatacatggatattcaattttgatggcttccagatttgtaagattgtatgttgtatataccattctattaagaaacatgtccactgtgctttcaaacatagataaagcatgataaagattattatttaagatatacttgtatttatacctcagatattcttttgggttttgtacctcaaggcttttttcttcttattgtaaatacactttacgtgaatacagtctaagtgaagaaaataaataaaaggaagaggtttataacttgctctatatctgtacagattataatcaataagtgcactattattaaatgtttaaagtaagggaaaagtctgggctgccttccttaatattgcatctcactcccacccttaaaaccacagattgcaaagcatagcattttagcatcaactacaatcaaaagagcgatttgctgaaggaaaaatcggactgcaaatcattccaaggccaaactgcaactgagccacccactcccaaacaggaaaccctggtgaaggttcaggaagcacggagattctctccaacaaaggtccagttaggaaacgacgctgagaggatgacgacaacgtgcaacagcagaaagatgcttgcaagcagagtcagggtcaccagtgaatgccacaaaagttctctttcccactgtttaatttgacaagagaagaatttgaaggatatgaacattttcaagaactctgctgaggtcacttagagcgccatcacaacttatttgtgtgactaattgcctagattgtaagctctttgagggcagggcttgtctcttacacatctttataatcccctgcagcggctttcagtattttgtacttgtaggcacctaataaatttattatttgctatactgaa

SEQ ID NO: 5607 - DNA, 4392 bp, Homo sapiens
  source 1..4392: mol_type = unassigned DNA; mol_type = unassigned DNA
gaggctgcggccacgaggaagaggggcggggggcggagcctgggaatggggcggggccggagaacagcccgtcgctaaggcctgcgacccagacagcggggaggaggcggtgccgcccgctctggccccgcccctcggggggtgggcccagcgggagggcccggctggcggagcgcgcgggagacagttcgctccgactgcccgagcgagggcgcttcgctcccagccaggacatggccgcacctctccgcatcaggagcgccggctcacggacttctcgcccaactccctgagcgctccctcgtttcgatctttagaaaaccccgctttctttctggggccgtgacgaggggcagggagcggcgagcaaggatgcgttgaggaccgcgagggcgcgcgtctcgggtgccgccgtgggtcccgacgcggaagccgagccgcctccgcctgcctcgacttccccacagcgcttccgccgccgcctgccgtgcttgatgtgcagaaagaagccggacaccatgatcctaacacaaattgaagccaaggaagcttgtgattggctacgggcaactggtttcccccagtatgcacagctttatgaagatttcctgttccccatcgatatttccttggtcaagagagagcatgattttttggacagagatgccattgaggctctatgcaggcgtctaaatactttaaacaaatgtgcggtgatgaagctagaaattagtcctcatcggaaacgaagtgacgattcagacgaggatgagccttgtgccatcagtggcaaatggactttccaaagggacagcaagaggtggtcccggcttgaagagtttgatgtcttttctccaaaacaagacctggtccctgggtccccagacgactcccacccgaaggacggccccagccccggaggcacgctgatggacctcagcgagcgccaggaggtgtcttccgtccgcagcctcagcagcactggcagcctccccagccacgcgccccccagcgaggatgctgccaccccccggactaactccgtcatcagcgtttgctcctccagcaacttggcaggcaatgacgactctttcggcagcctgccctctcccaaggaactgtccagcttcagcttcagcatgaaaggccacgaaaaaactgccaagtccaagacgcgcagtctgctgaaacggatggagagcctgaagctcaagagctcccatcacagcaagcacaaagcgccctcaaagctggggttgatcatcagcgggcccatcttgcaagaggggatggatgaggagaagctgaagcagctcaactgcgtggagatctccgccctcaatggcaaccgcatcaacgtccccatggtacgaaagaggagcgtttccaactccacgcagaccagcagcagcagcagccagtcggagaccagcagcgcggtcagcacgcccagccctgttacgaggacccggagcctcagtgcgtgcaacaagcgggtgggcatgtacttagagggcttcgatcctttcaatcagtcaacatttaacaacgtggtggagcagaactttaagaaccgcgagagctacccagaggacacggtgttctacatccctgaagatcacaagcctggcactttccccaaagctctcaccaatggcagtttctccccctcggggaataacggctctgtgaactggaggacgggaagcttccacggccctggccacatcagcctcaggagggaaaacagtagcgacagccccaaggaactgaagagacgcaattcttccagctccatgagcagccgcctgagcatctacgacaacgtgccgggctccatcctctactccagttcaggggacctggcggatctggagaacgaggacatcttccccgagctggacgacatcctctaccacgtgaaggggatgcagcggatagtcaatcagtggtcggagaagttttctgatgagggagattcggactcagccctggactcggtctctccctgcccgtcctctccaaaacagatacacctggatgtggacaacgaccgaaccacacccagcgacctggacagcacaggcaactccctgaatgaaccggaagagccctccgagatcccggaaagaagggattctggggttggggcttccctaaccaggtccaacaggcaccgactgagatggcacagtttccagagctcacatcggccaagcctcaactctgtatcactacagattaactgccagtctgtggcccagatgaacctgctgcagaaatactcactcctaaagctaacggccctgctggagaaatacacaccttctaacaagcatggttttagctgggccgtgcccaagttcatgaagaggatcaaggttccagactacaaggaccggagtgtgtttggggtcccactgacggtcaacgtgcagcgcacaggacaaccgttgcctcagagcatccagcaggccatgcgatacctccggaaccattgtttggatcaggttgggctcttcagaaaatcgggggtcaagtcccggattcaggctctgcgccagatgaatgaaggtgccatagactgtgtcaactacgaaggacagtctgcttatgacgtggcagacatgctgaagcagtattttcgagatcttcctgagccactaatgacgaacaaactctcggaaacctttctacagatctaccaatatgtgcccaaggaccagcgcctgcaggccatcaaggctgccatcatgctgctgcctgacgagaaccgggaggttctgcagaccctgctttatttcctgagcgatgtcacagcagccgtaaaagaaaaccagatgaccccaaccaacctggccgtgtgcttagcgccttccctcttccatctcaacaccctgaagagagagaattcctctcccagggtaatgcaaagaaaacaaagtttgggcaaaccagatcagaaagatttgaatgaaaacctagctgccactcaagggctggcccatatgatcgccgagtgcaagaagcttttccaggttcccgaggaaatgagccgatgtcgtaattcctataccgaacaagagctgaagcccctcactctggaagcactcgggcacctgggtaatgatgactcagctgactaccaacacttcctccaggactgtgtggatggcctgtttaaagaagtcaaagagaagtttaaaggctgggtcagctactccacttcggagcaggctgagctgtcctataagaaggtgagcgaaggaccccctctgaggctttggaggtcagtcattgaagtccctgctgtgccagaggaaatcttaaagcgcctacttaaagaacagcacctctgggatgtagacctgttggattcaaaagtgatcgaaattctggacagccaaactgaaatttaccagtatgtccaaaacagtatggcacctcatcctgctcgagactacgttgttttaagaacctggaggactaatttacccaaaggagcctgtgcccttttactaacctctgtggatcacgatcgcgcacctgtggtgggtgtgagggttaatgtgctcttgtccaggtatttgattgaaccctgtgggccaggaaaatccaaactcacctacatgtgcagagttgacttaaggggccacatgccagaatggtacacaaaatcttttggacatttgtgtgcagctgaagttgtaaagatccgggattccttcagtaaccagaacactgaaaccaaagacaccaaatctaggtgatcactgaagcaacgcaaccgcttccaccaccatggtgtttgtttctagaacttttgccagtccttgaagaatgggttctgtgtctaatcctgaaacaaagaaaactacaagctggagtgtaggaattgactatagcaatttgatacatttttaaagctgcttcctgtttgttgagggtctgtattcatagaccttgactggaatatgtaagactgtgcaaaaaaaaaaaaaaaatttatgtgtattcttattcaaattgcttctgagaagcaaaactctttaaatacattatggaagataatgaagatacttcattctcttgtgatatcagtgtatgcgtacctgtgtcgctttatttgcagtgtgttgagggactggtgtatccactggaatagttggtactcttggatgtgttttctcaccaagatgagcaaagaaaggtttgcacagaggagtgtgaatgtgtgtttgttgctggctgaatggcaatagatgtctaaggtggattcagtgtctggcacactgagacacctccaagaaggagattgatgcatcaggttcagtttaacctggaatatctgactacccctgaatccacccagaaagggggcccaacaccctt

SEQ ID NO: 5608 - DNA, 2028 bp, Homo sapiens
  source 1..2028: mol_type = unassigned DNA; mol_type = unassigned DNA
gctgttgcatatagtgctggggtggacctggtttcaggacaccagggagcctggggtcggctcacaaaacccccattgttccttttccatcttcctttagaaacctaaagatgtaatgttctccgggtcatcagcagcagattttattttgacttcaggtcattcactgttgagctctggagttggctcccattgtgttaggctctcattgctgttttcccatcatgtgttatctgcgccttttgaccctaaatgctttcgatctcatcaagaactcagaagtgattcttacccttttttcaagacaaaagggaccttgtttttcacactctatcagatgcacctaattaggggccgtgcccaagttcatgaagaggatcaaggttccagactacaaggaccggagtgtgtttggggtcccactgacggtcaacgtgcagcgcacaggacaaccgttgcctcagagcatccagcaggccatgcgatacctccggaaccattgtttggatcaggttgggctcttcagaaaatcgggggtcaagtcccggattcaggctctgcgccagatgaatgaaggtgccatagactgtgtcaactacgaaggacagtctgcttatgacgtggcagacatgctgaagcagtattttcgagatcttcctgagccactaatgacgaacaaactctcggaaacctttctacagatctaccaatatgtgcccaaggaccagcgcctgcaggccatcaaggctgccatcatgctgctgcctgacgagaaccgggaggttctgcagaccctgctttatttcctgagcgatgtcacagcagccgtaaaagaaaaccagatgaccccaaccaacctggccgtgtgcttagcgccttccctcttccatctcaacaccctgaagagagagaattcctctcccagggtaatgcaaagaaaacaaagtttgggcaaaccagatcagaaagatttgaatgaaaacctagctgccactcaagggctggcccatatgatcgccgagtgcaagaagcttttccaggttcccgaggaaatgagccgatgtcgtaattcctataccgaacaagagctgaagcccctcactctggaagcactcgggcacctgggtaatgatgactcagctgactaccaacacttcctccaggactgtgtggatggcctgtttaaagaagtcaaagagaagtttaaaggctgggtcagctactccacttcggagcaggctgagctgtcctataagaaggtgagcgaaggaccccctctgaggctttggaggtcagtcattgaagtccctgctgtgccagaggaaatcttaaagcgcctacttaaagaacagcacctctgggatgtagacctgttggattcaaaagtgatcgaaattctggacagccaaactgaaatttaccagtatgtccaaaacagtatggcacctcatcctgctcgagactacgttgttttaagaacctggaggactaatttacccaaaggagcctgtgcccttttactaacctctgtggatcacgatcgcgcacctgtggtgggtgtgagggttaatgtgctcttgtccaggtatttgattgaaccctgtgggccaggaaaatccaaactcacctacatgtgcagagttgacttaaggggccacatgccagaatggtacacaaaatcttttggacatttgtgtgcagctgaagttgtaaagatccgggattccttcagtaaccagaacactgaaaccaaagacaccaaatctaggtgatcactgaagcaacgcaaccgcttccaccaccatggtgtttgtttctagaacttttgccagtccttgaagaatgggttctgtgtctaatcctgaaacaaagaaaactacaagctggagtgtaggaattgactatagcaatttgatacatttttaaagctgcttcctgtttgttgagggtctgtattcatagaccttgactggaatatgtaagactgtgcaaaaaaaaaaaaaaaatttatgtgtattcttattcaaa

SEQ ID NO: 5609 - DNA, 3758 bp, Homo sapiens
  source 1..3758: mol_type = unassigned DNA; mol_type = unassigned DNA
agttggcgcttcccggggccgcagtgccagccgcaatgccggcctcctgaaggcaggcgacagcctgcggccgggagcacagcgcggggcggagtaccgaggcatggtcgcggcgcccgggctgcgctgaaggcgtctgcgagcggatgggggaccccaaggcccacgtgatggcgcgccccctgcgagcccctctccggaggtcctttagcgatcacatcagggactccacggccagagccctggatgtcatttggaaaaacactagagacagacggctggcagaaattgaagccaaggaagcttgtgattggctacgggcaactggtttcccccagtatgcacagctttatgaagatttcctgttccccatcgatatttccttggtcaagagagagcatgattttttggacagagatgccattgaggctctatgcaggcgtctaaatactttaaacaaatgtgcggtgatgaagctagaaattagtcctcatcggaaacgaagtgacgattcagacgaggatgagccttgtgccatcagtggcaaatggactttccaaagggacagcaagaggtggtcccggcttgaagagtttgatgtcttttctccaaaacaagacctggtccctgggtccccagacgactcccacccgaaggacggccccagccccggaggcacgctgatggacctcagcgagcgccaggaggtgtcttccgtccgcagcctcagcagcactggcagcctccccagccacgcgccccccagcgaggatgctgccaccccccggactaactccgtcatcagcgtttgctcctccagcaacttggcaggcaatgacgactctttcggcagcctgccctctcccaaggaactgtccagcttcagcttcagcatgaaaggccacgaaaaaactgccaagtccaagacgcgcagtctgctgaaacggatggagagcctgaagctcaagagctcccatcacagcaagcacaaagcgccctcaaagctggggttgatcatcagcgggcccatcttgcaagaggggatggatgaggagaagctgaagcagctcaactgcgtggagatctccgccctcaatggcaaccgcatcaacgtccccatggtacgaaagaggagcgtttccaactccacgcagaccagcagcagcagcagccagtcggagaccagcagcgcggtcagcacgcccagccctgttacgaggacccggagcctcagtgcgtgcaacaagcgggtgggcatgtacttagagggcttcgatcctttcaatcagtcaacatttaacaacgtggtggagcagaactttaagaaccgcgagagctacccagaggacacggtgttctacatccctgaagatcacaagcctggcactttccccaaagctctcaccaatggcagtttctccccctcggggaataacggctctgtgaactggaggacgggaagcttccacggccctggccacatcagcctcaggagggaaaacagtagcgacagccccaaggaactgaagagacgcaattcttccagctccatgagcagccgcctgagcatctacgacaacgtgccgggctccatcctctactccagttcaggggacctggcggatctggagaacgaggacatcttccccgagctggacgacatcctctaccacgtgaaggggatgcagcggatagtcaatcagtggtcggagaagttttctgatgagggagattcggactcagccctggactcggtctctccctgcccgtcctctccaaaacagatacacctggatgtggacaacgaccgaaccacacccagcgacctggacagcacaggcaactccctgaatgaaccggaagagccctccgagatcccggaaagaagggattctggggttggggcttccctaaccaggtccaacaggcaccgactgagatggcacagtttccagagctcacatcggccaagcctcaactctgtatcactacagattaactgccagtctgtggcccagatgaacctgctgcagaaatactcactcctaaagctaacggccctgctggagaaatacacaccttctaacaagcatggttttagctgggccgtgcccaagttcatgaagaggatcaaggttccagactacaaggaccggagtgtgtttggggtcccactgacggtcaacgtgcagcgcacaggacaaccgttgcctcagagcatccagcaggccatgcgatacctccggaaccattgtttggatcaggttgggctcttcagaaaatcgggggtcaagtcccggattcaggctctgcgccagatgaatgaaggtgccatagactgtgtcaactacgaaggacagtctgcttatgacgtggcagacatgctgaagcagtattttcgagatcttcctgagccactaatgacgaacaaactctcggaaacctttctacagatctaccaatatgtgcccaaggaccagcgcctgcaggccatcaaggctgccatcatgctgctgcctgacgagaaccgggaggttctgcagaccctgctttatttcctgagcgatgtcacagcagccgtaaaagaaaaccagatgaccccaaccaacctggccgtgtgcttagcgccttccctcttccatctcaacaccctgaagagagagaattcctctcccagggtaatgcaaagaaaacaaagtttgggcaaaccagatcagaaagatttgaatgaaaacctagctgccactcaagggctggcccatatgatcgccgagtgcaagaagcttttccaggttcccgaggaaatgagccgatgtcgtaattcctataccgaacaagagctgaagcccctcactctggaagcactcgggcacctgggtaatgatgactcagctgactaccaacacttcctccaggactgtgtggatggcctgtttaaagaagtcaaagagaagtttaaaggctgggtcagctactccacttcggagcaggctgagctgtcctataagaaggtgagcgaaggaccccctctgaggctttggaggtcagtcattgaagtccctgctgtgccagaggaaatcttaaagcgcctacttaaagaacagcacctctgggatgtagacctgttggattcaaaagtgatcgaaattctggacagccaaactgaaatttaccagtatgtccaaaacagtatggcacctcatcctgctcgagactacgttgttttaagaacctggaggactaatttacccaaaggagcctgtgcccttttactaacctctgtggatcacgatcgcgcacctgtggtgggtgtgagggttaatgtgctcttgtccaggtatttgattgaaccctgtgggccaggaaaatccaaactcacctacatgtgcagagttgacttaaggggccacatgccagaatggtacacaaaatcttttggacatttgtgtgcagctgaagttgtaaagatccgggattccttcagtaaccagaacactgaaaccaaagacaccaaatctaggtgatcactgaagcaacgcaaccgcttccaccaccatggtgtttgtttctagaacttttgccagtccttgaagaatgggttctgtgtctaatcctgaaacaaagaaaactacaagctggagtgtaggaattgactatagcaatttgatacatttttaaagctgcttcctgtttgttgagggtctgtattcatagaccttgactggaatatgtaagactgtgcaaaaaaaaaaaaaaaa

SEQ ID NO: 5610 - DNA, 3556 bp, Homo sapiens
  source 1..3556: mol_type = unassigned DNA; mol_type = unassigned DNA
actgacttcgtgccctccatgttccttgacagcctgggcctctcctactggattaatacctgatgagtacctgatcacgcaacagtgaaacaacacaagaaattgaagccaaggaagcttgtgattggctacgggcaactggtttcccccagtatgcacagctttatgaagatttcctgttccccatcgatatttccttggtcaagagagagcatgattttttggacagagatgccattgaggctctatgcaggcgtctaaatactttaaacaaatgtgcggtgatgaagctagaaattagtcctcatcggaaacgaagtgacgattcagacgaggatgagccttgtgccatcagtggcaaatggactttccaaagggacagcaagaggtggtcccggcttgaagagtttgatgtcttttctccaaaacaagacctggtccctgggtccccagacgactcccacccgaaggacggccccagccccggaggcacgctgatggacctcagcgagcgccaggaggtgtcttccgtccgcagcctcagcagcactggcagcctccccagccacgcgccccccagcgaggatgctgccaccccccggactaactccgtcatcagcgtttgctcctccagcaacttggcaggcaatgacgactctttcggcagcctgccctctcccaaggaactgtccagcttcagcttcagcatgaaaggccacgaaaaaactgccaagtccaagacgcgcagtctgctgaaacggatggagagcctgaagctcaagagctcccatcacagcaagcacaaagcgccctcaaagctggggttgatcatcagcgggcccatcttgcaagaggggatggatgaggagaagctgaagcagctcaactgcgtggagatctccgccctcaatggcaaccgcatcaacgtccccatggtacgaaagaggagcgtttccaactccacgcagaccagcagcagcagcagccagtcggagaccagcagcgcggtcagcacgcccagccctgttacgaggacccggagcctcagtgcgtgcaacaagcgggtgggcatgtacttagagggcttcgatcctttcaatcagtcaacatttaacaacgtggtggagcagaactttaagaaccgcgagagctacccagaggacacggtgttctacatccctgaagatcacaagcctggcactttccccaaagctctcaccaatggcagtttctccccctcggggaataacggctctgtgaactggaggacgggaagcttccacggccctggccacatcagcctcaggagggaaaacagtagcgacagccccaaggaactgaagagacgcaattcttccagctccatgagcagccgcctgagcatctacgacaacgtgccgggctccatcctctactccagttcaggggacctggcggatctggagaacgaggacatcttccccgagctggacgacatcctctaccacgtgaaggggatgcagcggatagtcaatcagtggtcggagaagttttctgatgagggagattcggactcagccctggactcggtctctccctgcccgtcctctccaaaacagatacacctggatgtggacaacgaccgaaccacacccagcgacctggacagcacaggcaactccctgaatgaaccggaagagccctccgagatcccggaaagaagggattctggggttggggcttccctaaccaggtccaacaggcaccgactgagatggcacagtttccagagctcacatcggccaagcctcaactctgtatcactacagattaactgccagtctgtggcccagatgaacctgctgcagaaatactcactcctaaagctaacggccctgctggagaaatacacaccttctaacaagcatggttttagctgggccgtgcccaagttcatgaagaggatcaaggttccagactacaaggaccggagtgtgtttggggtcccactgacggtcaacgtgcagcgcacaggacaaccgttgcctcagagcatccagcaggccatgcgatacctccggaaccattgtttggatcaggttgggctcttcagaaaatcgggggtcaagtcccggattcaggctctgcgccagatgaatgaaggtgccatagactgtgtcaactacgaaggacagtctgcttatgacgtggcagacatgctgaagcagtattttcgagatcttcctgagccactaatgacgaacaaactctcggaaacctttctacagatctaccaatatgtgcccaaggaccagcgcctgcaggccatcaaggctgccatcatgctgctgcctgacgagaaccgggaggttctgcagaccctgctttatttcctgagcgatgtcacagcagccgtaaaagaaaaccagatgaccccaaccaacctggccgtgtgcttagcgccttccctcttccatctcaacaccctgaagagagagaattcctctcccagggtaatgcaaagaaaacaaagtttgggcaaaccagatcagaaagatttgaatgaaaacctagctgccactcaagggctggcccatatgatcgccgagtgcaagaagcttttccaggttcccgaggaaatgagccgatgtcgtaattcctataccgaacaagagctgaagcccctcactctggaagcactcgggcacctgggtaatgatgactcagctgactaccaacacttcctccaggactgtgtggatggcctgtttaaagaagtcaaagagaagtttaaaggctgggtcagctactccacttcggagcaggctgagctgtcctataagaaggtgagcgaaggaccccctctgaggctttggaggtcagtcattgaagtccctgctgtgccagaggaaatcttaaagcgcctacttaaagaacagcacctctgggatgtagacctgttggattcaaaagtgatcgaaattctggacagccaaactgaaatttaccagtatgtccaaaacagtatggcacctcatcctgctcgagactacgttgttttaagaacctggaggactaatttacccaaaggagcctgtgcccttttactaacctctgtggatcacgatcgcgcacctgtggtgggtgtgagggttaatgtgctcttgtccaggtatttgattgaaccctgtgggccaggaaaatccaaactcacctacatgtgcagagttgacttaaggggccacatgccagaatggtacacaaaatcttttggacatttgtgtgcagctgaagttgtaaagatccgggattccttcagtaaccagaacactgaaaccaaagacaccaaatctaggtgatcactgaagcaacgcaaccgcttccaccaccatggtgtttgtttctagaacttttgccagtccttgaagaatgggttctgtgtctaatcctgaaacaaagaaaactacaagctggagtgtaggaattgactatagcaatttgatacatttttaaagctgcttcctgtttgttgagggtctgtattcatagaccttgactggaatatgtaagactgtgc

SEQ ID NO: 5611 - DNA, 485 bp, Homo sapiens
  source 1..485: mol_type = unassigned DNA; mol_type = unassigned DNA
ttgccttggcactgaaaaatacatcctctttccaggtgagcgaaggaccccctctgaggctttggaggtcagtcattgaagtccctgctgtgccagaggaaatcttaaagcgcctacttaaagaacagcacctctgggatgtagacctgttggattcaaaagtgatcgaaattctggacagccaaactgaaatttaccagtatgtccaaaacagtatggcacctcatcctgctcgagactacgttgttttaagaacctggaggactaatttacccaaaggagcctgtgcccttttactaacctctgtggatcacgatcgcgcacctgtggtgggtgtgagggttaatgtgctcttgtccaggtatttgattgaaccctgtgggccaggaaaatccaaactcacctacatgtgcagagttgacttaaggtatgttctgattctgatttttttatatggtgagggtcatgaaggaaattctgacttt

SEQ ID NO: 5612 - DNA, 920 bp, Homo sapiens
  source 1..920: mol_type = unassigned DNA; mol_type = unassigned DNA
atttctgcttgacagcctgaaatgcatgacatgggtttcctgctgttgcatatagtgctggggtggacctggtttcaggacaccagggagcctggggtcggctcacaaaacccccattgttccttttccatcttcctttagaaacctaaagatgtaatgttctccgggtcatcagcagcagattttattttgacttcaggtcattcactgttgagctctggagttggctcccattgtgttaggctctcattgctgttttcccatcatgtgttatctgcgccttttgaccctaaatgctttcgatctcatcaagaactcagaagtgattcttacccttttttcaagacaaaagggaccttgtttttcacactctatcagatgcacctaattagggtattacatgttgttttctgcttgttccttcctataccgccattctgtaaggaaatccatcagcttccttaagactgtagaccccaattctccaggttcaaggtggaaggacgctcctaactgaggaaacggacctgtcaacccccactcttagaagatctagaacagcactgtccaggagaactgtctggatgataggaatgttctttatctgcacaggccaatacagtagggccgtgcccaagttcatgaagaggatcaaggttccagactacaaggaccggagtgtgtttggggtcccactgacggtcaacgtgcagcgcacaggacaaccgttgcctcagagcatccagcaggccatgcgatacctccggaaccattgtttggatcaggttgggctcttcagaaaatcgggggtcaagtcccggattcaggctctgcgccagatgaatgaaggtgccatagactgtgtcaactacgaaggacagtctgcttatgacgtggcagacatgctgaagcagtatttt

SEQ ID NO: 5613 - DNA, 1925 bp, Homo sapiens
  source 1..1925: mol_type = unassigned DNA; mol_type = unassigned DNA
actttaaaattaaaatcatgaagtacaagggggaaattgatactactggcatattatgagcagcctcctgctcatgccctgctccctgctggctgccagccccagtgtgtgaatggctcctttctgtctttgcagagtgacgattcagacgaggatgagccttgtgccatcagtggcaaatggactttccaaagggacagcaagaggtggtcccggcttgaagagtttgatgtcttttctccaaaacaagacctggtccctgggtccccagacgactcccacccgaaggacggccccagccccggaggcacgctgatggacctcagcgagcgccaggaggtgtcttccgtccgcagcctcagcagcactggcagcctccccagccacgcgccccccagcgaggatgctgccaccccccggactaactccgtcatcagcgtttgctcctccagcaacttggcaggcaatgacgactctttcggcagcctgccctctcccaaggaactgtccagcttcagcttcagcatgaaaggccacgaaaaaactgccaagtccaagacgcgcagtctgctgaaacggatggagagcctgaagctcaagagctcccatcacagcaagcacaaagcgccctcaaagctggggttgatcatcagcgggcccatcttgcaagaggggatggatgaggagaagctgaagcagctcaactgcgtggagatctccgccctcaatggcaaccgcatcaacgtccccatggtacgaaagaggagcgtttccaactccacgcagaccagcagcagcagcagccagtcggagaccagcagcgcggtcagcacgcccagccctgttacgaggacccggagcctcagtgcgtgcaacaagcgggtgggcatgtacttagagggcttcgatcctttcaatcagtcaacatttaacaacgtggtggagcagaactttaagaaccgcgagagctacccagaggacacggtgttctacatccctgaagatcacaagcctggcactttccccaaagctctcaccaatggcagtttctccccctcggggaataacggctctgtgaactggaggacgggaagcttccacggccctggccacatcagcctcaggagggaaaacagtagcgacagccccaaggaactgaagagacgcaattcttccagctccatgagcagccgcctgagcatctacgacaacgtgccgggctccatcctctactccagttcaggggacctggcggatctggagaacgaggacatcttccccgagctggacgacatcctctaccacgtgaaggggatgcagcggatagtcaatcagtggtcggagaagttttctgatgagggagattcggactcagccctggactcggtctctccctgcccgtcctctccaaaacagatacacctggatgtggacaacgaccgaaccacacccagcgacctggacagcacaggcaactccctgaatgaaccggaagagccctccgagatcccggaaagaagggattctggggttggggcttccctaaccaggtccaacaggcaccgactgagatggcacagtttccagagctcacatcggccaagcctcaactctgtatcactacagattaactgccagtctgtggcccagatgaacctgctgcagaaatactcactcctaaagctaacggccctgctggagaaatacacaccttctaacaagcatggttttagctgggccgtgcccaagttcatgaagaggatcaaggttccagactacaaggaccggagtgtgtttggggtcccactgacggtcaacgtgcagcgcacaggacaaccgttgcctcagagcatccagcaggccatgcgatacctccggaaccattgtttggatcaggttgggctcttcagaaaatcgggggtcaa

SEQ ID NO: 5614 - DNA, 455 bp, Homo sapiens
  source 1..455: mol_type = unassigned DNA; mol_type = unassigned DNA
gcgtttccctttgaaaacgcgaggtcacctggactgcccctgaagggaagacctgctatgtgacccaggagcagcccggcgcggacccagaaattgaagccaaggaagcttgtgattggctacgggcaactggtttcccccagtatgcacagctttatgaagatttcctgttccccatcgatatttccttggtcaagagagagcatgattttttggacagagatgccattgaggctctatgcagagtgacgattcagacgaggatgagccttgtgccatcagtggcaaatggactttccaaagggacagcaagaggtggtcccggcttgaagagtttgatgtcttttctccaaaacaagacctggtccctgggtccccagacgactcccacccgaaggacggccccagccccggaggcacgctgatggacctcagcgagcgccaggaggtgtctt

SEQ ID NO: 5615 - DNA, 562 bp, Homo sapiens
  source 1..562: mol_type = unassigned DNA; mol_type = unassigned DNA
cgttcttgagaatcaaccttgaaagttaaagacaaggccacctgccagccccaccctcccacctcccctgcgtgcttgcctgcggcgctgcgtttccctttgaaaacgcgaggtcacctggactgcccctgaagggaagacctgctatgtgacccaggagcagcccggcgcggacccagaaattgaagccaaggaagcttgtgattggctacgggcaactggtttcccccagtatgcacagctttatgaagatttcctgttccccatcgatatttccttggtcaagagagagcatgattttttggacagagatgccattgaggctctatgcaggcgtctaaatactttaaacaaatgtgcggtgatgaagctagaaattagtcctcatcggaaacgaagtgacgattcagacgaggatgagccttgtgccatcagtggcaaatggactttccaaagggacagcaagaggtggtcccggcttgaagagtttgatgtcttttctccaaaacaagacctggtccctgggtccccagacgactcccacccgaaggacggccccagc

SEQ ID NO: 5616 - DNA, 582 bp, Homo sapiens
  source 1..582: mol_type = unassigned DNA; mol_type = unassigned DNA
agttcgctccgactgcccgagcgagggcgcttcgctcccagccaggacatggccgcacctctccgcatcaggagcgccggctcacggacttctcgcccaactccctgagcgctccctcgtttcgatctttagaaaaccccgctttctttctggggccgtgacgaggggcagggagcggcgagcaaggatgcgttgaggaccgcgagggcgcgcgtctcgggtgccgccgtgggtcccgacgcggaagccgagccgcctccgcctgcctcgacttccccacagcgcttccgccgccgcctgccgtgcttgatgtgcagaaagaagccggacaccatgatcctaacacaaattgaagccaaggaagcttgtgattggctacgggcaactggtttcccccagtatgcacagctttatgaagatttcctgttccccatcgatatttccttggtcaagagagagcatgattttttggacagagatgccattgaggctctatgcagagtgacgattcagacgaggatgagccttgtgccatcagtggcaaatggactttccaaagggacagcaagaggtggtcccggc

SEQ ID NO: 5617 - DNA, 560 bp, Homo sapiens
  source 1..560: mol_type = unassigned DNA; mol_type = unassigned DNA
agagccctggatgtcatttggaaaaacactagagacagacggctggcagcagcggtaaaatcagtaaagttggaagtggatgaagataagagcacaaagggatccaatttttccaactcggaagtggcaattggtttgtctccttacacctttccccagaagaggcttttccatgttgctggagaagaaaacatcacctaggccggtgtgtgcctggcagaacactgcactccaatttcctcgggcagccacaaaaaaaaaaaaaaaaaggtggggttggggccgggggacagctcttcagtaagatgtgacaatatgccagtttcaccaatgataagagaaacctgagataccaacagtcagcacagaccacaggtcatgtttgacagtgcaaagctgcaaggtccttcagaccaagcaaataggagagtgggctccaaagcctgtcaacagggtcccgaaagctaaaagggaaactttcctaaagaacccgggaaacaatgtaaggatgctaaattggtcatttacggatgccctccctggttagaagaaacttcctt

SEQ ID NO: 5618 - DNA, 1837 bp, Homo sapiens
  source 1..1837: mol_type = unassigned DNA; mol_type = unassigned DNA
ttttgttagactcacacactgcgtgaaactgctcagaatagagccatgatctcaaccacgaaatgggaacttagattttggagaaactaacggggacggacttctttcctagcctgagtgttgagcagtgtcatgccttggcgtttcagctcctcgttgtctaggtggtgaaatgacagaactcattcgcttctttgattggtgattttgaaataatctttcatcaagttccatctcctttaccctcatatggaatatatctctctgtctgttgttaaactacgatgacatgtctgtagctatcagaaagagaagctgggaagaacatgtgacccactggatgggacagccttttaattctgatgatcgtaacacagcatgtcatcatggactagtagctgacagcttgcaggcaagtatggaaaaagatgcaactctaaatgtggaccgcaaagagaagtgtgtttcactacctgactgctgtcatggatcagagctgagagattttcctgggaggccaatgggtcatctttcaaaggatgtggacgaaaatgacagccatgaaggtgaagatcagtttctttctctggaagccagcacagaaacactagtgcatgtttctgatgaggataacaatgctgatttatgccttacagatgataaacaggttttaaatacccaagggcagaaaacatcaggccaacatatgatccaaggagcaggctccttagaaaaggcactgcccatcatacaaagtaaccaagtttcttctaactcctggggaatagctggtgaaactgaattagcactggtaaaagaaagtggggagagaaaagttactgactctataagtaaaagcctggagctttgcaatgaaataagcttaagtgaaataaaagatgcacccaaagtaaatgcagtggatactttgaacgtgaaagatattgcacctgagaaacaattgcttaactctgctgtaattgctcagcaacgaaggaaacctgacccccctaaagatgaaaatgaaagaagcacctgcaatgtagtacaaaatgagttcttggatactccttgcacaaacagaggactgccattattaaaaacagattttggaagctgccttctgcagcctccttcctgccccaatggaatgtcagctgaaaatggcctggagaagagtggtttttcacaacatcaaaacaaaagtccaccaaaggtcaaggcagaagatggcatgcagtgtttacaattaaaggagaccctggccacccaggaacccacagataaccaagtcagacttcgtaagagaaaggaaataagagaagatcgagatagggcgcggctggactccatggtgctgctgattatgaaactggaccagcttgatcaggacatagaaaatgccctcagcaccagctcctctccatcaggcacaccaacaaacctgcggcggcacgttcctgatctggaatcaggatctgaaagtggagcagataccatttcagtaaatcagacacgagtaaatttgtcttctgacactgagtccacggacctcccatcttccactccagtagccaattctggaaccaaacccaagactacggctattcaaggtatttcagagaaggaaaaggctgcggtaaaatcagtaaagttggaagtggatgaagataagagcacaaagggatccaatttttccaactcggaagtggcaattggtttgtctccttacacctttccccagaagaggcttttccatgttgctggagaagaaaacatcacctaggccggtgtgtgcctggcagaacactgcactccaatttcctcgggcagccac

SEQ ID NO: 5619 - DNA, 2451 bp, Homo sapiens
  source 1..2451: mol_type = unassigned DNA
tgggcctggttgtggaggccccttttgcaaaacctcagtctgaatttagtagacagaagtcactaggaatgccttgacaggatcctgccttagctaaggctccctccagctgcagagggtgtttttgttagactcacacactgcgtgaaactgctcagaatagagccatgatctcaaccacgaaatgggaacttagattttggagaaactaacggggacggacttctttcctagcctgagtgttgagcagtgtcatgccttggcgtttcagctcctcgttgtctaggtggtgaaatgacagaactcattcgcttctttgattggtgattttgaaataatctttcatcaagttccatctcctttaccctcatatggaatatatctctctgtctgttgttaaactacgatgacatgtctgtagctatcagaaagagaagctgggaagaacatgtgacccactggatgggacagccttttaattctgatgatcgtaacacagcatgtcatcatggactagtagctgacagcttgcaggcaagtatggaaaaagatgcaactctaaatgtggaccgcaaagagaagtgtgtttcactacctgactgctgtcatggatcagagctgagagattttcctgggaggccaatgggtcatctttcaaaggatgtggacgaaaatgacagccatgaaggtgaagatcagtttctttctctggaagccagcacagaaacactagtgcatgtttctgatgaggataacaatgctgatttatgccttacagatgataaacaggttttaaatacccaagggcagaaaacatcaggccaacatatgatccaaggagcaggctccttagaaaaggcactgcccatcatacaaagtaaccaagtttcttctaactcctggggaatagctggtgaaactgaattagcactggtaaaagaaagtggggagagaaaagttactgactctataagtaaaagcctggagctttgcaatgaaataagcttaagtgaaataaaagatgcacccaaagtaaatgcagtggatactttgaacgtgaaagatattgcacctgagaaacaattgcttaactctgctgtaattgctcagcaacgaaggaaacctgacccccctaaagatgaaaatgaaagaagcacctgcaatgtagtacaaaatgagttcttggatactccttgcacaaacagaggactgccattattaaaaacagattttggaagctgccttctgcagcctccttcctgccccaatggaatgtcagctgaaaatggcctggagaagagtggtttttcacaacatcaaaacaaaagtccaccaaaggtcaaggcagaagatggcatgcagtgtttacaattaaaggagaccctggccacccaggaacccacagataaccaagtcagacttcgtaagagaaaggaaataagagaagatcgagatagggcgcggctggactccatggtgctgctgattatgaaactggaccagcttgatcaggacatagaaaatgccctcagcaccagctcctctccatcaggcacaccaacaaacctgcggcggcacgttcctgatctggaatcaggatctgaaagtggagcagataccatttcagtaaatcagacacgagtaaatttgtcttctgacactgagtccacggacctcccatcttccactccagtagccaattctggaaccaaacccaagactacggctattcaaggtatttcagagaaggaaaaggctggtaagttgacattttggttctgttttctcgccaatctattttagaataaatttcaccttaaaataggcattttattaaatatataaaatgtatacatctcatgaatatatgggaaaatgttgtttaaattctgtaaaagaaatttgttttgctcaatatgtaagaaaaatatacgtggttttctgacataatgacattgtgttagaataagatatgtgtttcttggggtcttccttgtaactgcaaccacaatttttttttcttaagcaaaagaattaaatgttgatcaaggttctggggaatgaatttggaaattagttattaataattaccaaggtttatttttactcttaatgacttagtagccacagaaaaagatgtaattgatgcttaaagctgatgccatactatcaaaaatatagtgatgaagcaatgtgaataattgtattgaagaaaaaaattatagtatttttctgtgttctgtgctttaattataattatttaacagtattatgggaaatggacaaggactgatgagaaatgaaaatatgaaaaattagacatggattggtagatctatgtgtttttaaaaaatcatactatcttatgtgttctgtgtaataaaaacgaaaacagattaaaggtatattatctaacttgaagtacatcacttagtttgtagacatttgtga

SEQ ID NO: 5620 - DNA, 383 bp, Homo sapiens
  source 1..383: mol_type = unassigned DNA; mol_type = unassigned DNA
ccttctgcagcctccttcctgccccaatggaatgtcagctgaaaatggcctggagaagagtggtttttcacaacatcaaaacaaaagtccaccaaaggtcaaggcagaagatggcatgcagtgtttacaattaaaggagaccctggccacccaggaacccacagataaccaagtcagacttcgtaagagaaaggtaagacatatgcacagattctctggcttttgaaattttgtaaatatccttggatttatcagttatcattttgcttggattaaaaagatatgaagatggttcttttgccctgttatgcagatgtgtaattcaacgactacccacttggtcaaaccatcaaaatatgtaaaaattaaagaataataatcta

SEQ ID NO: 5621 - DNA, 562 bp, Homo sapiens
  source 1..562: mol_type = unassigned DNA
atcagacaacacattggcagtgagttcatctgctctactctgctttggaataacacatgtgattaaccaggtggtgaaatgacagaactcattcgcttctttgattggtgattttgaaataatctttcatcaagttccatctcctttaccctcatatggaatatatctctctgtctgttgttaaactacgatgacatgtctgtagctatcagaaagagaagctgggaagaacatgtgacccactggatgggacagccttttaattctgatgatcgtaacacagcatgtcatcatggactagtagctgacagcttgcaggcaagtatggaaaaagatgcaactctaaatgtggaccgcaaagagaagtgtgtttcactacctgactgctgtcatggatcagagctgagagattttcctgggaggccaatgggtcatctttcaaaggatgtggacgaaaatgacagccatgaaggtgaagatcagtttctttctctggaagccagcacagaaacactagtgcatgtttctgatgaggataacaatgctgatttatgccttacag

SEQ ID NO: 5622 - DNA, 575 bp, Homo sapiens
  source 1..575: mol_type = unassigned DNA
agatgatagttcacaaaatttgtgacggacgaaggatgcagataccatgagcggctttagagatgtgattcaggaacgctgccatgctagatggaagcagttgtaagtgtttaatgtcagcaagactctaatacgatcaagatggagcctgtcttctgctccagcactggatttttgtaactggaggattctgactagaggtggtgaaatgacagaactcattcgcttctttgattggtgattttgaaataatctttcatcaagttccatctcctttaccctcatatggaatatatctctctgtctgttgttaaactacgatgacatgtctgtagctatcagaaagagaagctgggaagaacatgtgacccactggatgggacagccttttaattctgatgatcgtaacacagcatgtcatcatggactagtagctgacagcttgcaggcaagtatggaaaaagatgcaactctaaatgtggaccgcaaagagaagtgtgtttcactacctgactgctgtcatggatcagagctgagagattttcctgggaggccaatgggtcatctttcaaagg

SEQ ID NO: 5623 - DNA, 1806 bp, Homo sapiens
  source 1..1806: mol_type = unassigned DNA
gattatcagacaacacattggcagtgagttcatctgctctactctgctttggaataacacatgtgattaaccagataggcattttccaaaaacaaactatgtcactgaagaatgcaagactgtttctttagagccttccatgcttaacttgaaagctgtcaacccaggaggctgaaacagagctagattatgaatcctgagtgaatagctcattctttgcgcccatgcttttgctgcatgctgccatgtggtacaaggctgagaggtatgcactatgatagctaatgaagcacttcctttatatcgcactgaccagaactcttacttgaagcccgtatattatgccactgaaatctcacaatgtgagcttttgttctggctagcagaggcagttgcttgtcctttctgtagctaaatttcatgcaccaaagttgttagaccctttactaatatgtgtaggtctaagtcataaaaccagcttctgctatgtttgcaagaatgttttgttttgttttgtctgccttttcaatgcagcatcccctaaagccaatcatttgtaattttgaggccattgagagataaaaggcttgaagtaaaagtcatcggccctcctgaactcactcatctatgtcaaatatagtgatacagttaacattctaagaacagagattgagaagaaacttaatttaggatgaaaagaatggcatcagatggaccaaaattaattacactgtgtaatcctcgatgtaactgagaaatattcaatgtgacccatttgttatatttaaacatattattatcataaggtattatgtaattagggcctcctttcctggactgtggttagattttgtgtctcattgcatgctttcagaaagtgacctaaagaacaatacatagtgattgtcataacaatctatgaaatataggcttcggttaaccaaaatgcaaatatcaaatatttaaaagttcctcaaaacttataaatttttaaatgaaaaaattatgaaccacattctcaaacttgaggtgtatcaagtccttcagggagtcctccatggttccttcctctccctcattgaacacatcccatcagtcacaaaataccataactacacatccccaaactggcggcttctcttcaatcccttctccaagcccttggtatcagtagccaccatttttcactgtgtgaaagctgattttacaaattgggtcattcttgtaatattcaggtaaaacagaatagaagaaccagggagaaagcactcaagacatatagcacctgctccaagaattaaatcttccacaagcccagctgctgaaactgcccattggaacatgaaaccagtttttctctcatagctactgaaacaacctgctatgagtctaaggccagttttaaccaccactgtcactcatgaatcagagcttgccagctccccagaattttactagtgccaatgaactttctggaaaaacaatatgtaacatttttccttttagaaaacctccaaccttctccttgttctttagacaaagatcatctggtttgtgtgtatgccccgagttgcaattcttgcttcccaaataaaatttagagatttgtctctagattgcatttaacttagacacctggatctaacacacctattattttagcttgttttcagactgctataaagagatacccaagactgggtaattttaaaggaaagaagtttaattgactcacagttccacctggctggggaggcctcaggaaacttataatcatggcagaaggtgaaggggtaacaggcacct

SEQ ID NO: 5624 - DNA, 5034 bp, Homo sapiens
  source 1..5034: mol_type = unassigned DNA
gttggaaacggcactgctgagtgaggttgaggggtgtctcggtatgtgcgccttggatctggtgtaggcgaggtcacgcctctcttcagacagcccgagccttcccggcctggcgcgtttagttcggaactgcgggacgcgccggtgggctagggcaaggtgtgtgccctcttcctgattctggagaaaaatgccggtccggaagcaagatacccagagagcattgcaccttttggaggaatatcgttcaaaactaagccaaactgaagacagacagctcagaagttccatagaacgggttattaacatatttcagagcaacctctttcaggctttaatagatattcaagaattttatgaagtgaccttactggataatccaaaatgtatagatcgttcaaagccgtctgaaccaattcaacctgtgaatacttgggagatttccagccttccaagctctactgtgacttcagagacactgccaagcagccttagccctagtgtagagaaatacaggtatcaggatgaagatacacctcctcaagagcatatttccccacaaatcacaaatgaagtgataggtccagaattggttcatgtctcagagaagaacttatcagagattgagaatgtccatggatttgtttctcattctcatatttcaccaataaagccaacagaagctgttcttccctctcctcccactgtccctgtgatccctgtcctgccagtccctgctgagaatactgtcatcctacccaccataccacaggcaaatcctcccccagtactggtcaacacagatagcttggaaacaccaacttacgttaatggcacagatgcagattatgaatatgaagaaatcacacttgaaaggggaaattcagggcttggtttcagcattgcaggaggtacggacaacccacacattggagatgactcaagtattttcattaccaaaattatcacagggggagcagccgcccaagatggaagattgcgggtcaatgactgtatattacgagtaaatgaagtagatgttcgtgatgtaacacatagcaaagcagttgaagcgttgaaagaagcagggtctattgtacgcttgtatgtaaaaagaaggaaaccagtgtcagaaaaaataatggaaataaagctcattaaaggtcctaaaggtcttgggtttagcattgctggaggtgttggaaatcagcatattcctggggataatagcatctatgtaaccaaaataattgaaggaggtgcagcacataaggatggcaaacttcagattggagataaacttttagcagtgaataacgtatgtttagaagaagttactcatgaagaagcagtaactgccttaaagaacacatctgattttgtttatttgaaagtggcaaaacccacaagtatgtatatgaatgatggctatgcaccacctgatatcaccaactcttcttctcagcctgttgataaccatgttagcccatcttccttcttgggccagacaccagcatctccagccagatactccccagtttctaaagcagtacttggagatgatgaaattacaagggaacctagaaaagttgttcttcatcgtggctcaacgggccttggtttcaacattgtaggaggagaagatggagaaggaatatttatttcctttatcttagccggaggacctgctgatctaagtggagagctcagaaaaggagatcgtattatatcggtaaacagtgttgacctcagagctgctagtcatgagcaggcagcagctgcattgaaaaatgctggccaggctgtcacaattgttgcacaatatcgacctgaagaatacagtcgttttgaagctaaaatacatgatttacgggagcagatgatgaatagtagtattagttcagggtcaggttctcttcgaactagccagaagcgatccctctatgtcagagccctttttgattatgacaagactaaagacagtgggcttcccagtcagggactgaacttcaaatttggagatatcctccatgttattaatgcttctgatgatgaatggtggcaagccaggcaggttacaccagatggtgagagcgatgaggtcggagtgattcccagtaaacgcagagttgagaagaaagaacgagcccgattaaaaacagtgaaattcaattctaaaacgagagataaagggcagtcattcaatgacaagcgtaaaaagaacctcttttcccgaaaattccccttctacaagaacaaggaccagagtgagcaggaaacaagtgatgctgaccagcatgtaacttctaatgccagcgatagtgaaagtagttaccgtggtcaagaagaatacgtcttatcttatgaaccagtgaatcaacaagaagttaattatactcgaccagtgatcatattgggacctatgaaagacaggataaatgatgacttgatctcagaatttcctgacaaatttggatcctgtgttcctcatacaactagaccaaaacgagattatgaggtagatggaagagattatcattttgtgacttcaagagagcagatggaaaaagatatccaggaacataaattcattgaagctggccagtataacaatcatctatatggaacaagtgttcagtctgtacgagaagtagcagaaaagggcaaacactgtatccttgatgtgtctggaaatgccataaagagattacagattgcacagctttaccctatctccatttttattaaacccaaatccatggaaaatatcatggaaatgaataagcgtctaacagaagaacaagccagaaaaacatttgagagagccatgaaactggaacaggagtttactgaacatttcacagctattgtacagggggatacgctggaagacatttacaaccaagtgaaacagatcatagaagaacaatctggttcttacatctgggttccggcaaaagaaaagctatgaaaactcatgtttctctgtttctcttttccacaattccattttctttggcatctctttgccctttcctctggagtctttcttgagtactgatttcatgttgaattgtatcccacacatcatggtctgcagcttctttttcacatgtagtgtctccttcaagttacatcgtgtgtattatttaatgtcactattggttagtggccatttttcagaactgaagatggaatggcctgaccagctattaagaacgtggggagacgcagaaattgtggtaaaattccttaatgtttaagggaaagtaactttaagagatttttggaaaagctttatatacattcttttcaaatttcagtacaaatgaaaaagtggttttaatcagtgatttagtagactttgagcaactgtgcacgcttcagtttaatagcatggtttggccagtgtattactctcaagtccttttctcaatcaacttctatcatcaaagcaattgtttcattatagataaataaggacattttttaatttaaaaattcatgtctgagttgactttcataagggatttcattttttcctcaacattcttaaagccttttagtatttgacggttcttttttcccaggacatttgctaggaataacaacgtttcaatgtttttaatctacttgagcaacactatcgtgtcttacaaaagttgttcatatgtaaatgatcatcacatttcgtgaattgaggccatgttcaggtgctaaggaagttcgccttttacacagaagattgagaaaatttcctagatataaatacagataaatcagacgttacagtggtgacgtagtaaccatcatggcaatggaaaggagtccaattcatagcctaaaacttcaaatgtattcttaggagtcagattttactgaatattttacccacaatagctgcctattttgttataataaaatatatataaatatatatataaaactttctttaaactgtaactatgggaattattttctttacatagttgcgcacacacacaaacatatatatatatttaaaatatattttgtttcttttgccacctactcctaactttttgtttggtttttaaattaaatattaattgaatagacttatcttccttaatcatgtgaactgaaaatgggggcatggtggtcatgaggaggaaacatttagggaaattagattataagtaaaagtgtgggcatattctcctcttttctacaaaggttttcaaatggttcctgaggttttttgttgttgtccgtgttgttactgttgttcttgtcatcaggtttgattttggtccttgccctttccttctagttctccttttattaataggaaggcaggcaaaagccccatttatgtgtgtgttttcccctcagacagctttcatccactgctctgcactagaattgcacaaatcttcatggtgagcaattttaagaaatgttagtgaaaggtagaaattatttcacaaatcagtttctctggtccttcatattaataataatatttggcttcccattgctctttggagttgtttattaaatatgtgtttttgacaacctcctcattagtttcttaaatgagtactggtttgtaaagaattatcaacattatccattccatttatgaagaagaggagaacagctaataaactgtattgtaaaatccatatgttaagtgtgtcttgaattttgaaagaaaaaatatattttgcaagctaacattttcttgaaacaatttgaggcatcatgtaacttataaccgaatccaagagccgttaggcagcagagtgtgttaccacattgaaatacacagtgctgctgttagactaaatgtcgtaggttgttaaccacatagaaacacactagtatgaagaaaactgttgtaaaatctcaagagcttcagaaactgccttacaagaccgcagcataagctattttgaagtatttaccaaatagtcacatgttgtaaaatatcaagtggttataaaaggatgccatttatatattaaaatttacataacattgttttctgga

SEQ ID NO: 5625 - DNA, 4046 bp, Homo sapiens
  source 1..4046: mol_type = unassigned DNA
aataaatagcgaggtaaataatgtatcaatctaatagaatattatacaccaattttaaattattgctgtcaagcccatgtggtgacatggaaagaaatattttaatatgagcttttaaaaaacctaccatttggccaggtgcggtggctcacacctgtaatcccagcactttgggaggccaaggcagacagatcacgtgagctcagaggttcaatatcagcctggccaacatggtgaaaccagtctctactaaaaatagaaaaattagttgggcatggtgctatatacctgcagtgccaggtagtcaggtgtctgagacacaagaatagaatcgcttaaacctaggaggcagaggttgcagtgagctgagatcgtgccactgcactccagcctgggcaacaaagggagactatctcaaaaaaaaaaaaaaaaaaaaaatgaaatttccagctgggtgtggtgattcacacctgtaatcccagcactttgggaagctgagatgggaggatcccttgaggccaggagtttgagaccagtgtgggcaacatagttgagacttgtctcttttattaaaaaaaaaaaacaaaattttagcagggcatggtggtacatacctgtagtcccagccactctgggctaagatgggaggatcacagaagcccaggagaggagggcgaggctgcagtgagctatagtcataccacctcactcccacctgagcaacagagtgaggccctgtccctttaattaaaaaaaaaaaaaaaagttaaaataaaaattcagatttccctgtctcattgaaagttttatttttattttttaaaaataaaagtattagtctttgtttaattgaagggagatatttattgagagaaaacttgagatgacatttacatggatgagaagagtgcctatggttttaccaaacaataaagtcgtgaaatggagtcacttttaaggagggccaggcagtttctggctgggtgtgtttgttctcattgtcttttttatgttttgcaaaagccagccagtgccagtcttatcaaagcagagtttctaagaaatattagttggttttaaaatgcaattgccaccatcggtgccttcccttccagctgagacatctgaatttatgacttctaatattagttggttttaaaatgcaattgccaccatcagtgccttcccttccagctgagacatctgaatttatgacctttacaatcctttatctatatgatctcagaaacatggattttcatcttcagaaacaggagcaaagctggattgaaaataagatcatctatttatttttaattacaaagacatcccgtcattaaaatgggcatctatttgtttaaatatagtttgtcccctttgccagttaacgctgtttcaaaaactgaaatagtgccaacagtattttctcctttgagttttatgtctacatttggactaattcagggtcacttagccctttttgtcatattctacttgctatttataatagatttgttcataaactgtgttgtacaaaaataaggcattgtccttaattacaggagttttcctttgctaatatatatttattatttgaaaaacttaaacgtttcaaagaaaaagaaaatgcttttaaaaaattattttgttatatatggcttatatctcaacatttcattttgattatttgctttttaaactcatgacactgttttattttttttcattgtcctgcaatttcagagcatgtaacttctaatgccagcgatagtgaaagtagttacctaatcttgattacagatgagtatggctgctcaaaaggtggtcaagaagaatacgtcttatcttatgaaccagtgaatcaacaagaagttaattatactcgaccagtgatcatattgggacctatgaaagacaggataaatgatgacttgatctcagaatttcctgacaaatttggatcctgtgttcctcatacaactagaccaaaacgagattatgaggtagatggaagagattatcattttgtgacttcaagagagcagatggaaaaagatatccaggaacataaattcattgaagctggccagtataacaatcatctatatggaacaagtgttcagtctgtacgagaagtagcagaaaagggcaaacactgtatccttgatgtgtctggaaatgccataaagagattacagattgcacagctttaccctatctccatttttattaaacccaaatccatggaaaatatcatggaaatgaataagcgtctaacagaagaacaagccagaaaaacatttgagagagccatgaaactggaacaggagtttactgaacatttcacagctattgtacagggggatacgctggaagacatttacaaccaagtgaaacagatcatagaagaacaatctggttcttacatctgggttccggcaaaagaaaagctatgaaaactcatgtttctctgtttctcttttccacaattccattttctttggcatctctttgccctttcctctggagtctttcttgagtactgatttcatgttgaattgtatcccacacatcatggtctgcagcttctttttcacatgtagtgtctccttcaagttacatcgtgtgtattatttaatgtcactattggttagtggccatttttcagaactgaagatggaatggcctgaccagctattaagaacgtggggagacgcagaaattgtggtaaaattccttaatgtttaagggaaagtaactttaagagatttttggaaaagctttatatacattcttttcaaatttcagtacaaatgaaaaagtggttttaatcagtgatttagtagactttgagcaactgtgcacgcttcagtttaatagcatggtttggccagtgtattactctcaagtccttttctcaatcaacttctatcatcaaagcaattgtttcattatagataaataaggacattttttaatttaaaaattcatgtctgagttgactttcataagggatttcattttttcctcaacattcttaaagccttttagtatttgacggttcttttttcccaggacatttgctaggaataacaacgtttcaatgtttttaatctacttgagcaacactatcgtgtcttacaaaagttgttcatatgtaaatgatcatcacatttcgtgaattgaggccatgttcaggtgctaaggaagttcgccttttacacagaagattgagaaaatttcctagatataaatacagataaatcagacgttacagtggtgacgtagtaaccatcatggcaatggaaaggagtccaattcatagcctaaaacttcaaatgtattcttaggagtcagattttactgaatattttacccacaatagctgcctattttgttataataaaatatatataaatatatatataaaactttctttaaactgtaactatgggaattattttctttacatagttgcgcacacacacaaacatatatatatatttaaaatatattttgtttcttttgccacctactcctaactttttgtttggtttttaaattaaatattaattgaatagacttatcttccttaatcatgtgaactgaaaatgggggcatggtggtcatgaggaggaaacatttagggaaattagattataagtaaaagtgtgggcatattctcctcttttctacaaaggttttcaaatggttcctgaggttttttgttgttgtccgtgttgttactgttgttcttgtcatcaggtttgattttggtccttgccctttccttctagttctccttttattaataggaaggcaggcaaaagccccatttatgtgtgtgttttcccctcagacagctttcatccactgctctgcactagaattgcacaaatcttcatggtgagcaattttaagaaatgttagtgaaaggtagaaattatttcacaaatcagtttctctggtccttcatattaataataatatttggcttcccattgctctttggagttgtttattaaatatgtgtttttgacaacctc

SEQ ID NO: 5626 - DNA, 3994 bp, Homo sapiens
  source 1..3994: mol_type = unassigned DNA
agttctgtcactcactcggggtaactttgggcaaattctctctggacctcctaatagggaggtcctcgtcaccccgaggaagttcgaagacgtgggcagtgacttggaaagcttcccgagattccccttctataacctgggtggctcagaccgggagcggggtcccagccggccggtaattccgcccggaggtgcgcacgaaacaaacctgcagcgctggccgagggcggctcagcttcggagggcgcgactccgggtgtgtgccctcttcctgattctggagaaaaatgccggtccggaagcaagatacccagagagcattgcaccttttggaggaatatcgttcaaaactaagccaaactgaagacagacagctcagaagttccatagaacgggttattaacatatttcagagcaacctctttcaggctttaatagatattcaagaattttatgaagtgaccttactggataatccaaaatgtatagatcgttcaaagccgtctgaaccaattcaacctgtgaatacttgggagatttccagccttccaagctctactgtgacttcagagacactgccaagcagccttagccctagtgtagagaaatacaggtatcaggatgaagatacacctcctcaagagcatatttccccacaaatcacaaatgaagtgataggtccagaattggttcatgtctcagagaagaacttatcagagattgagaatgtccatggatttgtttctcattctcatatttcaccaataaagccaacagaagctgttcttccctctcctcccactgtccctgtgatccctgtcctgccagtccctgctgagaatactgtcatcctacccaccataccacaggcaaatcctcccccagtactggtcaacacagatagcttggaaacaccaacttacgttaatggcacagatgcagattatgaatatgaagaaatcacacttgaaaggggaaattcagggcttggtttcagcattgcaggaggtacggacaacccacacattggagatgactcaagtattttcattaccaaaattatcacagggggagcagccgcccaagatggaagattgcgggtcaatgactgtatattacgagtaaatgaagtagatgttcgtgatgtaacacatagcaaagcagttgaagcgttgaaagaagcagggtctattgtacgcttgtatgtaaaaagaaggaaaccagtgtcagaaaaaataatggaaataaagctcattaaaggtcctaaaggtcttgggtttagcattgctggaggtgttggaaatcagcatattcctggggataatagcatctatgtaaccaaaataattgaaggaggtgcagcacataaggatggcaaacttcagattggagataaacttttagcagtgaataacgtatgtttagaagaagttactcatgaagaagcagtaactgccttaaagaacacatctgattttgtttatttgaaagtggcaaaacccacaagtatgtatatgaatgatggctatgcaccacctgatatcaccaactcttcttctcagcctgttgataaccatgttagcccatcttccttcttgggccagacaccagcatctccagccagatactccccagtttctaaagcagtacttggagatgatgaaattacaagggaacctagaaaagttgttcttcatcgtggctcaacgggccttggtttcaacattgtaggaggagaagatggagaaggaatatttatttcctttatcttagccggaggacctgctgatctaagtggagagctcagaaaaggagatcgtattatatcggtaaacagtgttgacctcagagctgctagtcatgagcaggcagcagctgcattgaaaaatgctggccaggctgtcacaattgttgcacaatatcgacctgaagaatacagtcgttttgaagctaaaatacatgatttacgggagcagatgatgaatagtagtattagttcagggtcaggttctcttcgaactagccagaagcgatccctctatgtcagagccctttttgattatgacaagactaaagacagtgggcttcccagtcagggactgaacttcaaatttggagatatcctccatgttattaatgcttctgatgatgaatggtggcaagccaggcaggttacaccagatggtgagagcgatgaggtcggagtgattcccagtaaacgcagagttgagaagaaagaacgagcccgattaaaaacagtgaaattcaattctaaaacgagagataaaggggagatccctgacgacatgggatcaaaaggcctgaagcatgtaacttctaatgccagcgatagtgaaagtagttaccgtggtcaagaagaatacgtcttatcttatgaaccagtgaatcaacaagaagttaattatactcgaccagtgatcatattgggacctatgaaagacaggataaatgatgacttgatctcagaatttcctgacaaatttggatcctgtgttcctcatacaactagaccaaaacgagattatgaggtagatggaagagattatcattttgtgacttcaagagagcagatggaaaaagatatccaggaacataaattcattgaagctggccagtataacaatcatctatatggaacaagtgttcagtctgtacgagaagtagcagaaaagggcaaacactgtatccttgatgtgtctggaaatgccataaagagattacagattgcacagctttaccctatctccatttttattaaacccaaatccatggaaaatatcatggaaatgaataagcgtctaacagaagaacaagccagaaaaacatttgagagagccatgaaactggaacaggagtttactgaacatttcacagctattgtacagggggatacgctggaagacatttacaaccaagtgaaacagatcatagaagaacaatctggttcttacatctgggttccggcaaaagaaaagctatgaaaactcatgtttctctgtttctcttttccacaattccattttctttggcatctctttgccctttcctctggagtctttcttgagtactgatttcatgttgaattgtatcccacacatcatggtctgcagcttctttttcacatgtagtgtctccttcaagttacatcgtgtgtattatttaatgtcactattggttagtggccatttttcagaactgaagatggaatggcctgaccagctattaagaacgtggggagacgcagaaattgtggtaaaattccttaatgtttaagggaaagtaactttaagagatttttggaaaagctttatatacattcttttcaaatttcagtacaaatgaaaaagtggttttaatcagtgatttagtagactttgagcaactgtgcacgcttcagtttaatagcatggtttggccagtgtattactctcaagtccttttctcaatcaacttctatcatcaaagcaattgtttcattatagataaataaggacattttttaatttaaaaattcatgtctgagttgactttcataagggatttcattttttcctcaacattcttaaagccttttagtatttgacggttcttttttcccaggacatttgctaggaataacaacgtttcaatgtttttaatctacttgagcaacactatcgtgtcttacaaaagttgttcatatgtaaatgatcatcacatttcgtgaattgaggccatgttcaggtgctaaggaagttcgccttttacacagaagattgagaaaatttcctagatataaatacagataaatcagacgttacagtggtgacgtagtaaccatcatggcaatggaaaggagtccaattcatagcctaaaacttcaaatgtattcttaggagtcagattttactgaatattttacccacaatagctgcctattttgttataataaaatatatataaatatatatataaaactttctttaaactgtaa

SEQ ID NO: 5627 - DNA, 3053 bp, Homo sapiens
  source 1..3053: mol_type = unassigned DNA
atcagctaacaaaagaacagcttttggttcctgcagacgctggtgaaaaaataatcatgagaaagaaatccaccttatgtcgtcttttttgtctgcaaaaataaactcagccatcatacagctaacaggtacagagggaagatacgagctctttcataggaagaaatcactgagaaaatgagcatcatttctcaaggtttttattttcactgatctacaagtgatgctgctgtaattgtagctgcagtttttaccgatcattcaccactcagcagctggtagagaagtaagcctgcttggcaaccacctgcagggctgcagagatgaattacattttcggaaacaacacacttctatactctcgcggcagtcgaggaggcaatactagctctagccatggctcagcaggcccaaagcagaaacactgggcaaaaaagggctcgtcagatgaactgcaagctgagccagaaccttcacgctggcagcagatagttgcatttttcactcgaagacacagctttattgactgcatctcggtagccaccagctccacccaggcaaatcctcccccagtactggtcaacacagatagcttggaaacaccaacttacgttaatggcacagatgcagattatgaatatgaagaaatcacacttgaaaggggaaattcagggcttggtttcagcattgcaggaggtacggacaacccacacattggagatgactcaagtattttcattaccaaaattatcacagggggagcagccgcccaagatggaagattgcgggtcaatgactgtatattacgagtaaatgaagtagatgttcgtgatgtaacacatagcaaagcagttgaagcgttgaaagaagcagggtctattgtacgcttgtatgtaaaaagaaggaaaccagtgtcagaaaaaataatggaaataaagctcattaaaggtcctaaaggtcttgggtttagcattgctggaggtgttggaaatcagcatattcctggggataatagcatctatgtaaccaaaataattgaaggaggtgcagcacataaggatggcaaacttcagattggagataaacttttagcagtgaataacgtatgtttagaagaagttactcatgaagaagcagtaactgccttaaagaacacatctgattttgtttatttgaaagtggcaaaacccacaagtatgtatatgaatgatggctatgcaccacctgatatcaccaactcttcttctcagcctgttgataaccatgttagcccatcttccttcttgggccagacaccagcatctccagccagatactccccagtttctaaagcagtacttggagatgatgaaattacaagggaacctagaaaagttgttcttcatcgtggctcaacgggccttggtttcaacattgtaggaggagaagatggagaaggaatatttatttcctttatcttagccggaggacctgctgatctaagtggagagctcagaaaaggagatcgtattatatcggtaaacagtgttgacctcagagctgctagtcatgagcaggcagcagctgcattgaaaaatgctggccaggctgtcacaattgttgcacaatatcgacctgaagaatacagtcgttttgaagctaaaatacatgatttacgggagcagatgatgaatagtagtattagttcagggtcaggttctcttcgaactagccagaagcgatccctctatgtcagagccctttttgattatgacaagactaaagacagtgggcttcccagtcagggactgaacttcaaatttggagatatcctccatgttattaatgcttctgatgatgaatggtggcaagccaggcaggttacaccagatggtgagagcgatgaggtcggagtgattcccagtaaacgcagagttgagaagaaagaacgagcccgattaaaaacagtgaaattcaattctaaaacgagagataaaggggagatccctgacgacatgggatcaaaaggcctgaagcatgtaacttctaatgccagcgatagtgaaagtagttaccgtggtcaagaagaatacgtcttatcttatgaaccagtgaatcaacaagaagttaattatactcgaccagtgatcatattgggacctatgaaagacaggataaatgatgacttgatctcagaatttcctgacaaatttggatcctgtgttcctcatacaactagaccaaaacgagattatgaggtagatggaagagattatcattttgtgacttcaagagagcagatggaaaaagatatccaggaacataaattcattgaagctggccagtataacaatcatctatatggaacaagtgttcagtctgtacgagaagtagcagaaaagggcaaacactgtatccttgatgtgtctggaaatgccataaagagattacagattgcacagctttaccctatctccatttttattaaacccaaatccatggaaaatatcatggaaatgaataagcgtctaacagaagaacaagccagaaaaacatttgagagagccatgaaactggaacaggagtttactgaacatttcacagctattgtacagggggatacgctggaagacatttacaaccaagtgaaacagatcatagaagaacaatctggttcttacatctgggttccggcaaaagaaaagctatgaaaactcatgtttctctgtttctcttttccacaattccattttctttggcatctctttgccctttcctctggagtctttcttgagtactgatttcatgttgaattgtatcccacacatcatggtctgcagcttctttttcacatgtagtgtctccttcaagttacatcgtgtgtattatttaatgtcactattggttagtggccatttttcagaactgaagatggaatggcctgaccagctattaagaacgtggggagacgcagaaattgtggtaaaattccttaatgtttaagggaaagtaactttaagagatttttggaaaagctttatatacattcttttcaaatttcagtacaaatgaaa

SEQ ID NO: 5628 - DNA, 2854 bp, Homo sapiens
  source 1..2854: mol_type = unassigned DNA
atgccggtccggaagcaagatacccagagagcattgcaccttttggaggaatatcgttcaaaactaagccaaactgaagacagacagctcagaagttccatagaacgggttattaacatatttcagagcaacctctttcaggctttaatagatattcaagaattttatgaagtgaccttactggataatccaaaatgtatagatcgttcaaagccgtctgaaccaattcaacctgtgaatacttgggagatttccagccttccaagctctactgtgacttcagagacactgccaagcagccttagccctagtgtagagaaatacaggtatcaggatgaagatacacctcctcaagagcatatttccccacaaatcacaaatgaagtgataggtccagaattggttcatgtctcagagaagaacttatcagagattgagaatgtccatggatttgtttctcattctcatatttcaccaataaaggttaatggcacagatgcagattatgaatatgaagaaatcacacttgaaaggggaaattcagggcttggtttcagcattgcaggaggtacggacaacccacacattggagatgactcaagtattttcattaccaaaattatcacagggggagcagccgcccaagatggaagattgcgggtcaatgactgtatattacgagtaaatgaagtagatgttcgtgatgtaacacatagcaaagcagttgaagcgttgaaagaagcagggtctattgtacgcttgtatgtaaaaagaaggaaaccagtgtcagaaaaaataatggaaataaagctcattaaaggtcctaaaggtcttgggtttagcattgctggaggtgttggaaatcagcatattcctggggataatagcatctatgtaaccaaaataattgaaggaggtgcagcacataaggatggcaaacttcagattggagataaacttttagcagtgaataacgtatgtttagaagaagttactcatgaagaagcagtaactgccttaaagaacacatctgattttgtttatttgaaagtggcaaaacccacaagtatgtatatgaatgatggctatgcaccacctgatatcaccaactcttcttctcagcctgttgataaccatgttagcccatcttccttcttgggccagacaccagcatctccagccagatactccccagtttctaaagcagtacttggagatgatgaaattacaagggaacctagaaaagttgttcttcatcgtggctcaacgggccttggtttcaacattgtaggaggagaagatggagaaggaatatttatttcctttatcttagccggaggacctgctgatctaagtggagagctcagaaaaggagatcgtattatatcggtaaacagtgttgacctcagagctgctagtcatgagcaggcagcagctgcattgaaaaatgctggccaggctgtcacaattgttgcacaatatcgacctgaagaatacagtcgttttgaagctaaaatacatgatttacgggagcagatgatgaatagtagtattagttcagggtcaggttctcttcgaactagccagaagcgatccctctatgtcagagccctttttgattatgacaagactaaagacagtgggcttcccagtcagggactgaacttcaaatttggagatatcctccatgttattaatgcttctgatgatgaatggtggcaagccaggcaggttacaccagatggtgagagcgatgaggtcggagtgattcccagtaaacgcagagttgagaagaaagaacgagcccgattaaaaacagtgaaattcaattctaaaacgagagataaaggggagatccctgacgacatgggatcaaaaggcctgaagcatgtaacttctaatgccagcgatagtgaaagtagttaccgtggtcaagaagaatacgtcttatcttatgaaccagtgaatcaacaagaagttaattatactcgaccagtgatcatattgggacctatgaaagacaggataaatgatgacttgatctcagaatttcctgacaaatttggatcctgtgttcctcatacaactagaccaaaacgagattatgaggtagatggaagagattatcattttgtgacttcaagagagcagatggaaaaagatatccaggaacataaattcattgaagctggccagtataacaatcatctatatggaacaagtgttcagtctgtacgagaagtagcagaaaagggcaaacactgtatccttgatgtgtctggaaatgccataaagagattacagattgcacagctttaccctatctccatttttattaaacccaaatccatggaaaatatcatggaaatgaataagcgtctaacagaagaacaagccagaaaaacatttgagagagccatgaaactggaacaggagtttactgaacatttcacagctattgtacagggggatacgctggaagacatttacaaccaagtgaaacagatcatagaagaacaatctggttcttacatctgggttccggcaaaagaaaagctatgaaaactcatgtttctctgtttctcttttccacaattccattttctttggcatctctttgccctttcctctggagtctttcttgagtactgatttcatgttgaattgtatcccacacatcatggtctgcagcttctttttcacatgtagtgtctccttcaagttacatcgtgtgtattatttaatgtcactattggttagtggccatttttcagaactgaagatggaatggcctgaccagctattaagaacgtggggagacgcagaaattgtggtaaaattccttaatgtttaa

SEQ ID NO: 5629 - DNA, 2977 bp, Homo sapiens
  source 1..2977: mol_type = unassigned DNA
gttggaaacggcactgctgagtgaggttgaggggtgtctcggtatgtgcgccttggatctggtgtaggcgaggtcacgcctctcttcagacagcccgagccttcccggcctggcgcgtttagttcggaactgcgggacgcgccggtgggctagggcaaggtgtgtgccctcttcctgattctggagaaaaatgccggtccggaagcaagatacccagagagcattgcaccttttggaggaatatcgttcaaaactaagccaaactgaagacagacagctcagaagttccatagaacgggttattaacatatttcagagcaacctctttcaggctttaatagatattcaagaattttatgaagtgaccttactggataatccaaaatgtatagatcgttcaaagccgtctgaaccaattcaacctgtgaatacttgggagatttccagccttccaagctctactgtgacttcagagacactgccaagcagccttagccctagtgtagagaaatacaggtatcaggatgaagatacacctcctcaagagcatatttccccacaaatcacaaatgaagtgataggtccagaattggttcatgtctcagagaagaacttatcagagattgagaatgtccatggatttgtttctcattctcatatttcaccaataaagccaacagaagctgttcttccctctcctcccactgtccctgtgatccctgtcctgccagtccctgctgagaatactgtcatcctacccaccataccacaggcaaatcctcccccagtactggtcaacacagatagcttggaaacaccaacttacgttaatggcacagatgcagattatgaatatgaagaaatcacacttgaaaggggaaattcagggcttggtttcagcattgcaggaggtacggacaacccacacattggagatgactcaagtattttcattaccaaaattatcacagggggagcagccgcccaagatggaagattgcgggtcaatgactgtatattacgagtaaatgaagtagatgttcgtgatgtaacacatagcaaagcagttgaagcgttgaaagaagcagggtctattgtacgcttgtatgtaaaaagaaggaaaccagtgtcagaaaaaataatggaaataaagctcattaaaggtcctaaaggtcttgggtttagcattgctggaggtgttggaaatcagcatattcctggggataatagcatctatgtaaccaaaataattgaaggaggtgcagcacataaggatggcaaacttcagattggagataaacttttagcagtgaataacgtatgtttagaagaagttactcatgaagaagcagtaactgccttaaagaacacatctgattttgtttatttgaaagtggcaaaacccacaagtatgtatatgaatgatggctatgcaccacctgatatcaccaactcttcttctcagcctgttgataaccatgttagcccatcttccttcttgggccagacaccagcatctccagccagatactccccagtttctaaagcagtacttggagatgatgaaattacaagggaacctagaaaagttgttcttcatcgtggctcaacgggccttggtttcaacattgtaggaggagaagatggagaaggaatatttatttcctttatcttagccggaggacctgctgatctaagtggagagctcagaaaaggagatcgtattatatcggtaaacagtgttgacctcagagctgctagtcatgagcaggcagcagctgcattgaaaaatgctggccaggctgtcacaattgttgcacaatatcgacctgaagaatacagtcgttttgaagctaaaatacatgatttacgggagcagatgatgaatagtagtattagttcagggtcaggttctcttcgaactagccagaagcgatccctctatgtcagagccctttttgattatgacaagactaaagacagtgggcttcccagtcagggactgaacttcaaatttggagatatcctccatgttattaatgcttctgatgatgaatggtggcaagccaggcaggttacaccagatggtgagagcgatgaggtcggagtgattcccagtaaacgcagagttgagaagaaagaacgagcccgattaaaaacagtgaaattcaattctaaaacgagagataaaggggagatccctgacgacatgggatcaaaaggcctgaagcatgtaacttctaatgccagcgatagtgaaagtagttaccgtggtcaagaagaatacgtcttatcttatgaaccagtgaatcaacaagaagttaattatactcgaccagtgatcatattgggacctatgaaagacaggataaatgatgacttgatctcagaatttcctgacaaatttggatcctgtgttcctcatacaactagaccaaaacgagattatgaggtagatggaagagattatcattttgtgacttcaagagagcagatggaaaaagatatccaggaacataaattcattgaagctggccagtataacaatcatctatatggaacaagtgttcagtctgtacgagaagtagcagaaaagggcaaacactgtatccttgatgtgtctggaaatgccataaagagattacagattgcacagctttaccctatctccatttttattaaacccaaatccatggaaaatatcatggaaatgaataagcgtctaacagaagaacaagccagaaaaacatttgagagagccatgaaactggaacaggagtttactgaacatttcacagctattgtacagggggatacgctggaagacatttacaaccaagtgaaacagatcatagaagaacaatctggttcttacatctgggttccggcaaaagaaaagctatgaaaactcatgtttctctgtttctcttttccacaattccattttctttggcatctctttgccctttcctctgga

SEQ ID NO: 5630 - DNA, 2516 bp, Homo sapiens
  source 1..2516: mol_type = unassigned DNA
agctggtagagaagtaagcctgcttggcaaccacctgcagggctgcagagatgaattacattttcggaaacaacacacttctatactctcgcggcagtcgaggaggcaatactagctctagccatggctcagcaggcccaaagcagaaacactgggcaaaaaagggctcgtcagatgaactgcaagctgagccagaaccttcacgctggcagcagatagttgcatttttcactcgaagacacagctttattgactgcatctcggtagccaccagctccacccaggcaaatcctcccccagtactggtcaacacagatagcttggaaacaccaacttacgttaatggcacagatgcagattatgaatatgaagaaatcacacttgaaaggggaaattcagggcttggtttcagcattgcaggaggtacggacaacccacacattggagatgactcaagtattttcattaccaaaattatcacagggggagcagccgcccaagatggaagattgcgggtcaatgactgtatattacgagtaaatgaagtagatgttcgtgatgtaacacatagcaaagcagttgaagcgttgaaagaagcagggtctattgtacgcttgtatgtaaaaagaaggaaaccagtgtcagaaaaaataatggaaataaagctcattaaaggtcctaaaggtcttgggtttagcattgctggaggtgttggaaatcagcatattcctggggataatagcatctatgtaaccaaaataattgaaggaggtgcagcacataaggatggcaaacttcagattggagataaacttttagcagtgaataacgtatgtttagaagaagttactcatgaagaagcagtaactgccttaaagaacacatctgattttgtttatttgaaagtggcaaaacccacaagtatgtatatgaatgatggctatgcaccacctgatatcaccaactcttcttctcagcctgttgataaccatgttagcccatcttccttcttgggccagacaccagcatctccagccagatactccccagtttctaaagcagtacttggagatgatgaaattacaagggaacctagaaaagttgttcttcatcgtggctcaacgggccttggtttcaacattgtaggaggagaagatggagaaggaatatttatttcctttatcttagccggaggacctgctgatctaagtggagagctcagaaaaggagatcgtattatatcggtaaacagtgttgacctcagagctgctagtcatgagcaggcagcagctgcattgaaaaatgctggccaggctgtcacaattgttgcacaatatcgacctgaagaatacagtcgttttgaagctaaaatacatgatttacgggagcagatgatgaatagtagtattagttcagggtcaggttctcttcgaactagccagaagcgatccctctatgtcagagccctttttgattatgacaagactaaagacagtgggcttcccagtcagggactgaacttcaaatttggagatatcctccatgttattaatgcttctgatgatgaatggtggcaagccaggcaggttacaccagatggtgagagcgatgaggtcggagtgattcccagtaaacgcagagttgagaagaaagaacgagcccgattaaaaacagtgaaattcaattctaaaacgagagataaaggggagatccctgacgacatgggatcaaaaggcctgaagcatgtaacttctaatgccagcgatagtgaaagtagttacctaatcttgattacagatgagtatggctgctcaaaaggtggtcaagaagaatacgtcttatcttatgaaccagtgaatcaacaagaagttaattatactcgaccagtgatcatattgggacctatgaaagacaggataaatgatgacttgatctcagaatttcctgacaaatttggatcctgtgttcctcatacaactagaccaaaacgagattatgaggtagatggaagagattatcattttgtgacttcaagagagcagatggaaaaagatatccaggaacataaattcattgaagctggccagtataacaatcatctatatggaacaagtgttcagtctgtacgagaagtagcagaaaagggcaaacactgtatccttgatgtgtctggaaatgccataaagagattacagattgcacagctttaccctatctccatttttattaaacccaaatccatggaaaatatcatggaaatgaataagcgtctaacagaagaacaagccagaaaaacatttgagagagccatgaaactggaacaggagtttactgaacatttcacagctattgtacagggggatacgctggaagacatttacaaccaagtgaaacagatcatagaagaacaatctggttcttacatctgggttccggcaaaagaaaagctatgaaaactcatgtttctctgtttctcttttccacaattccattttctttggcatctctttgccctt

SEQ ID NO: 5631 - DNA, 2682 bp, Homo sapiens
  source 1..2682: mol_type = unassigned DNA
atgccggtccggaagcaagatacccagagagcattgcaccttttggaggaatatcgttcaaaactaagccaaactgaagacagacagctcagaagttccatagaacgggttattaacatatttcagagcaacctctttcaggctttaatagatattcaagaattttatgaagtgaccttactggataatccaaaatgtatagatcgttcaaagccgtctgaaccaattcaacctgtgaatacttgggagatttccagccttccaagctctactgtgacttcagagacactgccaagcagccttagccctagtgtagagaaatacaggtatcaggatgaagatacacctcctcaagagcatatttccccacaaatcacaaatgaagtgataggtccagaattggttcatgtctcagagaagaacttatcagagattgagaatgtccatggatttgtttctcattctcatatttcaccaataaaggcaaatcctcccccagtactggtcaacacagatagcttggaaacaccaacttacgttaatggcacagatgcagattatgaatatgaagaaatcacacttgaaaggggaaattcagggcttggtttcagcattgcaggaggtacggacaacccacacattggagatgactcaagtattttcattaccaaaattatcacagggggagcagccgcccaagatggaagattgcgggtcaatgactgtatattacgagtaaatgaagtagatgttcgtgatgtaacacatagcaaagcagttgaagcgttgaaagaagcagggtctattgtacgcttgtatgtaaaaagaaggaaaccagtgtcagaaaaaataatggaaataaagctcattaaaggtcctaaaggtcttgggtttagcattgctggaggtgttggaaatcagcatattcctggggataatagcatctatgtaaccaaaataattgaaggaggtgcagcacataaggatggcaaacttcagattggagataaacttttagcagtgaataacgtatgtttagaagaagttactcatgaagaagcagtaactgccttaaagaacacatctgattttgtttatttgaaagtggcaaaacccacaagtatgtatatgaatgatggctatgcaccacctgatatcaccaactcttcttctcagcctgttgataaccatgttagcccatcttccttcttgggccagacaccagcatctccagccagatactccccagtttctaaagcagtacttggagatgatgaaattacaagggaacctagaaaagttgttcttcatcgtggctcaacgggccttggtttcaacattgtaggaggagaagatggagaaggaatatttatttcctttatcttagccggaggacctgctgatctaagtggagagctcagaaaaggagatcgtattatatcggtaaacagtgttgacctcagagctgctagtcatgagcaggcagcagctgcattgaaaaatgctggccaggctgtcacaattgttgcacaatatcgacctgaagaatacagtcgttttgaagctaaaatacatgatttacgggagcagatgatgaatagtagtattagttcagggtcaggttctcttcgaactagccagaagcgatccctctatgtcagagccctttttgattatgacaagactaaagacagtgggcttcccagtcagggactgaacttcaaatttggagatatcctccatgttattaatgcttctgatgatgaatggtggcaagccaggcaggttacaccagatggtgagagcgatgaggtcggagtgattcccagtaaacgcagagttgagaagaaagaacgagcccgattaaaaacagtgaaattcaattctaaaacgagagataaagggcagtcattcaatgacaagcgtaaaaagaacctcttttcccgaaaattccccttctacaagaacaaggaccagagtgagcaggaaacaagtgatgctgaccagcatgtaacttctaatgccagcgatagtgaaagtagttaccgtggtcaagaagaatacgtcttatcttatgaaccagtgaatcaacaagaagttaattatactcgaccagtgatcatattgggacctatgaaagacaggataaatgatgacttgatctcagaatttcctgacaaatttggatcctgtgttcctcatacaactagaccaaaacgagattatgaggtagatggaagagattatcattttgtgacttcaagagagcagatggaaaaagatatccaggaacataaattcattgaagctggccagtataacaatcatctatatggaacaagtgttcagtctgtacgagaagtagcagaaaagggcaaacactgtatccttgatgtgtctggaaatgccataaagagattacagattgcacagctttaccctatctccatttttattaaacccaaatccatggaaaatatcatggaaatgaataagcgtctaacagaagaacaagccagaaaaacatttgagagagccatgaaactggaacaggagtttactgaacatttcacagctattgtacagggggatacgctggaagacatttacaaccaagtgaaacagatcatagaagaacaatctggttcttacatctgggttccggcaaaagaaaagctatga

SEQ ID NO: 5632 - DNA, 2690 bp, Homo sapiens
  source 1..2690: mol_type = unassigned DNA
ggcggaaagtttcgggggagagcggttgggggcgcggaaggaggtgtgtgccctcttcctgattctggagaaaaatgccggtccggaagcaagatacccagagagcattgcaccttttggaggaatatcgttcaaaactaagccaaactgaagacagacagctcagaagttccatagaacgggttattaacatatttcagagcaacctctttcaggctttaatagatattcaagaattttatgaagtgaccttactggataatccaaaatgtatagatcgttcaaagccgtctgaaccaattcaacctgtgaatacttgggagatttccagccttccaagctctactgtgacttcagagacactgccaagcagccttagccctagtgtagagaaatacaggtatcaggatgaagatacacctcctcaagagcatatttccccacaaatcacaaatgaagtgataggtccagaattggttcatgtctcagagaagaacttatcagagattgagaatgtccatggatttgtttctcattctcatatttcaccaataaaggcaaatcctcccccagtactggtcaacacagatagcttggaaacaccaacttacgttaatggcacagatgcagattatgaatatgaagaaatcacacttgaaaggggaaattcagggcttggtttcagcattgcaggaggtacggacaacccacacattggagatgactcaagtattttcattaccaaaattatcacagggggagcagccgcccaagatggaagattgcgggtcaatgactgtatattacgagtaaatgaagtagatgttcgtgatgtaacacatagcaaagcagttgaagcgttgaaagaagcagggtctattgtacgcttgtatgtaaaaagaaggaaaccagtgtcagaaaaaataatggaaataaagctcattaaaggtcctaaaggtcttgggtttagcattgctggaggtgttggaaatcagcatattcctggggataatagcatctatgtaaccaaaataattgaaggaggtgcagcacataaggatggcaaacttcagattggagataaacttttagcagtgaataacgtatgtttagaagaagttactcatgaagaagcagtaactgccttaaagaacacatctgattttgtttatttgaaagtggcaaaacccacaagtatgtatatgaatgatggctatgcaccacctgatatcaccaactcttcttctcagcctgttgataaccatgttagcccatcttccttcttgggccagacaccagcatctccagccagatactccccagtttctaaagcagtacttggagatgatgaaattacaagggaacctagaaaagttgttcttcatcgtggctcaacgggccttggtttcaacattgtaggaggagaagatggagaaggaatatttatttcctttatcttagccggaggacctgctgatctaagtggagagctcagaaaaggagatcgtattatatcggtaaacagtgttgacctcagagctgctagtcatgagcaggcagcagctgcattgaaaaatgctggccaggctgtcacaattgttgcacaatatcgacctgaagaatacagtcgttttgaagctaaaatacatgatttacgggagcagatgatgaatagtagtattagttcagggtcaggttctcttcgaactagccagaagcgatccctctatgtcagagccctttttgattatgacaagactaaagacagtgggcttcccagtcagggactgaacttcaaatttggagatatcctccatgttattaatgcttctgatgatgaatggtggcaagccaggcaggttacaccagatggtgagagcgatgaggtcggagtgattcccagtaaacgcagagttgagaagaaagaacgagcccgattaaaaacagtgaaattcaattctaaaacgagagataaaggggagatccctgacgacatgggatcaaaaggcctgaagcatgtaacttctaatgccagcgatagtgaaagtagttaccgtggtcaagaagaatacgtcttatcttatgaaccagtgaatcaacaagaagttaattatactcgaccagtgatcatattgggacctatgaaagacaggataaatgatgacttgatctcagaatttcctgacaaatttggatcctgtgttcctcatacaactagaccaaaacgagattatgaggtagatggaagagattatcattttgtgacttcaagagagcagatggaaaaagatatccaggaacataaattcattgaagctggccagtataacaatcatctatatggaacaagtgttcagtctgtacgagaagtagcagaaaagggcaaacactgtatccttgatgtgtctggaaatgccataaagagattacagattgcacagctttaccctatctccatttttattaaacccaaatccatggaaaatatcatggaaatgaataagcgtctaacagaagaacaagccagaaaaacatttgagagagccatgaaactggaacaggagtttactgaacatttcacagctattgtacagggggatacgctggaagacatttacaaccaagtgaaacagatcatagaagaacaatctggttcttacatctgggttccggcaaaagaaaagctatga

SEQ ID NO: 5633 - DNA, 864 bp, Homo sapiens
  source 1..864: mol_type = unassigned DNA
ggagatccctgacgacatgggatcaaaaggcctgaagcatgtaacttctaatgccagcgatagtgaaagtagttaccgtggtcaagaagaatacgtcttatcttatgaaccagtgaatcaacaagaagttaattatactcgaccagtgatcatattgggacctatgaaagacaggataaatgatgacttgatctcagaatttcctgacaaatttggatcctgtgttcctcgtaagtaaaccaaacaaaaacatttaattgttactcttaacatttcctgtcactgtgtgtgggaaaaatagatataaccattttttaatggtttgtacttattttatcagttactcttccatcctccatattattgtcctttctcagatttaaattaatctgttctgttgaactttacaaaacgatgtaagtagaaaatggatttattgtggttttttttttaatattaaacactttcccaagtttttttctgttaaagatacaactagaccaaaacgagattatgaggtagatggaagagattatcattttgtgacttcaagagagcagatggaaaaagatatccaggaacataaattcattgaagctggccagtataacaatcatctatatggaacaagtgttcagtctgtacgagaagtagcagaaaagggcaaacactgtatccttgatgtgtctggaaatgccataaagagattacagattgcacagctttaccctatctccatttttattaaacccaaatccatggaaaatatcatggaaatgaataagcgtctaacagaagaacaagccagaaaaacatttgagagagccatgaaactggaacaggagtttactgaacatttcacag

SEQ ID NO: 5634 - DNA, 416 bp, Homo sapiens
  source 1..416: mol_type = unassigned DNA
aactgtgttgtacaaaaataaggcattgtccttaattacaggagttttcctttgctaatatatatttattatttgaaaaacttaaacgtttcaaagaaaaagaaaatgcttttaaaaaattattttgttatatatggcttatatctcaacatttcattttgattatttgctttttaaactcatgacactgttttattttttttcattgtcctgcaatttcagagcatgtaacttctaatgccagcgatagtgaaagtagttaccgtggtcaagaagaatacgtcttatcttatgaaccagtgaatcaacaagaagttaattatactcgaccagtgatcatattgggacctatgaaagacaggataaatgatgacttgatctcagaatttcctgacaaatttggatcctgtgttcct

SEQ ID NO: 5635 - DNA, 1771 bp, Homo sapiens
  source 1..1771: mol_type = unassigned DNA
gttggaaacggcactgctgagtgaggttgaggggtgtctcggtatgtgcgccttggatctggtgtaggcgaggtcacgcctctcttcagacagcccgagccttcccggcctggcgcgtttagttcggaactgcgggacgcgccggtgggctagggcaaggtgtgtgccctcttcctgattctggagaaaaatgccggtccggaagcaagatacccagagagcattgcaccttttggaggaatatcgttcaaaactaagccaaactgaagacagacagctcagaagttccatagaacgggttattaacatatttcagagcaacctctttcaggctttaatagatattcaagaattttatgaagtgaccttactggataatccaaaatgtatagatcgttcaaagccgtctgaaccaattcaacctgtgaatacttgggagatttccagccttccaagctctactgtgacttcagagacactgccaagcagccttagccctagtgtagagaaatacaggtatcaggatgaagatacacctcctcaagagcatatttccccacaaatcacaaatgaagtgataggtccagaattggttcatgtctcagagaagaacttatcagagattgagaatgtccatggatttgtttctcattctcatatttcaccaataaaggttaatggcacagatgcagattatgaatatgaagaaatcacacttgaaaggggaaattcagggcttggtttcagcattgcaggaggtacggacaacccacacattggagatgactcaagtattttcattaccaaaattatcacagggggagcagccgcccaagatggaagattgcgggtcaatgactgtatattacgagtaaatgaagtagatgttcgtgatgtaacacatagcaaagcagttgaagcgttgaaagaagcagggtctattgtacgcttgtatgtaaaaagaaggaaaccagtgtcagaaaaaataatggaaataaagctcattaaaggtcctaaaggtcttgggtttagcattgctggaggtgttggaaatcagcatattcctggggataatagcatctatgtaaccaaaataattgaaggaggtgcagcacataaggatggcaaacttcagattggagataaacttttagcagtgaataacgtatgtttagaagaagttactcatgaagaagcagtaactgccttaaagaacacatctgattttgtttatttgaaagtggcaaaacccacaagtatgtatatgaatgatggctatgcaccacctgatatcaccaactaatacagtcgttttgaagctaaaatacatgatttacgggagcagatgatgaatagtagtattagttcagggtcaggttctcttcgaactagccagaagcgatccctctatgtcagagccctttttgattatgacaagactaaagacagtgggcttcccagtcagggactgaacttcaaatttggagatatcctccatgttattaatgcttctgatgatgaatggtggcaagccaggcaggttacaccagatggtgagagcgatgaggtcggagtgattcccagtaaacgcagcagtcattcaatgacaagcgtaaaaagaacctcttttcccgaaaattccccttctacaagaacaaggaccagagtgagcaggaaacaagtgatgctgaccgagatccctgacgacatgggatcaaaaggcctgaagcatgtaacttctaatgccagcgatagtgaaagtagttaccgt

SEQ ID NO: 5636 - DNA, 2833 bp, Homo sapiens
  source 1..2833: mol_type = unassigned DNA
ggcggaaagtttcgggggagagcggttgggggcgcggaaggaggcgaggttccgggggtggggcgtgcggcagcaactgggcgagcgggccggggggccgcggcgagcgaggaggcggcgcggccgagaaggaggacgaggccgcgggggtgcggcggcccaggggagctcctcccccgtcccttcgccccctccgctcggctccgcgggccccgggcggggcgggggtacgtggagcggggccgggctggggagctgctccgagtctggccggggcgcaccccagttccgagcgcacgccgctcaccggaactttgtggcggcgccgcaggtgtgggggcccgcggaggtgtgcatgcggggcgcgagggcgtcgcggagagcggccgctgccctgtccggcccccgctggagcagcccggaggcagcgagcaaggagaaaggtgtgtgccctcttcctgattctggagaaaaatgccggtccggaagcaagatacccagagagcattgcaccttttggaggaatatcgttcaaaactaagccaaactgaagacagacagctcagaagttccatagaacgggttattaacatatttcagagcaacctctttcaggctttaatagatattcaagaattttatgaagtgaccttactggataatccaaaatgtatagatcgttcaaagccgtctgaaccaattcaacctgtgaatacttgggagatttccagccttccaagctctactgtgacttcagagacactgccaagcagccttagccctagtgtagagaaatacaggtatcaggatgaagatacacctcctcaagagcatatttccccacaaatcacaaatgaagtgataggtccagaattggttcatgtctcagagaagaacttatcagagattgagaatgtccatggatttgtttctcattctcatatttcaccaataaagccaacagaagctgttcttccctctcctcccactgtccctgtgatccctgtcctgccagtccctgctgagaatactgtcatcctacccaccataccacaggcaaatcctcccccagtactggtcaacacagatagcttggaaacaccaacttacgttaatggcacagatgcagattatgaatatgaagaaatcacacttgaaaggggaaattcagggcttggtttcagcattgcaggaggtacggacaacccacacattggagatgactcaagtattttcattaccaaaattatcacagggggagcagccgcccaagatggaagattgcgggtcaatgactgtatattacgagtaaatgaagtagatgttcgtgatgtaacacatagcaaagcagttgaagcgttgaaagaagcagggtctattgtacgcttgtatgtaaaaagaaggaaaccagtgtcagaaaaaataatggaaataaagctcattaaaggtcctaaaggtcttgggtttagcattgctggaggtgttggaaatcagcatattcctggggataatagcatctatgtaaccaaaataattgaaggaggtgcagcacataaggatggcaaacttcagattggagataaacttttagcagtgaataacgtatgtttagaagaagttactcatgaagaagcagtaactgccttaaagaacacatctgattttgtttatttgaaagtggcaaaacccacaagtatgtatatgaatgatggctatgcaccacctgatatcaccaactcttcttctcagcctgttgataaccatgttagcccatcttccttcttgggccagacaccagcatctccagccagatactccccagtttctaaagcagtacttggagatgatgaaattacaagggaacctagaaaagttgttcttcatcgtggctcaacgggccttggtttcaacattgtaggaggagaagatggagaaggaatatttatttcctttatcttagccggaggacctgctgatctaagtggagagctcagaaaaggagatcgtattatatcggtaaacagtgttgacctcagagctgctagtcatgagcaggcagcagctgcattgaaaaatgctggccaggctgtcacaattgttgcacaatatcgacctgaagaatacagtcgttttgaagctaaaatacatgatttacgggagcagatgatgaatagtagtattagttcagggtcaggttctcttcgaactagccagaagcgatccctctatgtcagagccctttttgattatgacaagactaaagacagtgggcttcccagtcagggactgaacttcaaatttggagatatcctccatgttattaatgcttctgatgatgaatggtggcaagccaggcaggttacaccagatggtgagagcgatgaggtcggagtgattcccagtaaacgcaggtatgcctgtttcttaccacttgaatgtgaggcaacataaataattgatgttcttttaaattttttttaatttgtgacaacatggatggacctggagtgcattattctaattgaaaaaagccagacacagaaagacaaaaatcgtatgatcacatttttatgtgaaatctaaagtagtcgaagtcatacagagaagaatggtggttaccaggggttaggaggatggggaaatgagatacaaagtttccgtgacacaagatgagtgagttctgcacctccaacatagttgagaagaaagaacgagcccgattaaaaacagtgaaattcaattctaaaacgagagataaagggttcctcagagccttcaaactttaagattgaaatcaagacagtctgcttggctaatgaactgtgaacttatt

SEQ ID NO: 5637 - DNA, 2605 bp, Homo sapiens
  source 1..2605: mol_type = unassigned DNA
ttttccccggtggggatctacccccggggtcgccaggcgctgtctctgccgcggagttggaaacggcactgctgagtgaggttgaggggtgtctcggtgtgtgccctcttcctgattctggagaaaaatgccggtccggaagcaagatacccagagagcattgcaccttttggaggaatatcgttcaaaactaagccaaactgaagacagacagctcagaagttccatagaacgggttattaacatatttcagagcaacctctttcaggctttaatagatattcaagaattttatgaagtgaccttactggataatccaaaatgtatagatcgttcaaagccgtctgaaccaattcaacctgtgaatacttgggagatttccagccttccaagctctactgtgacttcagagacactgccaagcagccttagccctagtgtagagaaatacaggtatcaggatgaagatacacctcctcaagagcatatttccccacaaatcacaaatgaagtgataggtccagaattggttcatgtctcagagaagaacttatcagagattgagaatgtccatggatttgtttctcattctcatatttcaccaataaaggcaaatcctcccccagtactggtcaacacagatagcttggaaacaccaacttacgttaatggcacagatgcagattatgaatatgaagaaatcacacttgaaaggggaaattcagggcttggtttcagcattgcaggaggtacggacaacccacacattggagatgactcaagtattttcattaccaaaattatcacagggggagcagccgcccaagatggaagattgcgggtcaatgactgtatattacgagtaaatgaagtagatgttcgtgatgtaacacatagcaaagcagttgaagcgttgaaagaagcagggtctattgtacgcttgtatgtaaaaagaaggaaaccagtgtcagaaaaaataatggaaataaagctcattaaaggtcctaaaggtcttgggtttagcattgctggaggtgttggaaatcagcatattcctggggataatagcatctatgtaaccaaaataattgaaggaggtgcagcacataaggatggcaaacttcagattggagataaacttttagcagtgaataacgtatgtttagaagaagttactcatgaagaagcagtaactgccttaaagaacacatctgattttgtttatttgaaagtggcaaaacccacaagtatgtatatgaatgatggctatgcaccacctgatatcaccaactcttcttctcagcctgttgataaccatgttagcccatcttccttcttgggccagacaccagcatctccagccagatactccccagtttctaaagcagtacttggagatgatgaaattacaagggaacctagaaaagttgttcttcatcgtggctcaacgggccttggtttcaacattgtaggaggagaagatggagaaggaatatttatttcctttatcttagccggaggacctgctgatctaagtggagagctcagaaaaggagatcgtattatatcggtaaacagtgttgacctcagagctgctagtcatgagcaggcagcagctgcattgaaaaatgctggccaggctgtcacaattgttgcacaatatcgacctgaagaatacagtcgttttgaagctaaaatacatgatttacgggagcagatgatgaatagtagtattagttcagggtcaggttctcttcgaactagccagaagcgatccctctatgtcagagccctttttgattatgacaagactaaagacagtgggcttcccagtcagggactgaacttcaaatttggagatatcctccatgttattaatgcttctgatgatgaatggtggcaagccaggcaggttacaccagatggtgagagcgatgaggtcggagtgattcccagtaaacgcagagttgagaagaaagaacgagcccgattaaaaacagtgaaattcaattctaaaacgagagataaaggggtgagtatttgaaatctctacatttttgtaattcctgtttgagctacattgttaaaatgaaaaggattttgctatcagaattattcatgatcagttcttgccatggtgctttacaatggtagatacttaagcatttgttaaattcaagcacccatttcacagacccttccaaattatcaaaactatcatttgatatattattagcaacatacttttgggtcaagcttatttttataaatgaaatgtatttgaccttcattcgatttccaattagaaatttgtgttactaggccgggcatggtggctcacgcctgtaatcccagcactttgggaggccaagtcaggcagatcacctgaggttaggagttagagaccggcctggccaacatggcgaaaccccgtctctaccaaaaatataaaagttagccaggcatggtggcgggcatttgtaatcccagctactcgggaggctgaggcacaagaatcacttgaacctggtaggcggaggttgcattgagcccagatcgcacctctgtgctccagactgggcaacagagcgagacccaatctctt

SEQ ID NO: 5638 - DNA, 207 bp, Homo sapiens
  source 1..207: mol_type = unassigned DNA
atgatgaatggtggcaagccaggcaggttacaccagatggtgagagcgatgaggtcggagtgattcccagtaaacgcagagttgagaagaaagaacgagcccgattaaaaacagtgaaattcaattctaaaacgagagataaaggggtgagtatttgaaatctctacatttttgtaattcctgtttgagctacattgttaaaatgaa

SEQ ID NO: 5639 - DNA, 858 bp, Homo sapiens
  source 1..858: mol_type = unassigned DNA
tttttcactcgaagacacagctttattgactgcatctcggtagccaccagctccacccaggcaaatcctcccccagtactggtcaacacagatagcttggaaacaccaacttacggaaattcagggcttggtttcagcattgcaggaggtacggacaacccacacattggagatgactcaagtattttcattaccaaaattatcacagggggagcagccgcccaagatggaagattgcgggtcaatgactgtatattacgagtaaatgaagtagatgttcgtgatgtaacacatagcaaagcagttgaagcgttgaaagaagcagggtctattgtacgcttgtatgtaaaaagaaggaaaccagtgtcagaaaaaataatggaaataaagctcattaaaggtcctaaaggtcttgggtttagcattgctggaggtgttggaaatcagcatattcctggggataatagcatctatgtaaccaaaataattgaaggaggtgcagcacataaggatggcaaacttcagattggagataaacttttagcagtgaataacgtatgtttagaagaagttactcatgaagaagcagtaactgccttaaagaacacatctgattttgtttatttgaaagtggcaaaacccacaagtatgtatatgaatgatggctatgcaccacctgatatcaccaactcttcttctcagcctgttgataaccatgttagcccatcttccttcttgggccagacaccagcatctccagccagatactccccagtttctaaagcagtacttggagatgatgaaattacaagggaacctagaaaagttgttcttcatcgtggctcaacgggccttggt

SEQ ID NO: 5640 - DNA, 732 bp, Homo sapiens
  source 1..732: mol_type = unassigned DNA
gtttctgagctgcttttcttttcccctgtaggttaatggcacagatgcagattatgaatatgaagaaatcacacttgaaaggggaaattcagggcttggtttcagcattgcaggaggtacggacaacccacacattggagatgactcaagtattttcattaccaaaattatcacagggggagcagccgcccaagatggaagattgcgggtcaatgactgtatattacgagtaaatgaagtagatgttcgtgatgtaacacatagcaaagcagttgaagcgttgaaagaagcagggtctattgtacgcttgtatgtaaaaagaaggaaaccagtgtcagaaaaaataatggaaataaagctcattaaaggtcctaaaggtcttgggtttagcattgctggaggtgttggaaatcagcatattcctggggataatagcatctatgtaaccaaaataattgaaggaggtgcagcacataaggatggcaaacttcagattggagataaacttttagcagtaagtataagaaatctattgtcttttaaatcattttgtagtctgtttatttttctgatagatactggaatttctccataccaaaaaggtctaaatgatgtttaaattagcaaatactagccttgctgtatcaaatcctaaaaaatgattcttggtaattctttatttgtcatttctcttttctctgctagctcctcctcccttttccttttattcct

SEQ ID NO: 5641 - DNA, 539 bp, Homo sapiens
  source 1..539: mol_type = unassigned DNA
gtagaaaaattgctacctctaagaatggatcctggagagatctagttacagttataacttcttcatttatggttttatctcacagctttatttatttttatttacatgttttgttcaactaggcaacttaaaatagttttgctttatgtataaaatattgtaatggtagagtaatggattgcctgtgcattgtaaccacaaagaaatacaggtatcaggatgaagatacacctcctcaagagcatatttccccacaaatcacaaatgaagtgataggtccagaattggttcatgtctcagagaagaacttatcagagattgagaatgtccatggatttgtttctcattctcatatttcaccaataaaggttaatggcacagatgcagattatgaatatgaagaaatcacacttgaaaggggaaattcagggcttggtttcagcattgcaggaggtacggacaacccacacattggagatgactcaagtattttcattaccaaaattatcacagggggagcagccgcccaagatggaaga

SEQ ID NO: 5642 - DNA, 629 bp, Homo sapiens
  source 1..629: mol_type = unassigned DNA
gcggccgctgccctgtccggcccccgctggagcagcccggaggcagcgagcaaggagaaaggtgtgtgccctcttcctgattctggagaaaaatgccggtccggaagcaagatacccagagagcattgcaccttttggaggaatatcgttcaaaactaagccaaactgaagacagacagctcagaagttccatagaacgggttattaacatatttcagagcaacctctttcaggctttaatagatattcaagaattttatgaagtgaccttactggataatccaaaatgtatagatcgttcaaagccgtctgaaccaattcaacctgtgaatacttgggagatttccagccttccaagctctactgtgacttcagagacactgccaagcagccttagccctagtgtagagaaatacaggtatcaggatgaagatacacctcctcaagagcatatttccccacaaatcacaaatgaagtgataggtccagaattggttcatgtctcagagaagaacttatcagagattgagaatgtccatggatttgtttctcattctcatatttcaccaataaaggcaaatcctcccccagtactggtcaacacagatagcttggaaacaccaacttac

SEQ ID NO: 5643 - DNA, 716 bp, Homo sapiens
  source 1..716: mol_type = unassigned DNA
gcggccgctgccctgtccggcccccgctggagcagcccggaggcagcgagcaaggagaaaggtgtgtgccctcttcctgattctggagaaaaatgccggtccggaagcaagatacccagagagcattgcaccttttggaggaatatcgttcaaaactaagccaaactgaagacagacagctcagaagttccatagaacgggttattaacatatttcagagcaacctctttcaggctttaatagatattcaagaattttatgaagtgaccttactggataatccaaaatgtatagatcgttcaaagccgtctgaaccaattcaacctgtgaatacttgggagatttccagccttccaagctctactgtgacttcagagacactgccaagcagccttagccctagtgtagagaaatacaggtatcaggatgaagatacacctcctcaagagcatatttccccacaaatcacaaatgaagtgataggtccagaattggttcatgtctcagagaagaacttatcagagattgagaatgtccatggatttgtttctcattctcatatttcaccaataaagccaacagaagctgttcttccctctcctcccactgtccctgtgatccctgtcctgccagtccctgctgagaatactgtcatcctacccaccataccacaggcaaatcctcccccagtactggtcaacacagatagcttggaa

SEQ ID NO: 5644 - DNA, 656 bp, Homo sapiens
  source 1..656: mol_type = unassigned DNA
actattctgtaagcaactgtgggatactaagaatttgtattttgaaatgttaaaaatttggattatgatgacaaattgtagataatctgcttttgcattatcagatacccagagagcattgcaccttttggaggaatatcgttcaaaactaagccaaactgaagacagacagctcagaagttccatagaacgggttattaacatatttcagagcaacctctttcaggctttaatagatattcaagaattttatgaagtgaccttactggataatccaaaatgtatagatcgttcaaagccgtctgaaccaattcaacctgtgaatacttgggagatttccagccttccaagctctactgtgacttcagagacactgccaagcagccttagccctagtgtagagaaatacaggtatcaggatgaagatacacctcctcaagagcatatttccccacaaatcacaaatgaagtgataggtccagaattggttcatgtctcagagaagaacttatcagagattgagaatgtccatggatttgtttctcattctcatatttcaccaataaaggtaggatagtatctatttattattgttatgaattacatattacttttgttatacatatagctcatgctcggagagaagtattctttca

SEQ ID NO: 5645 - DNA, 582 bp, Homo sapiens
  source 1..582: mol_type = unassigned DNA
ggtggggatctacccccggggtcgccaggcgctgtctctgccgcggagttggaaacggcactgctgagtgaggttgaggggtgtctcggtgtgtgccctcttcctgattctggagaaaaatgccggtccggaagcaagatacccagagagcattgcaccttttggaggaatatcgttcaaaactaagccaaactgaagacagacagctcagaagttccatagaacgggttattaacatatttcagagcaacctctttcaggctttaatagatattcaagaattttatgaagtgaccttactggataatccaaaatgtatagatcgttcaaagccgtctgaaccaattcaacctgtgaatacttgggagatttccagccttccaagctctactgtgacttcagagacactgccaagcagccttagccctagtgtagagaaatacaggtatcaggatgaagatacacctcctcaagagcatatttccccacaaatcacaaatgaagtgataggtccagaattggttcatgtctcagagaagaacttatcagagattgagaatgtccatggatttgtttctcatt

SEQ ID NO: 5646 - DNA, 558 bp, Homo sapiens
  source 1..558: mol_type = unassigned DNA
gtatcttattctcatggaggagatagcagagcttgtactgcagcaagtggagctctgtggtgaatccgatgctggattacattttaaggatattagcaaggccctgacaaagtggtgctaaatgagcactttcattctggtaatttgactataattttagtgaagcagttttattatgcaggaaaaagaaacagcattttaattccaatcatagtataccgacctgatctctgctgtgggggtggaaacaatgaagaatgcaacattttaatacaattttttttaaaaagaatgctttggatctagattaaatgttcaagacagtcagcaaacaacatgcacaaaggcatttttctggaatttcagtcttggatcgatttaaatgctcagggtctgaaaaaatgtctcctagcatcaaaaacttggattgcttttctccgatgttatgccactgtaaagtagcatgctccaacagcacaatatccttaatgtttggatgtaagaaatacaggtatcaggatgaagatacacctcctcaagagcatatttccccacaaa

SEQ ID NO: 5647 - DNA, 543 bp, Homo sapiens
  source 1..543: mol_type = unassigned DNA
agcaaggagaaaggcaagcgagaggagggggcccgagcagggcgggcggccagtcccgctggtcccctctcagcgctctgcggccgctgctggctcaggggccaagggtcggagcgcttcacccgcccgtacccagtagcaggtgtgtgccctcttcctgattctggagaaaaatgccggtccggaagcaagatacccagagagcattgcaccttttggaggaatatcgttcaaaactaagccaaactgaagacagacagctcagaagttccatagaacgggttattaacatatttcagagcaacctctttcaggctttaatagatattcaagaattttatgaagtgaccttactggataatccaaaatgtatagatcgttcaaagccgtctgaaccaattcaacctgtgaatacttgggagatttccagccttccaagctctactgtgacttcagagacactgccaagcagccttagccctagtgtagagaaatacaggtatcaggatgaagatacacctcctcaagagcatatttccccac

SEQ ID NO: 5648 - DNA, 479 bp, Homo sapiens
  source 1..479: mol_type = unassigned DNA
gcggccgctgccctgtccggcccccgctggagcagcccggaggcagcgagcaaggagaaaggtgtgtgccctcttcctgattctggagaaaaatgccggtccggaagcaagatacccagagagcattgcaccttttggaggaatatcgttcaaaactaagccaaactgaagacagacagctcagaagttccatagaacgggttattaacatatttcagagcaacctctttcaggctttaatagatattcaagaattttatgaagtgaccttactggataatccaaaatgtatagatcgttcaaagccgtctgaaccaattcaacctgtgaatacttgggagatttccagccttccaagctctactgtgacttcagagacactgccaagcagccttagccctagtgtagaggtgagataaaaaatgtgttctgaagctgttttttggtgatcaatttatttatgttactatgtttcttta

SEQ ID NO: 5649 - DNA, 710 bp, Homo sapiens
  source 1..710: mol_type = unassigned DNA
ctggctcaggggccaagggtcggagcgcttcacccgcccgtacccagtagcaggtggggagtgtggatacttgtgcgggggaagaggcggcctcaggtctaggctctttggggaggggacgctttcgaggagagtttggaagccgacttctgtctgttcttaatttggaggggtacccactccaaggaaaagctttccacgttgacagacaactgctgcgttttgagactctttctttgacttggtaaaactttggaacgtggggttttcaaataggctgcgagggttttctatttcgataggggaaaatgctagtttaacatgattctatcctttttcctttccgttgtgtgttttaaaggtgtgtgccctcttcctgattctggagaaaaatgccggtccggaagcaagatacccagagagcattgcaccttttggaggaatatcgttcaaaactaagccaaactgaagacagacagctcagaagttccatagaacgggttattaacatatttcagagcaacctctttcaggctttaatagatattcaagaattttatgaagtgaccttactggataatccaaaatgtatagatcgttcaaagccgtctgaaccaattcaacctgtgaatacttgggagatttccagccttccaagctctactgtgacttcagagacactgccaagcagccttagccctagtgtagag

SEQ ID NO: 5650 - DNA, 309 bp, Homo sapiens
  source 1..309: mol_type = unassigned DNA
tgcgggggaagaggcggcctcaggtctaggctctttggggaggggacgctttcgaggagagtttggaagccgacttctgtctgttcttaatttggaggggtacccactccaaggaaaagctttccacgttgacagacaactgctgcgttttgagactctttctttgacttggtgtgtgccctcttcctgattctggagaaaaatgccggtccggaagcaagatacccagagagcattgcaccttttggaggaatatcgttcaaaactaagccaaactgaagacagacagctcagaagttccatagaacg

SEQ ID NO: 5651 - DNA, 4931 bp, Homo sapiens
  source 1..4931: mol_type = unassigned DNA
gttggaaacggcactgctgagtgaggttgaggggtgtctcggtatgtgcgccttggatctggtgtaggcgaggtcacgcctctcttcagacagcccgagccttcccggcctggcgcgtttagttcggaactgcgggacgcgccggtgggctagggcaaggtgtgtgccctcttcctgattctggagaaaaatgccggtccggaagcaagatacccagagagcattgcaccttttggaggaatatcgttcaaaactaagccaaactgaagacagacagctcagaagttccatagaacgggttattaacatatttcagagcaacctctttcaggctttaatagatattcaagaattttatgaagtgaccttactggataatccaaaatgtatagatcgttcaaagccgtctgaaccaattcaacctgtgaatacttgggagatttccagccttccaagctctactgtgacttcagagacactgccaagcagccttagccctagtgtagagaaatacaggtatcaggatgaagatacacctcctcaagagcatatttccccacaaatcacaaatgaagtgataggtccagaattggttcatgtctcagagaagaacttatcagagattgagaatgtccatggatttgtttctcattctcatatttcaccaataaaggcaaatcctcccccagtactggtcaacacagatagcttggaaacaccaacttacgttaatggcacagatgcagattatgaatatgaagaaatcacacttgaaaggggaaattcagggcttggtttcagcattgcaggaggtacggacaacccacacattggagatgactcaagtattttcattaccaaaattatcacagggggagcagccgcccaagatggaagattgcgggtcaatgactgtatattacgagtaaatgaagtagatgttcgtgatgtaacacatagcaaagcagttgaagcgttgaaagaagcagggtctattgtacgcttgtatgtaaaaagaaggaaaccagtgtcagaaaaaataatggaaataaagctcattaaaggtcctaaaggtcttgggtttagcattgctggaggtgttggaaatcagcatattcctggggataatagcatctatgtaaccaaaataattgaaggaggtgcagcacataaggatggcaaacttcagattggagataaacttttagcagtgaataacgtatgtttagaagaagttactcatgaagaagcagtaactgccttaaagaacacatctgattttgtttatttgaaagtggcaaaacccacaagtatgtatatgaatgatggctatgcaccacctgatatcaccaactcttcttctcagcctgttgataaccatgttagcccatcttccttcttgggccagacaccagcatctccagccagatactccccagtttctaaagcagtacttggagatgatgaaattacaagggaacctagaaaagttgttcttcatcgtggctcaacgggccttggtttcaacattgtaggaggagaagatggagaaggaatatttatttcctttatcttagccggaggacctgctgatctaagtggagagctcagaaaaggagatcgtattatatcggtaaacagtgttgacctcagagctgctagtcatgagcaggcagcagctgcattgaaaaatgctggccaggctgtcacaattgttgcacaatatcgacctgaagaatacagtcgttttgaagctaaaatacatgatttacgggagcagatgatgaatagtagtattagttcagggtcaggttctcttcgaactagccagaagcgatccctctatgtcagagccctttttgattatgacaagactaaagacagtgggcttcccagtcagggactgaacttcaaatttggagatatcctccatgttattaatgcttctgatgatgaatggtggcaagccaggcaggttacaccagatggtgagagcgatgaggtcggagtgattcccagtaaacgcagagttgagaagaaagaacgagcccgattaaaaacagtgaaattcaattctaaaacgagagataaagggtcattcaatgacaagcgtaaaaagaacctcttttcccgaaaattccccttctacaagaacaaggaccagagtgagcaggaaacaagtgatgctgaccagcatgtaacttctaatgccagcgatagtgaaagtagttaccgtggtcaagaagaatacgtcttatcttatgaaccagtgaatcaacaagaagttaattatactcgaccagtgatcatattgggacctatgaaagacaggataaatgatgacttgatctcagaatttcctgacaaatttggatcctgtgttcctcatacaactagaccaaaacgagattatgaggtagatggaagagattatcattttgtgacttcaagagagcagatggaaaaagatatccaggaacataaattcattgaagctggccagtataacaatcatctatatggaacaagtgttcagtctgtacgagaagtagcagaaaagggcaaacactgtatccttgatgtgtctggaaatgccataaagagattacagattgcacagctttaccctatctccatttttattaaacccaaatccatggaaaatatcatggaaatgaataagcgtctaacagaagaacaagccagaaaaacatttgagagagccatgaaactggaacaggagtttactgaacatttcacagctattgtacagggggatacgctggaagacatttacaaccaagtgaaacagatcatagaagaacaatctggttcttacatctgggttccggcaaaagaaaagctatgaaaactcatgtttctctgtttctcttttccacaattccattttctttggcatctctttgccctttcctctggagtctttcttgagtactgatttcatgttgaattgtatcccacacatcatggtctgcagcttctttttcacatgtagtgtctccttcaagttacatcgtgtgtattatttaatgtcactattggttagtggccatttttcagaactgaagatggaatggcctgaccagctattaagaacgtggggagacgcagaaattgtggtaaaattccttaatgtttaagggaaagtaactttaagagatttttggaaaagctttatatacattcttttcaaatttcagtacaaatgaaaaagtggttttaatcagtgatttagtagactttgagcaactgtgcacgcttcagtttaatagcatggtttggccagtgtattactctcaagtccttttctcaatcaacttctatcatcaaagcaattgtttcattatagataaataaggacattttttaatttaaaaattcatgtctgagttgactttcataagggatttcattttttcctcaacattcttaaagccttttagtatttgacggttcttttttcccaggacatttgctaggaataacaacgtttcaatgtttttaatctacttgagcaacactatcgtgtcttacaaaagttgttcatatgtaaatgatcatcacatttcgtgaattgaggccatgttcaggtgctaaggaagttcgccttttacacagaagattgagaaaatttcctagatataaatacagataaatcagacgttacagtggtgacgtagtaaccatcatggcaatggaaaggagtccaattcatagcctaaaacttcaaatgtattcttaggagtcagattttactgaatattttacccacaatagctgcctattttgttataataaaatatatataaatatatatataaaactttctttaaactgtaactatgggaattattttctttacatagttgcgcacacacacaaacatatatatatatttaaaatatattttgtttcttttgccacctactcctaactttttgtttggtttttaaattaaatattaattgaatagacttatcttccttaatcatgtgaactgaaaatgggggcatggtggtcatgaggaggaaacatttagggaaattagattataagtaaaagtgtgggcatattctcctcttttctacaaaggttttcaaatggttcctgaggttttttgttgttgtccgtgttgttactgttgttcttgtcatcaggtttgattttggtccttgccctttccttctagttctccttttattaataggaaggcaggcaaaagccccatttatgtgtgtgttttcccctcagacagctttcatccactgctctgcactagaattgcacaaatcttcatggtgagcaattttaagaaatgttagtgaaaggtagaaattatttcacaaatcagtttctctggtccttcatattaataataatatttggcttcccattgctctttggagttgtttattaaatatgtgtttttgacaacctcctcattagtttcttaaatgagtactggtttgtaaagaattatcaacattatccattccatttatgaagaagaggagaacagctaataaactgtattgtaaaatccatatgttaagtgtgtcttgaattttgaaagaaaaaatatattttgcaagctaacattttcttgaaacaatttgaggcatcatgtaacttataaccgaatccaagagccgttaggcagcagagtgtgttaccacattgaaatacacagtgctgctgttagactaaatgtcgtaggttgttaaccacatagaaacacactagtatgaagaaaactgttgtaaaatctcaagagcttcagaaactgccttacaagaccgcagcataagctattttgaagtatttaccaaatagtcacatgttgtaaaatatcaagtggttataaaaggatgccatttatatattaaaatttacataacattgttttctgg

SEQ ID NO: 5652 - DNA, 1894 bp, Homo sapiens
  source 1..1894: mol_type = unassigned DNA
gtccctgccctctcccgtgctctccatcttccctttcctttccctctgtcttttactctgtccatacccgcttcctgcctgactctctgcccccgtgtttcttgacatccatgtcactccccttcggccaacttcccattccccacctctccccgtccgtgtccctccggcactgctctctgtcctttctcgccacccgctggcccccctccgcccaccctgcctgcccccaggggaagcactgcatcctcgatgtctcggccaatgccgtgcggcggctgcaggcggcccacctgcaccccatcgccatcttcatccgcccccgctccctggagaatgtgctgtgagtatggtcctgggggcctcccctttgctcccccaacacctgtggccctgggcctcacaaggcgtctgcgttcaactctcccttcagaaccctggacagcggtttcagcagcccctgagggggatccctggaacccagaggatgtgggggaatcgggtctttcccctcctctcctgccttggctagacaggactacatttcccagcagcccctggggcataccagctggggcgagtcagggcctctagggctgttgggaattggagtccgaatcccatctctggggctgaaggctggaaggatgaagctccgtagatgtccctggagtagccacacctggctggggcggttgcgggtggcaggggggtggggggtggttctcatctgtggccccagaggatattgggaattgtatttttttttttgctatgtgctccaaatagaagaatacttaacattcctggatagaggagataaaaggcagggtcaggtgggtccagtctcaggcctgctctccctccctcttcacagagagattaacaagcggatcacagaggagcaagcccgcaaagccttcgacagagccaccaagctggagcaggagttcacagagtgcttctcagccatcgtggagggtgacagctttgaggagatctaccacaaggtgaagcgtgtcatcgaggacctctcaggcccctacatctgggttccagcccgagagagactctgattcctgccctggcttggcctggactcgccctgcctccatcacctgggcccttggtctggactgaattgcccaagcccttggctccccccggcctccctcccaccccttcttatttatttcctttctaactggatccagcctgttggaggggggacactcctctgcatgtatccccgcaccccagaactgggctcctgaacgccaggaacctggggtctgggggggagctgggctccttgttccgagcccttgctccttaggatccccgcccccacctgcccccaatgcacacacagacccaccgggggccacctgccctcccccatcctctcccacacacattccagaagtcagggccccctcgaggagcacccgctgcagggatgcagggccacaggcctccgctctctcctaaggcagggtctggggtcacccctgccctcatcgtaattccccatgttccttgatttctcatttattttttccactttttttcttctcaaaggtggttttttggggggagaagcaggggactccgcagcgggcccctgccttccacatgcccccaccatttttctttgccggtttgcatgagtggaaggtctaaatgtggcttttttttttttttttcctgggaatttttttggggaaaagggagggatgggtctagggagtgggaaatgcgggagggagggtggggggcaggggtcgggggtcgggtgtccgggagccagggaagactggaaatgctgccgccttctgcaatttatttatttttttcttttgagagagtgaaaggaagagacagatacttgaaa

SEQ ID NO: 5653 - DNA, 3185 bp, Homo sapiens
  source 1..3185: mol_type = unassigned DNA
cccctccctcccacgctcccctccccttcccttctccaaccccctccttcccctctcacccctccccccatcctggccccccctgcaaaagtggggtgcggaggggggaggggtgagaacccacggaggggaggaacgaaactccgatgaagtcagagccccttacccgccgccgcggccaggccccccaacatggactgtctctgtatagtgacaaccaagaaataccgctaccaagatgaagacacgccccctctggagcacagcccggcccacctccccaaccaggccaattctcccccagtgattgtcaacacagataccctagaagccccaggatatgagttgcaggtgaacgggaccgagggggagatggaatacgaggaaatcacattggaaaggggtaactcaggtctgggcttcagcatcgcaggtggcactgacaacccacacatcggtgacgacccatccattttcatcaccaagatcattcctggtggggctgcggcccaggatggccgcctcagggtcaacgacagcatcctgtttgtaaatgaagtggacgtgcgcgaggtgacccactcagcggcggtggaagccctcaaagaggcaggctccatcgttcgcctctatgtcatgcgccggaagcccccggctgagaaggtcatggagatcaagctcatcaaggggcctaaaggtcttggcttcagcatcgcagggggcgtagggaaccagcacatcccaggagataatagcatctatgtaacaaagatcatcgaagggggtgctgcccacaaggatgggaggttgcagattggagacaagatcctggcggtcaacagtgtggggctagaggacgtcatgcatgaagatgctgtggcagccctgaagaacacgtatgatgttgtctacctaaaggtggccaagcccagcaatgcctacctgagtgacagctatgctcccccagacatcacaacctcttattcccagcacctggacaatgagatcagtcacagcagctacctgggcaccgactaccccacagccatgacccccacttcccctcggcgctactctccagtggccaaggacctgctcggggaggaagacattccccgagaaccgaggcgaattgtgatccaccggggctccacgggcctgggcttcaacatcgtgggtggcgaggacggtgaaggcatcttcatctcctttatcctggccgggggccctgcagacctcagtggggagctgcggaagggggaccagatcctgtcggtcaacggtgtggacctccgaaatgccagccatgagcaggctgccattgccctgaagaatgcgggtcagacggtcacgatcatcgctcagtataaaccagaagagtacagccgattcgaggccaagatccacgaccttcgggaacagctcatgaacagcagcctgggctcagggactgcgtccctgcggagcaaccccaaaaggggtttctacatcagggccctgtttgattacgacaagaccaaggactgcggcttcctgagccaggccctgagcttccgctttggggatgtgctgcatgtcatcgatgctagtgatgaggagtggtggcaggcacggcgggtccactctgacagtgagaccgacgacattgggttcatccccagcaaacggcgggttgagcgacgagagtggtcaaggttaaaggccaaggactggggctccagctctggatcgcagggtcgagaagactcggttctgagctacgagacagtgacgcagatggaagtgcactatgctcgccccatcatcatccttgggcccaccaaggaccgcgccaacgatgatcttctctccgagttccccgacaagtttggatcctgtgttccccatacgacacggcccaagcgggagtatgagatagatggccgggattaccactttgtgtcgtcccgggagaaaatggagaaggacattcaggcgcacaagttcattgaggccggccagtacaacagccacctctatgggaccagcgtccagtccgtgcgagaggtggcagagcaggggaagcactgcatcctcgatgtctcggccaatgccgtgcggcggctgcaggcggcccacctgcaccccatcgccatcttcatccgcccccgctccctggagaatgtgctagagattaacaagcggatcacagaggagcaagcccgcaaagccttcgacagagccaccaagctggagcaggagttcacagagtgcttctcagccatcgtggagggtgacagctttgaggagatctaccacaaggtgaagcgtgtcatcgaggacctctcaggcccctacatctgggttccagcccgagagagactctgattcctgccctggcttggcctggactcgccctgcctccatcacctgggcccttggtctggactgaattgcccaagcccttggctccccccggcctccctcccaccccttcttatttatttcctttctaactggatccagcctgttggaggggggacactcctctgcatgtatccccgcaccccagaactgggctcctgaacgccaggaacctggggtctgggggggagctgggctccttgttccgagcccttgctccttaggatccccgcccccacctgcccccaatgcacacacagacccaccgggggccacctgccctcccccatcctctcccacacacattccagaagtcagggccccctcgaggagcacccgctgcagggatgcagggccacaggcctccgctctctcctaaggcagggtctggggtcacccctgccctcatcgtaattccccatgttccttgatttctcatttattttttccactttttttcttctcaaaggtggttttttggggggagaagcaggggactccgcagcgggcccctgccttccacatgcccccaccatttttctttgccggtttgcatgagtggaaggtctaaatgtggcttttttttttttttttcctgggaatttttttggggaaaagggagggatgggtctagggagtgggaaatgcgggagggagggtggggggcaggggtcgggggtcgggtgtccgggagccagggaagactggaaatgctgccgccttctgcaatttatttatttttttcttttgagagagtgaaaggaagagacagatacttgaaa

SEQ ID NO: 5654 - DNA, 3184 bp, Homo sapiens
  source 1..3184: mol_type = unassigned DNA
gcccccttcccctccctcccacgctcccctccccttcccttctccaaccccctccttcccctctcacccctccccccatcctggccccccctgcaaaagtggggtgcggaggggggaggggtgagaacccacggaggggaggaacgaaactccgatgaagtcagagccccttacccgccgccgcggccaggccccccaacatggactgtctctgtatagtgacaaccaagaaataccgctaccaagatgaagacacgccccctctggagcacagcccggcccacctccccaaccaggccaattctcccccagtgattgtcaacacagataccctagaagccccaggatatgtgaacgggaccgagggggagatggaatacgaggaaatcacattggaaaggggtaactcaggtctgggcttcagcatcgcaggtggcactgacaacccacacatcggtgacgacccatccattttcatcaccaagatcattcctggtggggctgcggcccaggatggccgcctcagggtcaacgacagcatcctgtttgtaaatgaagtggacgtgcgcgaggtgacccactcagcggcggtggaagccctcaaagaggcaggctccatcgttcgcctctatgtcatgcgccggaagcccccggctgagaaggtcatggagatcaagctcatcaaggggcctaaaggtcttggcttcagcatcgcagggggcgtagggaaccagcacatcccaggagataatagcatctatgtaacaaagatcatcgaagggggtgctgcccacaaggatgggaggttgcagattggagacaagatcctggcggtcaacagtgtggggctagaggacgtcatgcatgaagatgctgtggcagccctgaagaacacgtatgatgttgtctacctaaaggtggccaagcccagcaatgcctacctgagtgacagctatgctcccccagacatcacaacctcttattcccagcacctggacaatgagatcagtcacagcagctacctgggcaccgactaccccacagccatgacccccacttcccctcggcgctactctccagtggccaaggacctgctcggggaggaagacattccccgagaaccgaggcgaattgtgatccaccggggctccacgggcctgggcttcaacatcgtgggtggcgaggacggtgaaggcatcttcatctcctttatcctggccgggggccctgcagacctcagtggggagctgcggaagggggaccagatcctgtcggtcaacggtgtggacctccgaaatgccagccatgagcaggctgccattgccctgaagaatgcgggtcagacggtcacgatcatcgctcagtataaaccagaagagtacagccgattcgaggccaagatccacgaccttcgggaacagctcatgaacagcagcctgggctcagggactgcgtccctgcggagcaaccccaaaaggggtttctacatcagggccctgtttgattacgacaagaccaaggactgcggcttcctgagccaggccctgagcttccgctttggggatgtgctgcatgtcatcgatgctagtgatgaggagtggtggcaggcacggcgggtccactctgacagtgagaccgacgacattgggttcatccccagcaaacggcgggttgagcgacgagagtggtcaaggttaaaggccaaggactggggctccagctctggatcgcagggtcgagaagactcggttctgagctacgagacagtgacgcagatggaagtgcactatgctcgccccatcatcatccttgggcccaccaaggaccgcgccaacgatgatcttctctccgagttccccgacaagtttggatcctgtgttccccatacgacacggcccaagcgggagtatgagatagatggccgggattaccactttgtgtcgtcccgggagaaaatggagaaggacattcaggcgcacaagttcattgaggccggccagtacaacagccacctctatgggaccagcgtccagtccgtgcgagaggtggcagagcaggggaagcactgcatcctcgatgtctcggccaatgccgtgcggcggctgcaggcggcccacctgcaccccatcgccatcttcatccgcccccgctccctggagaatgtgctagagattaacaagcggatcacagaggagcaagcccgcaaagccttcgacagagccaccaagctggagcaggagttcacagagtgcttctcagccatcgtggagggtgacagctttgaggagatctaccacaaggtgaagcgtgtcatcgaggacctctcaggcccctacatctgggttccagcccgagagagactctgattcctgccctggcttggcctggactcgccctgcctccatcacctgggcccttggtctggactgaattgcccaagcccttggctccccccggcctccctcccaccccttcttatttatttcctttctaactggatccagcctgttggaggggggacactcctctgcatgtatccccgcaccccagaactgggctcctgaacgccaggaacctggggtctgggggggagctgggctccttgttccgagcccttgctccttaggatccccgcccccacctgcccccaatgcacacacagacccaccgggggccacctgccctcccccatcctctcccacacacattccagaagtcagggccccctcgaggagcacccgctgcagggatgcagggccacaggcctccgctctctcctaaggcagggtctggggtcacccctgccctcatcgtaattccccatgttccttgatttctcatttattttttccactttttttcttctcaaaggtggttttttggggggagaagcaggggactccgcagcgggcccctgccttccacatgcccccaccatttttctttgccggtttgcatgagtggaaggtctaaatgtggcttttttttttttttttcctgggaatttttttggggaaaagggagggatgggtctagggagtgggaaatgcgggagggagggtggggggcaggggtcgggggtcgggtgtccgggagccagggaagactggaaatgctgccgccttctgcaatttatttatttttttcttttgagagagtgaaaggaagagacagatacttgaaa

SEQ ID NO: 5655 - DNA, 3975 bp, Homo sapiens
  source 1..3975: mol_type = unassigned DNA
gggacagaagaggaaggggcttaagtcactgcagccagagggatggaggtggactgaagggagggcttctccggtggggttagaagggaaaagtagggaaagagaagtgtaaggtagatggcagaggcagagacatggaaagacagactctagggttcctgatgaaatctatctcggccaacacaaaagggagggtacagtggtggggggcacccaagctagggtgtgagtaccctaagtgtattcttctgagatgtaggccattcactaactcttggaacagctacagtttcacagtaggaagacccccccagattcactgcccctcccttagtaaagcctctgagaccttcctgaacattcccttctgtctttgccctctgttccttccagagaccatgtgcccaggcagatggattcctcccgggcctgagaggaactgcaggaattctcctgcctcttacccgtaaaaccccaacttctctagccctagggcaggaagtcccaaacaatttctacccctttttctgcaattctcattggggtgagaggaggcccaggaggagagagagctgggctcagcttctttttgagctgctggagccctctgtgaggaggccctctttgctggcttctcaggagagcgtggctaggttctgcctgcctatgggaagagggggccagggtgtgtggagcaagatggtggcggtgctggtgccttgggacctgggggaatgggacagctggtcggctcagagacggcctactttactcacagctggaatttagtggggagaagcagctcaactccaatcctggaggattagggagattaaagtgagagaagagagagatgtcccagagaccaagagctcccaggtcagccctctggctcctggcacccccactgctgcggtgggcacccccactcctcacagtgctgcatagcgacctcttccaggccttgctggacatcctggactattatgaggcttccctctcagagagtcagaaataccgctaccaagatgaagacacgccccctctggagcacagcccggcccacctccccaaccaggccaattctcccccagtgattgtcaacacagataccctagaagccccaggatatgagttgcaggtgaacgggaccgagggggagatggaatacgaggaaatcacattggaaaggggtaactcaggtctgggcttcagcatcgcaggtggcactgacaacccacacatcggtgacgacccatccattttcatcaccaagatcattcctggtggggctgcggcccaggatggccgcctcagggtcaacgacagcatcctgtttgtaaatgaagtggacgtgcgcgaggtgacccactcagcggcggtggaagccctcaaagaggcaggctccatcgttcgcctctatgtcatgcgccggaagcccccggctgagaaggtcatggagatcaagctcatcaaggggcctaaaggtcttggcttcagcatcgcagggggcgtagggaaccagcacatcccaggagataatagcatctatgtaacaaagatcatcgaagggggtgctgcccacaaggatgggaggttgcagattggagacaagatcctggcggtcaacagtgtggggctagaggacgtcatgcatgaagatgctgtggcagccctgaagaacacgtatgatgttgtctacctaaaggtggccaagcccagcaatgcctacctgagtgacagctatgctcccccagacatcacaacctcttattcccagcacctggacaatgagatcagtcacagcagctacctgggcaccgactaccccacagccatgacccccacttcccctcggcgctactctccagtggccaaggacctgctcggggaggaagacattccccgagaaccgaggcgaattgtgatccaccggggctccacgggcctgggcttcaacatcgtgggtggcgaggacggtgaaggcatcttcatctcctttatcctggccgggggccctgcagacctcagtggggagctgcggaagggggaccagatcctgtcggtcaacggtgtggacctccgaaatgccagccatgagcaggctgccattgccctgaagaatgcgggtcagacggtcacgatcatcgctcagtataaaccagaagagtacagccgattcgaggccaagatccacgaccttcgggaacagctcatgaacagcagcctgggctcagggactgcgtccctgcggagcaaccccaaaaggggtttctacatcagggccctgtttgattacgacaagaccaaggactgcggcttcctgagccaggccctgagcttccgctttggggatgtgctgcatgtcatcgatgctagtgatgaggagtggtggcaggcacggcgggtccactctgacagtgagaccgacgacattgggttcatccccagcaaacggcgggttgagcgacgagagtggtcaaggttaaaggccaaggactggggctccagctctggatcgcagggtcgagaagactcggttctgagctacgagacagtgacgcagatggaagtgcactatgctcgccccatcatcatccttgggcccaccaaggaccgcgccaacgatgatcttctctccgagttccccgacaagtttggatcctgtgttccccatacgacacggcccaagcgggagtatgagatagatggccgggattaccactttgtgtcgtcccgggagaaaatggagaaggacattcaggcgcacaagttcattgaggccggccagtacaacagccacctctatgggaccagcgtccagtccgtgcgagaggtggcagagcaggggaagcactgcatcctcgatgtctcggccaatgccgtgcggcggctgcaggcggcccacctgcaccccatcgccatcttcatccgcccccgctccctggagaatgtgctagagattaacaagcggatcacagaggagcaagcccgcaaagccttcgacagagccaccaagctggagcaggagttcacagagtgcttctcagccatcgtggagggtgacagctttgaggagatctaccacaaggtgaagcgtgtcatcgaggacctctcaggcccctacatctgggttccagcccgagagagactctgattcctgccctggcttggcctggactcgccctgcctccatcacctgggcccttggtctggactgaattgcccaagcccttggctccccccggcctccctcccaccccttcttatttatttcctttctaactggatccagcctgttggaggggggacactcctctgcatgtatccccgcaccccagaactgggctcctgaacgccaggaacctggggtctgggggggagctgggctccttgttccgagcccttgctccttaggatccccgcccccacctgcccccaatgcacacacagacccaccgggggccacctgccctcccccatcctctcccacacacattccagaagtcagggccccctcgaggagcacccgctgcagggatgcagggccacaggcctccgctctctcctaaggcagggtctggggtcacccctgccctcatcgtaattccccatgttccttgatttctcatttattttttccactttttttcttctcaaaggtggttttttggggggagaagcaggggactccgcagcgggcccctgccttccacatgcccccaccatttttctttgccggtttgcatgagtggaaggtctaaatgtggcttttttttttttttttcctgggaatttttttggggaaaagggagggatgggtctagggagtgggaaatgcgggagggagggtggggggcaggggtcgggggtcgggtgtccgggagccagggaagactggaaatgctgccgccttctgcaatttatttatttttttcttttgagagagtgaaaggaagagacagatacttgaaa

SEQ ID NO: 5656 - DNA, 869 bp, Homo sapiens
  source 1..869: mol_type = unassigned DNA
ttgggcccaccaaggaccgcgccaacgatgatcttctctccgagttccccgacaagtttggatcctgtgttccccatacgacacggcccaagcgggagtatgagatagatggccgggattaccactttgtgtcgtcccgggagaaaatggagaaggacattcaggcgcacaagttcattgaggccggccagtacaacagccacctctatgggaccagcgtccagtccgtgcgagaggtggcagagcagagagattaacaagcggatcacagaggagcaagcccgcaaagccttcgacagagccaccaagctggagcaggagttcacagagtgcttctcagccatcgtggagggtgacagctttgaggagatctaccacaaggtgaagcgtgtcatcgaggacctctcaggcccctacatctgggttccagcccgagagagactctgattcctgccctggcttggcctggactcgccctgcctccatcacctgggcccttggtctggactgaattgcccaagcccttggctccccccggcctccctcccaccccttcttatttatttcctttctaactggatccagcctgttggaggggggacactcctctgcatgtatccccgcaccccagaactgggctcctgaacgccaggaacctggggtctgggggggagctgggctccttgttccgagcccttgctccttaggatccccgcccccacctgcccccaatgcacacacagacccaccgggggccacctgccctcccccatcctctcccacacacattccagaagtcagggccccctcgaggagcacccgctgcagggatgcagggccacaggcctccgctctctcctaaggcaggg

SEQ ID NO: 5657 - DNA, 1004 bp, Homo sapiens
  source 1..1004: mol_type = unassigned DNA
gtcagagccccttacccgccgccgcggccaggccccccaacatggactgtctctgtatagtgacaaccaagaaataccgctaccaagatgaagacacgccccctctggagcacagcccggcccacctccccaaccaggccaattctcccccagtgattgtcaacacagataccctagaagccccaggatatgtgaacgggaccgagggggagatggaatacgaggaaatcacattggaaaggggtaactcaggtctgggcttcagcatcgcaggtggcactgacaacccacacatcggtgacgacccatccattttcatcaccaagatcattcctggtggggctgcggcccaggatggccgcctcagggtcaacgacagcatcctgtttgtaaatgaagtggacgtgcgcgaggtgacccactcagcggcggtggaagccctcaaagaggcaggctccatcgttcgcctctatgtcatgcgccggaagcccccggctgagaaggtcatggagatcaagctcatcaaggggcctaaaggtcttggcttcagcatcgcagggggcgtagggaaccagcacatcccaggagataatagcatctatgtaacaaagatcatcgaagggggtgctgcccacaaggatgggaggttgcagattggagacaagatcctggcggtcaacagtgtggggctagaggacgtcatgcatgaagatgctgtggcagccctgaagaacacgtatgatgttgtctacctaaaggtggccaagcccagcaatgcctacctgagtgacagctatgctcccccagacatcacaacctgtgagagcccttcaaacaccaaagttccccatgacccatcccgtttaacccatgacatgcagtcccacgacatccctgtagctgtccctcttcagatattccctatgaaatagccacaacctctgatccttgctgttgttggagaagagatggaaaatcaattaccataaaagaactagaaaaga

SEQ ID NO: 5658 - DNA, 926 bp, Homo sapiens
  source 1..926: mol_type = unassigned DNA
cttggatcctctggtgatccaagccttcctaccagatatgaaactaggacattgggggtcatcttgggggcgcatgtaacagatgccgatcaacggggtcaatctcgcttggaaataccgctaccaagatgaagacacgccccctctggagcacagcccggcccacctccccaaccaggtaaacgcccccgagctggtgcacgtggcggagaggaacttgtcccacctcgaggctggccacggggtcgtgggccacgcccacctctcccccttcaaggccaattctcccccagtgattgtcaacacagataccctagaagccccaggatatgagttgcaggtgaacgggaccgagggggagatggaatacgaggaaatcacattggaaaggggtaactcaggtctgggcttcagcatcgcaggtggcactgacaacccacacatcggtgacgacccatccattttcatcaccaagatcattcctggtggggctgcggcccaggatggccgcctcagggtcaacgacagcatcctgtttgtaaatgaagtggacgtgcgcgaggtgacccactcagcggcggtggaagccctcaaagaggcaggctccatcgttcgcctctatgtcatgcgccggaagcccccggctgagaaggtcatggagatcaagctcatcaaggggcctaaaggtcttggcttcagcatcgcagggggcgtagggaaccagcacatcccaggagataatagcatctatgtaacaaagatcatcgaagggggtgctgcccacaaggatgggaggttgcagattggagacaagatcctggcggtcaacagtgtggggctagaggacgtcatgcatgaagatgctgtggcagccctgaagaacacgtatgatgttgtctacctaaaggtggccaagcccagcaatg

SEQ ID NO: 5659 - DNA, 763 bp, Homo sapiens
  source 1..763: mol_type = unassigned DNA
gaacgaaactccgatgaagtcagagccccttacccgccgccgcggccaggccccccaacatggactgtctctgtatagtgacaaccaagaaataccgctaccaagatgaagacacgccccctctggagcacagcccggcccacctccccaaccaggtaaacgcccccgagctggtgcacgtggcggagaggaacttgtcccacctcgaggctggccacggggtcgtgggccacgcccacctctcccccttcaaggccaattctcccccagtgattgtcaacacagataccctagaagccccaggatatgtgaacgggaccgagggggagatggaatacgaggaaatcacattggaaaggggtaactcaggtctgggcttcagcatcgcaggtggcactgacaacccacacatcggtgacgacccatccattttcatcaccaagatcattcctggtggggctgcggcccaggatggccgcctcagggtcaacgacagcatcctgtttgtaaatgaagtggacgtgcgcgaggtgacccactcagcggcggtggaagccctcaaagaggcaggctccatcgttcgcctctatgtcatgcgccggaagcccccggctgagaaggtcatggagatcaagctcatcaaggggcctaaaggtcttggcttcagcatcgcagggggcgtagggaaccagcacatcccaggagataatagcatctatgtaacaaagatcatcgaagggggtgctgcccacaaggatgggag

SEQ ID NO: 5660 - DNA, 586 bp, Homo sapiens
  source 1..586: mol_type = unassigned DNA
gtggattgaggctgggcccttgagcagctctcagggtggcggagtgggcttggctaagaggctgaaagggtagccacgctgatgggaccctccgttatgggctccctctcgagtcaaggctcaggctgctttttgtctcttgttttcccaaacaggccaattctcccccagtgattgtcaacacagataccctagaagccccaggatatgagttgcaggtgaacgggaccgagggggagatggaatacgaggaaatcacattggaaaggggtaactcaggtctgggcttcagcatcgcaggtggcactgacaacccacacatcggtgacgacccatccattttcatcaccaagatcattcctggtggggctgcggcccaggatggccgcctcagggtcaacgacagcatcctgtttgtaaatgaagtggacgtgcgcgaggtgacccactcagcggcggtggaagccctcaaagaggcaggctccatcgttcgcctctatgtcatgcgccggaagcccccggctgagaaggtcatggagatcaagctcatcaaggggcctaaaggtcttggcttcagcatcgcagg

SEQ ID NO: 5661 - DNA, 573 bp, Homo sapiens
  source 1..573: mol_type = unassigned DNA
actgcgtagggtgaggggcgtaggggagcgaggaaggcaggttattcaggatgcgctgcgcccacaaacctcttcagcccggcctcctctcggcctggctaacgtggggcggggcccagggcaggagaggcggggctagcggatcccttctgcgctcaggagtttggtcggccccaggccacgccccacccccctgttgtcctgacgacagggcctcctggaggccaattctcccccagtgattgtcaacacagataccctagaagccccaggatatgtgaacgggaccgagggggagatggaatacgaggaaatcacattggaaaggggtaactcaggtctgggcttcagcatcgcaggtggcactgacaacccacacatcggtgacgacccatccattttcatcaccaagatcattcctggtggggctgcggcccaggatggccgcctcagggtcaacgacagcatcctgtttgtaaatgaagtggacgtgcgcgaggtgacccactcagcggcggtggaagccctcaaagaggcaggctccatcgttcgcctctatgtcatgcgccggaa

SEQ ID NO: 5662 - DNA, 10130 bp, Homo sapiens
  source 1..10130: mol_type = unassigned DNA
aggaagaagctggagacttggtccagccgggcatcagctttccggggccggcagaggaggatctagacccgcagtactcatggtcgcccacgcagcacttcaatgaggagcgctactcgcccgcgcccaggagcatgaagggcctttccggaagtcggacccagccgccgctgtgttccgggcacacgtgtggtctggcgcccccggaggactgcgagcacctgcaccacgggcccgacgcgcggccgccctacctgctgagccccgccgacagctgccccggggggcgccaccgctgctcgccgcgcagctcggtgcactcggagtgcgtgatgatgccggtggtgctgggcgaccacgtgtccagcagcaccttcccgcggatgcactacagctcgcactacgacacgcgcgacgactgcgctgtggcccacgcgggcgccaagatcaaccgcatcccggccaacctgctggaccagttcgagaagcagctgccgctgcaccgggacggcttccacacgctgcagtaccagaggacgtccgcggccgccgagcagcgcagcgagagccccgggcggatccgccacctggtacactccgtgcagaagctcttcaccaagtcgcactcgctggagggctcctccaaaagcaacgccaacggcaccaaggcggacggccgggcggacgaccaccaccacgcccaccacgccaagcacagcaagaggagcaagagcaaggagcgcaagccggagggcaagccccggcccggcatgagcagctggtggagctcggacgacaacctggacagcgacagcacctatcggacgcccagcgtgctcaaccggcaccacctgggccccgtggcccactgctaccccgacgcgctgcagagccccttcggggacctgtccctcaagacctccaagagcaacaacgacgtcaagtgctcggcctgtgaggggttggcgctgacgcccgacgccaagtacctgaagcgcagctcctggtctacgctgacggtcagccaggccaaggaggcctaccgcaagagctcgctgaacctggacaagccgctgctgcaccaggacgccaagcccgccctgaggccgtgccactacctccaggtacctcaggatgagtggggagggtaccccaccggtggcaaagatgaggagattccctgcaggagaatgagaagtgggagttacattaaagccatgggggacgaggagagcggagagtcagactccagccccaagacatcaccaaagtcggcaatcctacaagagccgctgctgaagtccatcggacagagaccgcttggagagcaccagacccagacctacctgcaagctgcaagcgatgtgcctgtgggacacagcctggaccccgctgcgaactacaactccccgaaattccgctcccggaaccagagctacatgagggccgtcagcaccctgagccaggccagctgcgtgagccaggtgagcgaggcggagatcaatgggcaattcgagtccgtgtgcgagtccgtcttcagtgaagttgaatctcaggccatggatgccctcgacctcccgggatgtttccgaacaaggagtcacagctaccttcgagccattcaagccggctactcccaagatgacgaatgtattcccatgatgacaccctctgacatcacctccaccatcaggtcaacagcagctgtctcatatacaaattacaagaaaacgcccccaccggtgccccctcggaccacctccaagcctctgatctcggtgacggcgcagagcagcaccgaatccacccaggacgcctaccaggacagccgcgcacagaggatgtccccgtggccccaggacagccgcggcctctacaactccacggacagcctggacagcaacaaggccatgaacctcgcgctggagacggccgctgcccagcgccacctgccagagagccagagcagctctgtgcggaccagcgacaaggccatcctggtgtccaaggcggaggagctcctcaagagccgctgctcctccatcgggattcaggattctgaattcccagagcatcagccatacccaaggtcagatgtggaaacggccacagattctgacacggagagccgcggtctgcgggaataccactctgtcggggtgcaagtggaagatgagaagcgacacggacgttttaaacgttctaacagcgtcacggccgccgtccaagctgacctggagctggaggggttcccaggccacatcaccacggaggacaaaggccttcagttcggctcatccttccagcggcactccgagcccagcacccccacccagtacagcgcggtgagaactgtacggacccaggggctcttcagctatagagaagactatcggacccaagtggacacctccaccctgccccctccagacccctggctggagcccgccatcgacacggtagagactgggaggatgtctccgtgccgcagggatggctcgtggtttttgaagctgctgcacgcagagacaaagaggatggaaggctggtgcaaagagatggagagagaggcggaggagaacgacctctcggaggaaattctcggtaaaatcaggagtgctgttgggagtgcccagcttctcatgtcccagaaattccagcagttttattggctttgccaacagaatatggaccccagcgccatgccgaggccgacgtcgcaggacctggccggctactgggacatgctgcagctctccattgaggacgtcagcatgaagttcgacgagctgcagcggctgcggctcaacgactggaagatgatggagtccccggaaagaaaggaagaaagaaaggtcccgcctccaataccaaagaagcctcccaaggggaagtttcccatcacaagagaaaaatccctggacctgcccgacagacaacgccaggaagcccggaggcgcctcatggccgccaagcgagcggcgtccttccggcagaattccgcctccgagcgcgcggacagcatcgagatctacatccccgaggcccagacccggctctgagggcggaggccggcgccttcccctcgtcgcttccgctttcccggacgcttgtgcagcgcggcgccgccctggtggtttctgtctcctcctcccgctgaacacgtcctcgctcccgcgctccccgcgccccggacacagcgggacgcggccggcggcctcagagtccacggagctcgcggcgaggacgacttctgcttttgttgttgttgttgttgttcacgggtggcctggctcacacttggctctgagggacaggtgtggcgagacctgatttctcctgcgtgttctcagaggacggcgagaaatgcctctggagctggaacccagcttacattttgttatttctatttttataaattgtgtgataattagaggtaagaataacaagtaactataaacgggtgcatcccaccactccctggaggcattagacacccaagtggaaggtgctacaacctgaagcgcaggaaagaaaggcccattcccctcgcacagccgagcttttactccctgagcacgggccgctccgctcccctgctcctgtctgtctcggacagaaaacacgaggctccttgtgtcaagcttcctgtgatggaaagcgacctctccaaccaccacactccccgccgtacagttctccagaatcccaggcgatgacaagtctgaacccacgaaaatacccagcgcagcatctacacattcaaaagataagctgagtgttcccaccaggaagtcacgcgcagagaggagagtcttacggagggctgggagcttaaaaggaaaacaatgtccttacttgtaaacagttattgtattttttatttctttctaacttaaaatacgacacccagtattttctttaagtttcaccatttacgctacatgtgatttttttaatgtatgtatatatatatattctcaaattgctctatcagctgacttttcagggtatccttaaaaaaaaacacacacgaaaaacaaaagtttgcttgtttaaaatgacagttgtgatgtaaaaagtttaagaaatatgaatgtgagtggtaagtatatctcagtttaaatggtaaagaagaaatgtagtttacatttgtatttttccagaattcttttgtcctatgcagtattgctaaagtcgagaatatattccttgcctgtgttagacatgaagggaaaaagaggtcacatattgtgatttccagctgtagcattcaaaaaaaaaattggtgttcatgactctgtggtcggtgccagaggaaaataggaacgactctaattaataggctttctgtgtatataattaaatttagctgctgcaaccattgttctgacacgacttctgtttcacagttcagaccggtcttcaaaggaaaagcctgtccgatttttccatgggttccagtttcagagttctcattattactcaaagtaaaagcggactgcgatttaagatgtttccaccccaatacctggtcttccttcccggcttaaggagtaccatgtacttagccacaggcagaatagctttcgatgaccccatagcactttgtttcttcgccttgatttgcactttacaatgtccccagcccctctgcagcccgtggctggcagggcgttcgatgtgcggttggcccccagcgcgccctccagagctgcggtgtctccctgcctcattccccacatcccactgagcatgggaccattgggagcagagctgatattaaagcatgtttagcttcgaagttttacttttttaaagctgagtagttaagaattccctgtaaaaacaaaaccctgtaaattgagcctcatgtctggtatatattttaccaaacagccttaaaatatatttggaagcaaaaatcagtacgaatgtatctccttgaaaaatgcaaaaaaaaaaaaatccctgaaatattcttctataaatgaatcctatttccccagagtgttcaaggcatttttctacctaaatgaatacctaaatcttgagtagtgtacggtaatgacgcttcttcctatatccactcttattatgttaaaacaaatgtatttgcgagtattggcattttagactttaaaaatgctgtatgatttcagatgaactctgctgtttagaagtaaccacagaaaagcaaagtcagtgtacactctgagtgaaaggaaatgtaatgtggataaaggcccgccacctcctcacattggtctatctactggcagctgatacgtttaactcatttccttgagcttatacaaaacatagaaaagcaaactgttaaagtagtcaataattatttgtctcagatcccagattctatgatccctgcttaaaagaaaatgttcactgcatgtaggttgatttcttatgttttgtagactcattgttatttttcaatccccaaaagtcttggcctaaaccatccctaggggagcagattaacctaccactacattgcacagggttggtgactcgacgtggtgaatgtgcacacgccctgcctggtccgccatgttccaaagaagatgatttaatggtagaacggatacctgctgctagacctgatggaatgttacctgtccgtgttacataatcaagtgcaatatactcagttctcatgcaggtgacattctaccatgaaacgcagaagataagccatgtttctgtattgtacatgtaaagaaaaataaaactgtttatgatacttgtgttagtcactcgagctagcttatttcagccacttctagcagatcatgccatggagctcacgacgtgtgaccatttcgtcatatttaaaatataacttcaagaaaagagtaaacatccattggagaacacggctgaaaattattgtgctgttctaggaacatcatcctagagagtgtgatgttcactataaccccatacctacattccctaatgatacagccaatgacaggtgaaacccagacactctccttagagccgacaggttgatcctgctgtgttgaaggctgtggttaataaaacacaagtatgataaacaggacctagcgtttagcccgggaaaggagaatgctgcttgtcacctagagtgctttccttgtgatgcgtctctcgcatcttcacgtgttgttgtgtttgaagtaaaactagttgttatcgatgacaatttttaccatagttttctcagcaaatttatatcaccatcttagaatggtatataaaaaaattgaactgtttatgataccaaaaaaattacagttttgtttaaaaggaaatgttgatgttttcaactccaaatcaattctaaaaacttcaagcacttaatggaaaggtaaatggtcagataaaaatataattacctgtaaggttatctggttttaaaagaaaaaaaaaaagcctacaaactcagtgacctactacgcagagggaatttttccctgctgcttcttatgaaagtggccaggtttattattagaagacacagtggcagagcacacatgtgcacaggttctgattatttctcttggagcatatgtccttgtcttgatttttgccttttcgatgccatattaagcagccaccgtttccacccctttcattagaaggccctgcatccgtaaattcgcgcatctctgtttttgttagatccttgtaagcatcgctacccgagtccaggatggaatttcacaggaaagtgaagggatactgcaggcctgtgtttgcagcgcctgtggtaactgtggaatgagctctgttagggacagttgtctggtttgtgccaaaccttcgaggggcgagtagggagtgggggaggtgggtccaagtctccctcaggaaggccttttctatcggcagcaattccatcaagccaagcctcctgtggtcctgagcatgaaggggccaggggacctcctgggagatgcagcttttgtttccgctgcgtttcatcagtcagccttgcttggaattctggcaggttccccggggtgtttcagtggacaggaggcccccgtgccgtggctgagtcagcctgggtaccccagtcaccagcagggccacccttgatgacagggccccccacgaacctgggaaaggcagcgggaaatgtgtgagagggtgtgcgctggtacggacataaaagcattgtccaaaacagcgctggttcggggagggcccctggatactgcctttggcccacactgaaaactgaaattgccccacctgtgagcacagaaacacgcttctccaacacgggccgaaataactaaactccacatggttcctgcctgctcatttcccagccctcttcttctcaagcctgaacttcatttttttttttagctgcaaatttaacaggctaatttaaaactgcagttttcagacgacagcccctgggaatgttccagggttctcttgttttgatctgcatgtctgtttacacttctctgtaggcgtgggttgaatacaagtttccaaaactttaaaatagaaaaccacgagcttaagaggtgaaaaagatgacccctttctgattaggatctgtaactctgtgggctgggtcaatgcagtgtgcttcattcagggccatgtggcagccatgacacacaccacataaggtcagctcagagcccatggcttccctgcaggagccccatcttgtcgctattagttgggagttgcaatacattgttggccataaacaaagtgctaaaggaaagggtttgcttctacacattcggctgaatgtcccccagtgcagggtggcagcagaatgttctggaaatgaaggagatattgctaggaatctctaggctgttaggcaacctggcttttattcatcctcagccggcaactcatctcaagtttatgtctcagtttttttcctctagaaaggggattacagttcctgtccctgtcttcctccaggacacactgtgaggattaatgacatattggctctaaagtcctttgagctcctgggaacaggtggtgaaagtgtgcgttactgctaaggattagtccctggcctcttctagaatgccgccctcccagctctgcagggcacgctgccagaatccaggctggtcgtaaacatctcagagataatcagggaccaccagaggcagaggccatgagactgtctttggaaaggtttggaaatgcagaaataactacaagggccattctccttagcttctggctttcaactgtttctagatgcttccaagaacaagaacccagcaccaaccagaattaggccacgttttcaccattacttaagctcaatcgcctcttagatgaaatgaggagataaactaaacattaaaatgatgaaggaaaaaaaattatttggaagccgaaaaccgcatgggtggggaaacatcaggaacgaaatcagacacactgactcaaaccacgcaagggtttgagaagcccacccctctaattccaggcgtttgtaatttttctacttcgcacttgagagaaggcagaggtggtccgtgggaaagctccgggaaacagccgtctttcatccttgccacattgaaaaatgtccacaattttatgaattgctgtcctaaccctggcgtttttatccagtgttaaaataaattatttcaagtttcaatgtaaacacttaacagatgacttctttgcagaagaaatgttcgttacctactatcaaactactttttaacagattttgtatatacacacacaagttgacagaggtttacctccctactttcttagattttatgtaactcttttcattggtgcttattcagaacctgaaagccttgggcatccaagctttcacctactcaatggaggagaggtgataatgaatgaaaagattgacaccaggtttcttggacaaatttaagttcaaatttatctctttcaagtagaccatggtctccctagagagtgtgttggcttgtgtctgccagtacgacaaaggacgctcccagcttgatcgtggtaccttatggaagccactcacgcattctctgatttacccccaaaacactaccatgccccagccccactcatttaaataatacaatcatatcactttcaaagggctcagcacgaatgttcccctcactccactttttaactcgtttgctgaactcgacaaggcttccccttacgagcagtgagacctaggctactttcgaacgcttccttccgaacggtaagccacttcgctctcgggcaggacaggtcctccctgcagagagagacaactcatcccccgaccttccatactacagaccaaaatacccaggtgtggcctaaggactatattaaatgcctcctatagaaattcaaggaatgttagaaccaggaaactagctgtttaaagttttaaagaagtatataaatatatatataaatataaatatgaaatcatatcgagtgtgaggatgagcagagtgccaaatattcagcatctgtacaaagtcattcactggaattcaactattttatgtcattctctttctcacgcttttatggttcttttgataaattctatttagtagcatgcaggatacctaatctgaatgtgcaatatgctattcatcaccacgacaatttcttacttcctcttaataacttaccagaatgttggtcattcctttaaggcagttaaggattgctttatttgtgttcttttttcccatgactttttttcactctcagctgactgtaagaaactgtgcaccgtttccgccataaccgtcctgtgacgatgcctccatttgacttctgtatcgctgatgttcacctcctgtaaatagtttggcaattaaattttttgagaaaagtaatgtttacttttttattggagtgaattctcgtgttattttaatctcagaaaaattatatagaccaaagagttttatccgaaaaaaaattacactcttcctccattatatatttcattgttgaaatatcctcaatttctctatattttaagaagtaatggacatttattaaggttacagatttaatatgtatgcaaaatggtatagattaaatgagtttttaattaataaatcctacagtatttagtt

SEQ ID NO: 5663 - DNA, 3515 bp, Homo sapiens
  source 1..3515: mol_type = unassigned DNA
cgcccacgcagcacttcaatgaggagcgctactcgcccgcgcccaggagcatgaagggcctttccggaagtcggacccagccgccgctgtgttccgggcacacgtgtggtctggcgcccccggaggactgcgagcacctgcaccacgggcccgacgcgcggccgccctacctgctgagccccgccgacagctgccccggggggcgccaccgctgctcgccgcgcagctcggtgcactcggagtgcgtgatgatgccggtggtgctgggcgaccacgtgtccagcagcaccttcccgcggatgcactacagctcgcactacgacacgcgcgacgactgcgctgtggcccacgcgggcgccaagatcaaccgcatcccggccaacctgctggaccagttcgagaagcagctgccgctgcaccgggacggcttccacacgctgcagtaccagaggacgtccgcggccgccgagcagcgcagcgagagccccgggcggatccgccacctggtacactccgtgcagaagctcttcaccaagtcgcactcgctggagggctcctccaaaagcaacgccaacggcaccaaggcggacggccgggcggacgaccaccaccacgcccaccacgccaagcacagcaagaggagcaagagcaaggagcgcaagccggagggcaagccccggcccggcatgagcagctggtggagctcggacgacaacctggacagcgacagcacctatcggacgcccagcgtgctcaaccggcaccacctgggccccgtggcccactgctaccccgacgcgctgcagagccccttcggggacctgtccctcaagacctccaagagcaacaacgacgtcaagtgctcggcctgtgaggggttggcgctgacgcccgacgccaagtacctgaagcgcagctcctggtctacgctgacggtcagccaggccaaggaggcctaccgcaagagctcgctgaacctggacaagccgctgctgcaccaggacgccaagcccgccctgaggccgtgccactacctccaggtacctcaggatgagtggggagggtaccccaccggtggcaaagatgaggagattccctgcaggagaatgagaagtgggagttacattaaagccatgggggacgaggagagcggagagtcagactccagccccaagacatcaccaaagtcggcaatcctacaagagccgctgctgaagtccatcggacagagaccgcttggagagcaccagacccagacctacctgcaagctgcaagcgatgtgcctgtgggacacagcctggaccccgctgcgaactacaactccccgaaattccgctcccggaaccagagctacatgagggccgtcagcaccctgagccaggccagctgcgtgagccaggtgagcgaggcggagatcaatgggcaattcgagtccgtgtgcgagtccgtcttcagtgaagttgaatctcaggccatggatgccctcgacctcccgggatgtttccgaacaaggagtcacagctaccttcgagccattcaagccggctactcccaagatgacgaatgtattcccatgatgacaccctctgacatcacctccaccatcaggtcaacagcagctgtctcatatacaaattacaagaaaacgcccccaccggtgccccctcggaccacctccaagcctctgatctcggtgacggcgcagagcagcaccgaatccacccaggacgcctaccaggacagccgcgcacagaggatgtccccgtggccccaggacagccgcggcctctacaactccacggacagcctggacagcaacaaggccatgaacctcgcgctggagacggccgctgcccagcgccacctgccagagagccagagcagctctgtgcggaccagcgacaaggccatcctggtgtccaaggcggaggagctcctcaagagccgctgctcctccatcgggattcaggtggaaacggccacagattctgacacggagagccgcggtctgcgggaataccactctgtcggggtgcaagtggaagatgagaagcgacacggacgttttaaacgttctaacagcgtcacggccgccgtccaagctgacctggagctggaggggttcccaggccacatcaccacggaggacaaaggccttcagttcggctcatccttccagcggcactccgagcccagcacccccacccagtacagcgcggtgagaactgtacggacccaggggctcttcagctatagagaagactatcggacccaagtggacacctccaccctgccccctccagacccctggctggagcccgccatcgacacggtagagactgggaggatgtctccgtgccgcagggatggctcgtggtttttgaagctgctgcacgcagagacaaagaggatggaaggctggtgcaaagagatggagagagaggcggaggagaacgacctctcggaggaaattctcggtaaaatcaggagtgctgttgggagtgcccagcttctcatgtcccagaaattccagcagttttattggctttgccaacagaatatggaccccagcgccatgccgaggccgacgtcgcaggacctggccggctactgggacatgctgcagctctccattgaggacgtcagcatgaagttcgacgagctgcagcggctgcggctcaacgactggaagatgatggagtccccggaaagaaaggaagaaagaaaggtcccgcctccaataccaaagaagcctcccaaggggaagtttcccatcacaagagaaaaatccctggacctgcccgacagacaacgccaggaagcccggaggcgcctcatggccgccaagcgagcggcgtccttccggcagaattccgcctccgagcgcgcggacagcatcgagatctacatccccgaggcccagacccggctctgagggcggaggccggcgccttcccctcgtcgcttccgctttcccggacgcttgtgcagcgcggcgccgccctggtggtttctgtctcctcctcccgctgaacacgtcctcgctcccgcgctccccgcgccccggacacagcgggacgcggccggcggcctcagagtccacggagctcgcggcgaggacgacttctgcttttgttgttgttgttgttgttcacgggtggcctggctcacacttggctctgagggacaggtgtggcgagacctgatttctcctgcgtgttctcagaggacggcgagaaatgcctctggagctggaacccagcttacattttgttatttctatttttataaattgtgtgataattagaggtaagaataacaagtaactataaacgggtgcatcccaccactccctggaggcattagacacccaagtggaaggtgctacaacctgaagcgcaggaaagaaaggcccattcccctcgcacagccgagcttttactccctgagcacgggccgctccgctcccctgctcctgtctgtctcggacagaaaacacgaggctccttgtgtc

SEQ ID NO: 5664 - DNA, 456 bp, Homo sapiens
  source 1..456: mol_type = unassigned DNA
tactctccagggctgtcacgtggaaacccctttatcgatgagccctcctcacatctccacccgcgggctctctgaccatgtgtccatgtcgcactcaacacccttgataaatcagcgctgtgaaacactgccaggaaaggcatcatcagaagcaagtgtttaaacggacctcatccctgccaagctgtctcatatacaaattacaagaaaacgcccccaccggtgccccctcggaccacctccaagcctctgatctcggtgacggcgcagagcagcaccgaatccacccaggacgcctaccaggacagccgcgcacagaggatgtccccgtggccccaggacagccgcggcctctacaactccacggacagcctggacagcaacaaggccatgaacctcgcgctggagacggccgctgcccagcgccacctgccagagagccagagcagctctgtg

SEQ ID NO: 5665 - DNA, 632 bp, Homo sapiens
  source 1..632: mol_type = unassigned DNA
aaacggccacagattctgacacggagagccgcggtctgcgggaataccactctgtcggggtgcaagtggaagatgagaagcgacacggacgttttaaacgttctaacagcgtcacggccgccgtccaagctgacctggagctggaggggttcccaggccacatcaccacggaggacaaaggccttcagttcggctcatccttccagcggcactccgagcccagcacccccacccagtacagcgcggtgagaactgtacggacccaggggctcttcagctatagagaagactatcggacccaagtggacacctccaccctgccccctccagacccctggctggagcccgccatcgacacggtagagactgggaggatgtctccgtgccgcagggatggctcgtggtttttgaagctgctgcacgcagagacaaagaggatggaaggctggtgcaaagagatggagagagaggcggaggagaacgacctctcggaggaaagtaagagctcaggcttccctagggcctcttaaatatcatttctcagtaatgcaaatatgcacatcacagcattagtggagaaaagttcctccctttggtattcaagtgaatgaaaataaatgtgctttctagta

SEQ ID NO: 5666 - DNA, 709 bp, Homo sapiens
  source 1..709: mol_type = unassigned DNA
cggaggacaaaggccttcagttcggctcatccttccagcggcactccgagcccagcacccccacccagtacagcgcggtgagaactgtacggacccaggggctcttcagctatagagaagactatcggacccaagtggacacctccaccctgccccctccagacccctggctggagcccgccatcgacacggtagagactgggaggatgtctccgtgccgcagggatggctcgtggtttttgaagctgctgcacgcagagacaaagaggatggaaggctggtgcaaagagatggagagagaggcggaggagaacgacctctcggaggaaaaattgttaccagctcatgctttacaaaaaaatgccttggcattatgccaaagagaagtcgatggaggtgacattggacgccgaatgttggggagatgctgccttccacgtgacccacagtccccgcagcacggctgcatggggctggtgcaagtcagcacagccgtgttccgatcgttcacatggcgtttgcatttctcatggctggctggtaaatcagatccaaggaagagcagcctgtcttgaagtggatttgtgaacggcacaaggccccggtgttaagatgcccgacagacaaccttccatccttcttttcaagacagaaacaatgccaaagtgttatccgagttacttgcttttattaaaagttatgctttttt

SEQ ID NO: 5667 - DNA, 621 bp, Homo sapiens
  source 1..621: mol_type = unassigned DNA
agcgcggtgagaactgtacggacccaggggctcttcagctatagagaagactatcggacccaagtggacacctccaccctgccccctccagacccctggctggagcccgccatcgacacggtagagactgggaggatgtctccgtgccgcagggatggctcgtggtttttgaagctgctgcacgcagagacaaagaggatggaaggctggtgcaaagagatggagagagaggcggaggagaacgacctctcggaggaaaaattgttaccagctcatgctttacaaaaaaatgccttggcattatgccaaagagaagtcgatggaggtgacattggacgccgaatgttggggagatgctgccttccacgtgacccacagtccccgcagcacggctgcatggggctggtgcaagtcagcacagccgtgttccgatcgttcacatggcgtttgcatttctcatggttagggtacatttaacagagtaacttcacaattttgatatctaaaaatcactcattttctgcagcatcttccacccttgttagtatatgcctcaacttggccaaattgtcttaattataaaagggatttataatctttagcacaaagataaaacacaga

SEQ ID NO: 5668 - DNA, 10088 bp, Homo sapiens
  source 1..10088: mol_type = unassigned DNA
aggaagaagctggagacttggtccagccgggcatcagctttccggggccggcagaggaggatctagacccgcagtactcatggtcgcccacgcagcacttcaatgaggagcgctactcgcccgcgcccaggagcatgaagggcctttccggaagtcggacccagccgccgctgtgttccgggcacacgtgtggtctggcgcccccggaggactgcgagcacctgcaccacgggcccgacgcgcggccgccctacctgctgagccccgccgacagctgccccggggggcgccaccgctgctcgccgcgcagctcggtgcactcggagtgcgtgatgatgccggtggtgctgggcgaccacgtgtccagcagcaccttcccgcggatgcactacagctcgcactacgacacgcgcgacgactgcgctgtggcccacgcgggcgccaagatcaaccgcatcccggccaacctgctggaccagttcgagaagcagctgccgctgcaccgggacggcttccacacgctgcagtaccagaggacgtccgcggccgccgagcagcgcagcgagagccccgggcggatccgccacctggtacactccgtgcagaagctcttcaccaagtcgcactcgctggagggctcctccaaaagcaacgccaacggcaccaaggcggacggccgggcggacgaccaccaccacgcccaccacgccaagcacagcaagaggagcaagagcaaggagcgcaagccggagggcaagccccggcccggcatgagcagctggtggagctcggacgacaacctggacagcgacagcacctatcggacgcccagcgtgctcaaccggcaccacctgggccccgtggcccactgctaccccgacgcgctgcagagccccttcggggacctgtccctcaagacctccaagagcaacaacgacgtcaagtgctcggcctgtgaggggttggcgctgacgcccgacgccaagtacctgaagcgcagctcctggtctacgctgacggtcagccaggccaaggaggcctaccgcaagagctcgctgaacctggacaagccgctgctgcaccaggacgccaagcccgccctgaggccgtgccactacctccaggtacctcaggatgagtggggagggtaccccaccggtggcaaagatgaggagattccctgcaggagaatgagaagtgggagttacattaaagccatgggggacgaggagagcggagagtcagactccagccccaagacatcaccaaagtcggcaatcctacaagagccgctgctgaagtccatcggacagagaccgcttggagagcaccagacccagacctacctgcaagctgcaagcgatgtgcctgtgggacacagcctggaccccgctgcgaactacaactccccgaaattccgctcccggaaccagagctacatgagggccgtcagcaccctgagccaggccagctgcgtgagccaggtgagcgaggcggagatcaatgggcaattcgagtccgtgtgcgagtccgtcttcagtgaagttgaatctcaggccatggatgccctcgacctcccgggatgtttccgaacaaggagtcacagctaccttcgagccattcaagccggctactcccaagatgacgaatgtattcccatgatgacaccctctgacatcacctccaccatcaggtcaacagcagctgtctcatatacaaattacaagaaaacgcccccaccggtgccccctcggaccacctccaagcctctgatctcggtgacggcgcagagcagcaccgaatccacccaggacgcctaccaggacagccgcgcacagaggatgtccccgtggccccaggacagccgcggcctctacaactccacggacagcctggacagcaacaaggccatgaacctcgcgctggagacggccgctgcccagcgccacctgccagagagccagagcagctctgtgcggaccagcgacaaggccatcctggtgtccaaggcggaggagctcctcaagagccgctgctcctccatcgggattcaggtggaaacggccacagattctgacacggagagccgcggtctgcgggaataccactctgtcggggtgcaagtggaagatgagaagcgacacggacgttttaaacgttctaacagcgtcacggccgccgtccaagctgacctggagctggaggggttcccaggccacatcaccacggaggacaaaggccttcagttcggctcatccttccagcggcactccgagcccagcacccccacccagtacagcgcggtgagaactgtacggacccaggggctcttcagctatagagaagactatcggacccaagtggacacctccaccctgccccctccagacccctggctggagcccgccatcgacacggtagagactgggaggatgtctccgtgccgcagggatggctcgtggtttttgaagctgctgcacgcagagacaaagaggatggaaggctggtgcaaagagatggagagagaggcggaggagaacgacctctcggaggaaattctcggtaaaatcaggagtgctgttgggagtgcccagcttctcatgtcccagaaattccagcagttttattggctttgccaacagaatatggaccccagcgccatgccgaggccgacgtcgcaggacctggccggctactgggacatgctgcagctctccattgaggacgtcagcatgaagttcgacgagctgcagcggctgcggctcaacgactggaagatgatggagtccccggaaagaaaggaagaaagaaaggtcccgcctccaataccaaagaagcctcccaaggggaagtttcccatcacaagagaaaaatccctggacctgcccgacagacaacgccaggaagcccggaggcgcctcatggccgccaagcgagcggcgtccttccggcagaattccgcctccgagcgcgcggacagcatcgagatctacatccccgaggcccagacccggctctgagggcggaggccggcgccttcccctcgtcgcttccgctttcccggacgcttgtgcagcgcggcgccgccctggtggtttctgtctcctcctcccgctgaacacgtcctcgctcccgcgctccccgcgccccggacacagcgggacgcggccggcggcctcagagtccacggagctcgcggcgaggacgacttctgcttttgttgttgttgttgttgttcacgggtggcctggctcacacttggctctgagggacaggtgtggcgagacctgatttctcctgcgtgttctcagaggacggcgagaaatgcctctggagctggaacccagcttacattttgttatttctatttttataaattgtgtgataattagaggtaagaataacaagtaactataaacgggtgcatcccaccactccctggaggcattagacacccaagtggaaggtgctacaacctgaagcgcaggaaagaaaggcccattcccctcgcacagccgagcttttactccctgagcacgggccgctccgctcccctgctcctgtctgtctcggacagaaaacacgaggctccttgtgtcaagcttcctgtgatggaaagcgacctctccaaccaccacactccccgccgtacagttctccagaatcccaggcgatgacaagtctgaacccacgaaaatacccagcgcagcatctacacattcaaaagataagctgagtgttcccaccaggaagtcacgcgcagagaggagagtcttacggagggctgggagcttaaaaggaaaacaatgtccttacttgtaaacagttattgtattttttatttctttctaacttaaaatacgacacccagtattttctttaagtttcaccatttacgctacatgtgatttttttaatgtatgtatatatatatattctcaaattgctctatcagctgacttttcagggtatccttaaaaaaaaacacacacgaaaaacaaaagtttgcttgtttaaaatgacagttgtgatgtaaaaagtttaagaaatatgaatgtgagtggtaagtatatctcagtttaaatggtaaagaagaaatgtagtttacatttgtatttttccagaattcttttgtcctatgcagtattgctaaagtcgagaatatattccttgcctgtgttagacatgaagggaaaaagaggtcacatattgtgatttccagctgtagcattcaaaaaaaaaattggtgttcatgactctgtggtcggtgccagaggaaaataggaacgactctaattaataggctttctgtgtatataattaaatttagctgctgcaaccattgttctgacacgacttctgtttcacagttcagaccggtcttcaaaggaaaagcctgtccgatttttccatgggttccagtttcagagttctcattattactcaaagtaaaagcggactgcgatttaagatgtttccaccccaatacctggtcttccttcccggcttaaggagtaccatgtacttagccacaggcagaatagctttcgatgaccccatagcactttgtttcttcgccttgatttgcactttacaatgtccccagcccctctgcagcccgtggctggcagggcgttcgatgtgcggttggcccccagcgcgccctccagagctgcggtgtctccctgcctcattccccacatcccactgagcatgggaccattgggagcagagctgatattaaagcatgtttagcttcgaagttttacttttttaaagctgagtagttaagaattccctgtaaaaacaaaaccctgtaaattgagcctcatgtctggtatatattttaccaaacagccttaaaatatatttggaagcaaaaatcagtacgaatgtatctccttgaaaaatgcaaaaaaaaaaaaatccctgaaatattcttctataaatgaatcctatttccccagagtgttcaaggcatttttctacctaaatgaatacctaaatcttgagtagtgtacggtaatgacgcttcttcctatatccactcttattatgttaaaacaaatgtatttgcgagtattggcattttagactttaaaaatgctgtatgatttcagatgaactctgctgtttagaagtaaccacagaaaagcaaagtcagtgtacactctgagtgaaaggaaatgtaatgtggataaaggcccgccacctcctcacattggtctatctactggcagctgatacgtttaactcatttccttgagcttatacaaaacatagaaaagcaaactgttaaagtagtcaataattatttgtctcagatcccagattctatgatccctgcttaaaagaaaatgttcactgcatgtaggttgatttcttatgttttgtagactcattgttatttttcaatccccaaaagtcttggcctaaaccatccctaggggagcagattaacctaccactacattgcacagggttggtgactcgacgtggtgaatgtgcacacgccctgcctggtccgccatgttccaaagaagatgatttaatggtagaacggatacctgctgctagacctgatggaatgttacctgtccgtgttacataatcaagtgcaatatactcagttctcatgcaggtgacattctaccatgaaacgcagaagataagccatgtttctgtattgtacatgtaaagaaaaataaaactgtttatgatacttgtgttagtcactcgagctagcttatttcagccacttctagcagatcatgccatggagctcacgacgtgtgaccatttcgtcatatttaaaatataacttcaagaaaagagtaaacatccattggagaacacggctgaaaattattgtgctgttctaggaacatcatcctagagagtgtgatgttcactataaccccatacctacattccctaatgatacagccaatgacaggtgaaacccagacactctccttagagccgacaggttgatcctgctgtgttgaaggctgtggttaataaaacacaagtatgataaacaggacctagcgtttagcccgggaaaggagaatgctgcttgtcacctagagtgctttccttgtgatgcgtctctcgcatcttcacgtgttgttgtgtttgaagtaaaactagttgttatcgatgacaatttttaccatagttttctcagcaaatttatatcaccatcttagaatggtatataaaaaaattgaactgtttatgataccaaaaaaattacagttttgtttaaaaggaaatgttgatgttttcaactccaaatcaattctaaaaacttcaagcacttaatggaaaggtaaatggtcagataaaaatataattacctgtaaggttatctggttttaaaagaaaaaaaaaaagcctacaaactcagtgacctactacgcagagggaatttttccctgctgcttcttatgaaagtggccaggtttattattagaagacacagtggcagagcacacatgtgcacaggttctgattatttctcttggagcatatgtccttgtcttgatttttgccttttcgatgccatattaagcagccaccgtttccacccctttcattagaaggccctgcatccgtaaattcgcgcatctctgtttttgttagatccttgtaagcatcgctacccgagtccaggatggaatttcacaggaaagtgaagggatactgcaggcctgtgtttgcagcgcctgtggtaactgtggaatgagctctgttagggacagttgtctggtttgtgccaaaccttcgaggggcgagtagggagtgggggaggtgggtccaagtctccctcaggaaggccttttctatcggcagcaattccatcaagccaagcctcctgtggtcctgagcatgaaggggccaggggacctcctgggagatgcagcttttgtttccgctgcgtttcatcagtcagccttgcttggaattctggcaggttccccggggtgtttcagtggacaggaggcccccgtgccgtggctgagtcagcctgggtaccccagtcaccagcagggccacccttgatgacagggccccccacgaacctgggaaaggcagcgggaaatgtgtgagagggtgtgcgctggtacggacataaaagcattgtccaaaacagcgctggttcggggagggcccctggatactgcctttggcccacactgaaaactgaaattgccccacctgtgagcacagaaacacgcttctccaacacgggccgaaataactaaactccacatggttcctgcctgctcatttcccagccctcttcttctcaagcctgaacttcatttttttttttagctgcaaatttaacaggctaatttaaaactgcagttttcagacgacagcccctgggaatgttccagggttctcttgttttgatctgcatgtctgtttacacttctctgtaggcgtgggttgaatacaagtttccaaaactttaaaatagaaaaccacgagcttaagaggtgaaaaagatgacccctttctgattaggatctgtaactctgtgggctgggtcaatgcagtgtgcttcattcagggccatgtggcagccatgacacacaccacataaggtcagctcagagcccatggcttccctgcaggagccccatcttgtcgctattagttgggagttgcaatacattgttggccataaacaaagtgctaaaggaaagggtttgcttctacacattcggctgaatgtcccccagtgcagggtggcagcagaatgttctggaaatgaaggagatattgctaggaatctctaggctgttaggcaacctggcttttattcatcctcagccggcaactcatctcaagtttatgtctcagtttttttcctctagaaaggggattacagttcctgtccctgtcttcctccaggacacactgtgaggattaatgacatattggctctaaagtcctttgagctcctgggaacaggtggtgaaagtgtgcgttactgctaaggattagtccctggcctcttctagaatgccgccctcccagctctgcagggcacgctgccagaatccaggctggtcgtaaacatctcagagataatcagggaccaccagaggcagaggccatgagactgtctttggaaaggtttggaaatgcagaaataactacaagggccattctccttagcttctggctttcaactgtttctagatgcttccaagaacaagaacccagcaccaaccagaattaggccacgttttcaccattacttaagctcaatcgcctcttagatgaaatgaggagataaactaaacattaaaatgatgaaggaaaaaaaattatttggaagccgaaaaccgcatgggtggggaaacatcaggaacgaaatcagacacactgactcaaaccacgcaagggtttgagaagcccacccctctaattccaggcgtttgtaatttttctacttcgcacttgagagaaggcagaggtggtccgtgggaaagctccgggaaacagccgtctttcatccttgccacattgaaaaatgtccacaattttatgaattgctgtcctaaccctggcgtttttatccagtgttaaaataaattatttcaagtttcaatgtaaacacttaacagatgacttctttgcagaagaaatgttcgttacctactatcaaactactttttaacagattttgtatatacacacacaagttgacagaggtttacctccctactttcttagattttatgtaactcttttcattggtgcttattcagaacctgaaagccttgggcatccaagctttcacctactcaatggaggagaggtgataatgaatgaaaagattgacaccaggtttcttggacaaatttaagttcaaatttatctctttcaagtagaccatggtctccctagagagtgtgttggcttgtgtctgccagtacgacaaaggacgctcccagcttgatcgtggtaccttatggaagccactcacgcattctctgatttacccccaaaacactaccatgccccagccccactcatttaaataatacaatcatatcactttcaaagggctcagcacgaatgttcccctcactccactttttaactcgtttgctgaactcgacaaggcttccccttacgagcagtgagacctaggctactttcgaacgcttccttccgaacggtaagccacttcgctctcgggcaggacaggtcctccctgcagagagagacaactcatcccccgaccttccatactacagaccaaaatacccaggtgtggcctaaggactatattaaatgcctcctatagaaattcaaggaatgttagaaccaggaaactagctgtttaaagttttaaagaagtatataaatatatatataaatataaatatgaaatcatatcgagtgtgaggatgagcagagtgccaaatattcagcatctgtacaaagtcattcactggaattcaactattttatgtcattctctttctcacgcttttatggttcttttgataaattctatttagtagcatgcaggatacctaatctgaatgtgcaatatgctattcatcaccacgacaatttcttacttcctcttaataacttaccagaatgttggtcattcctttaaggcagttaaggattgctttatttgtgttcttttttcccatgactttttttcactctcagctgactgtaagaaactgtgcaccgtttccgccataaccgtcctgtgacgatgcctccatttgacttctgtatcgctgatgttcacctcctgtaaatagtttggcaattaaattttttgagaaaagtaatgtttacttttttattggagtgaattctcgtgttattttaatctcagaaaaattatatagaccaaagagttttatccgaaaaaaaattacactcttcctccattatatatttcattgttgaaatatcctcaatttctctatattttaagaagtaatggacatttattaaggttacagatttaatatgtatgcaaaatggtatagattaaatgagtttttaattaataaatcctacagtatttagtt

SEQ ID NO: 5669 - DNA, 2263 bp, Homo sapiens
  source 1..2263: mol_type = unassigned DNA
ccagacctacctgcaagctgcaagcgatgtgcctgtgggacacagcctggaccccgctgcgaactacaactccccgaaattccgctcccggaaccagagctacatgagggccgtcagcaccctgagccaggccagctgcgtgagccaggtgagcgaggcggagatcaatgggcaattcgagtccgtgtgcgagtccgtcttcagtgaagttgaatctcaggccatggatgccctcgacctcccgggatgtttccgaacaaggagtcacagctaccttcgagccattcaagccggctactcccaagatgacgaatgtattcccatgatgacaccctctgacatcacctccaccatcaggtcaacagcagctgtctcatatacaaattacaagaaaacgcccccaccggtgccccctcggaccacctccaagcctctgatctcggtgacggcgcagagcagcaccgaatccacccaggacgcctaccaggacagccgcgcacagaggatgtccccatggccccaggacagccgcggcctctacaactccacggacagcctggacagcaacaaggccatgaacctcgcgctggaaacggccgctgcccagcgccacctgccagagagccagagcagctctgtgcggaccagcgacaaggccatcctggtgtccaaggcggaggagctcctcaagagccgctgctcctccatcgggattcaggtggaaacggccacagattctgacacggagagccgcggtctgcgggaataccactctgtcggggtgcaagtggaagatgagaagcgacacggacgttttaaacgttctaacagcgtcacggccgccgtccaagctgacctggagctggaggggttcccaggccacatcaccacggaggacaaaggccttcagttcggctcatccttccagcggcactccgagcccagcacccccacccagtacagcgcggtgagaactgtacggacccaggggctcttcagctatagagaagactatcggacccaagtggacacctccaccctgccccctccagacccctggctggagcccgccatcgacacggtagagactgggaggatgtctccgtgccgcagggatggctcgtggtttttgaagctgctgcacgcagagacaaagaggatggaaggctggtgcaaagagatggagagagaggcggaggagaacgacctctcggaggaaattctcggtaaaatcaggagtgctgttgggagtgcccagcttctcatgtcccagaaattccagcagttttattggctttgccaacagaatatggaccccagcgccatgccgaggccgacgtcgcaggacctggccggctactgggacatgctgcagctctccattgaggacgtcagcatgaagttcgacgagctgcagcggctgcggctcaacgactggaagatgatggagtccccggaaagaaaggaagaaagaaaggtcccgcctccaataccaaagaagcctcccaaggggaagtttcccatcacaagagaaaaatccctggacctgcccgacagacaacgccaggaagcccggaggcgcctcatggccgccaagcgagcggcgtccttccggcagaattccgcctccgagcgcgcggacagcatcgagatctacatccccgaggcccagacccggctctgagggcggaggccggcgccttcccctcgtcgcttccgctttcccggacgcttgtgcagcgcggcgccgccctggtggtttctgtctcctcctcccgctgaacacgtcctcgctcccgcgctccccgcgccccggacacagcgggacgcggccggcggcctcagagtccacggagctcgcggcgaggacgacttctgcttttgttgttgttgttgttgttcacgggtggcctggctcacacttggctctgagggacaggtgtggcgagacctgatttctcctgcgtgttctcagaggacggcgagaaatgcctctggagctggaacccagcttacattttgttatttctatttttataaattgtgtgataattagaggtaagaataacaagtaactataaacgggtgcatcccaccactccctggaggcattagacacccaagtggaaggtgctacaacctgaagcgcaggaaagaaaggcccattcccctcgcacagccgagcttttactccctgagcacgggccgctccgctcccctgctcctgtctgtctcggacagaaaacacgaggctccttgtgtc

SEQ ID NO: 5670 - DNA, 8796 bp, Homo sapiens
  source 1..8796: mol_type = unassigned DNA
ccagacctacctgcaagctgcaagcgatgtgcctgtgggacacagcctggaccccgctgcgaactacaactccccgaaattccgctcccggaaccagagctacatgagggccgtcagcaccctgagccaggccagctgcgtgagccaggtgagcgaggcggagatcaatgggcaattcgagtccgtgtgcgagtccgtcttcagtgaagttgaatctcaggccatggatgccctcgacctcccgggatgtttccgaacaaggagtcacagctaccttcgagccattcaagccggctactcccaagatgacgaatgtattcccatgatgacaccctctgacatcacctccaccatcaggtcaacagcagctgtctcatatacaaattacaagaaaacgcccccaccggtgccccctcggaccacctccaagcctctgatctcggtgacggcgcagagcagcaccgaatccacccaggacgcctaccaggacagccgcgcacagaggatgtccccatggccccaggacagccgcggcctctacaactccacggacagcctggacagcaacaaggccatgaacctcgcgctggaaacggccgctgcccagcgccacctgccagagagccagagcagctctgtgcggaccagcgacaaggccatcctggtgtccaaggcggaggagctcctcaagagccgctgctcctccatcgggattcaggattctgaattcccagagcatcagccatacccaaggtcagatgtggaaacggccacagattctgacacggagagccgcggtctgcgggaataccactctgtcggggtgcaagtggaagatgagaagcgacacggacgttttaaacgttctaacagcgtcacggccgccgtccaagctgacctggagctggaggggttcccaggccacatcaccacggaggacaaaggccttcagttcggctcatccttccagcggcactccgagcccagcacccccacccagtacagcgcggtgagaactgtacggacccaggggctcttcagctatagagaagactatcggacccaagtggacacctccaccctgccccctccagacccctggctggagcccgccatcgacacggtagagactgggaggatgtctccgtgccgcagggatggctcgtggtttttgaagctgctgcacgcagagacaaagaggatggaaggctggtgcaaagagatggagagagaggcggaggagaacgacctctcggaggaaattctcggtaaaatcaggagtgctgttgggagtgcccagcttctcatgtcccagaaattccagcagttttattggctttgccaacagaatatggaccccagcgccatgccgaggccgacgtcgcaggacctggccggctactgggacatgctgcagctctccattgaggacgtcagcatgaagttcgacgagctgcagcggctgcggctcaacgactggaagatgatggagtccccggaaagaaaggaagaaagaaaggtcccgcctccaataccaaagaagcctcccaaggggaagtttcccatcacaagagaaaaatccctggacctgcccgacagacaacgccaggaagcccggaggcgcctcatggccgccaagcgagcggcgtccttccggcagaattccgcctccgagcgcgcggacagcatcgagatctacatccccgaggcccagacccggctctgagggcggaggccggcgccttcccctcgtcgcttccgctttcccggacgcttgtgcagcgcggcgccgccctggtggtttctgtctcctcctcccgctgaacacgtcctcgctcccgcgctccccgcgccccggacacagcgggacgcggccggcggcctcagagtccacggagctcgcggcgaggacgacttctgcttttgttgttgttgttgttgttcacgggtggcctggctcacacttggctctgagggacaggtgtggcgagacctgatttctcctgcgtgttctcagaggacggcgagaaatgcctctggagctggaacccagcttacattttgttatttctatttttataaattgtgtgataattagaggtaagaataacaagtaactataaacgggtgcatcccaccactccctggaggcattagacacccaagtggaaggtgctacaacctgaagcgcaggaaagaaaggcccattcccctcgcacagccgagcttttactccctgagcacgggccgctccgctcccctgctcctgtctgtctcggacagaaaacacgaggctccttgtgtcaagcttcctgtgatggaaagcgacctctccaaccaccacactccccgccgtacagttctccagaatcccaggcgatgacaagtctgaacccacgaaaatacccagcgcagcatctacacattcaaaagataagctgagtgttcccaccaggaagtcacgcgcagagaggagagtcttacggagggctgggagcttaaaaggaaaacaatgtccttacttgtaaacagttattgtattttttatttctttctaacttaaaatacgacacccagtattttctttaagtttcaccatttacgctacatgtgatttttttaatgtatgtatatatatatattctcaaattgctctatcagctgacttttcagggtatccttaaaaaaaaacacacacgaaaaacaaaagtttgcttgtttaaaatgacagttgtgatgtaaaaagtttaagaaatatgaatgtgagtggtaagtatatctcagtttaaatggtaaagaagaaatgtagtttacatttgtatttttccagaattcttttgtcctatgcagtattgctaaagtcgagaatatattccttgcctgtgttagacatgaagggaaaaagaggtcacatattgtgatttccagctgtagcattcaaaaaaaaaattggtgttcatgactctgtggtcggtgccagaggaaaataggaacgactctaattaataggctttctgtgtatataattaaatttagctgctgcaaccattgttctgacacgacttctgtttcacagttcagaccggtcttcaaaggaaaagcctgtccgatttttccatgggttccagtttcagagttctcattattactcaaagtaaaagcggactgcgatttaagatgtttccaccccaatacctggtcttccttcccggcttaaggagtaccatgtacttagccacaggcagaatagctttcgatgaccccatagcactttgtttcttcaccttgatttgcactttacaatgtccccagcccctctgcagcccgtggctggcagggcgttcgatgtgcggttggcccccagcgcgccctccagagctgcggtgtctccctgcctcattccccacatcccactgagcatgggaccactgggagcagagctgatattaaagcatgtttagcttcgaagttttacttttttaaagctgagtagttaagaattccctgtaaaaacaaaaccctgtaaattgagcctcatgtctggtatatattttaccaaacagccttaaaatatatttggaagcaaaaatcagtacgaatgtatctccttgaaaaatgcaaaaaaaaaaaaatccctgaaatattcttctataaatgaatcctatttccccagagtgttcaaggcatttttctacctaaatgaatacctaaatcttgagtagtgtacggtaatgacgcttcttcctatatccactcttattatgttaaaacaaatgtatttgcgagtattggcattttagactttaaaaatgctgtatgatttcagatgaactctgctgtttagaagtaaccacagaaaagcaaagtcagtgtacactctgagtgaaaggaaatgtaatgtggataaaggcccgccacctcctcacattggtctatctactggcagctgatacgtttaactcatttccttgagcttatacaaaacatagaaaagcaaactgttaaagtagtcaataattatttgtctcagatcccagattctatgatccctgcttaaaagaaaatgttcactgcatgtaggttgatttcttatgttttgtagactcattgttatttttcaatccccaaaagtcttggcctaaaccatccctaggggagcagattaacctaccactacattgcacagggttggtgactcgacgtggtgaatgtgcacacgccctgcctggtccgccatgttccaaagaagatgatttaatggtagaacggatacctgctgctagacctgatggaatgttacctgtccgtgttacataatcaagtgcaatatactcagttctcatgcaggtgacattctaccatgaaacgcagaagataagccatgtttctgtattgtacatgtaaagaaaaataaaactgtttatgatacttgtgttagtcactcgagctagcttatttcagccacttctagcagatcatgccatggagctcacgacgtgtgaccatttcgtcatatttaaaatataacttcaagaaaagagtaaacatccattggagaacacggctgaaaattattgtgctgttctaggaacatcatcctagagagtgtgatgttcactataaccccatacctacattccctaatgatacagccaatgacaggtgaaacccagacactctccttagagccgacaggttgatcctgctgtgttgaaggctgtggttaataaaacacaagtatgataaacaggacctagcgtttagcccgggaaaggagaatgctgcttgtcacctagagtgctttccttgtgatgcgtctctcgcatcttcacgtgttgttgtgtttgaagtaaaactagttgttatcgatgacaatttttaccatagttttctcagcaaatttatatcaccatcttagaatggtatataaaaaaattgaactgtttatgataccaaaaaaattacagttttgtttaaaaggaaatgttgatgttttcaactccaaatcaattctaaaaacttcaagcacttaatggaaaggtaaatggtcagataaaaatataattacctgtaaggttatctggttttaaaagaaaaaaaaaaagcctacaaactcagtgacctactacgcagagggaatttttccctgctgcttcttatgaaagtggccaggtttattattagaagacacagtggcagagcacacatgtgcacaggttctgattatttctcttggagcatatgtccttgtcttgatttttgccttttcgatgccatattaagcagccaccgtttccacccctttcattagaaggccctgcatccgtaaattcgcgcatctctgtttttgttagatccttgtaagcatcgctacccgagtccaggatggaatttcacaggaaagtgaagggatactgcaggcctgtgtttgcagcgcctgtggtaactgtggaatgagctctgttagggacagttgtctggtttgtgccaaaccttcgaggggcgagtagggagtgggggaggtgggtccaagtctccctcaggaaggccttttctatcggcagcaattccatcaagccaagcctcctgtggtcctgagcatgaaggggccaggggacctcctgggagatgcagcttttgtttccgctgcgtttcatcagtcagccttgcttggaattctggcaggttccccggggtgtttcagtggacaggaggcccccgtgccgtggctgagtcagcctgggtaccccagtcaccagcagggccacccttgatgacagggccccccacgaacctgggaaaggcagcgggaaatgtgtgagagggtgtgcgctggtacggacataaaagcattgtccaaaacagcgctggttcggggagggcccctggatactgcctttggcccacactgaaaactgaaattgccccacctgtgagcacagaaacacgcttctccaacacgggccgaaataactaaactccacatggttcctgcctgctcatttcccagccctcttcttctcaagcctgaacttcatttttttttttagctgcaaatttaacaggctaatttaaaactgcagttttcagacgacagcccctgggaatgttccagggttctcttgttttgatctgcatgtctgtttacacttctctgtaggcgtgggttgaatacaagtttccaaaactttaaaatagaaaaccacgagcttaagaggtgaaaaagatgacccctttctgattaggatctgtaactctgtgggctgggtcaatgcagtgtgcttcattcagggccatgtggcagccatgacacacaccacataaggtcagctcagagcccatggcttccctgcaggagccccatcttgtcgctattagttgggagttgcaatacattgttggccataaacaaagtgctaaaggaaagggtttgcttctacacattcggctgaatgtcccccagtgcagggtggcagcagaatgttctggaaatgaaggagatattgctaggaatctctaggctgttaggcaacctggcttttattcatcctcagccggcaactcatctcaagtttatgtctcagtttttttcctctagaaaggggattacagttcctgtccctgtcttcctccaggacacactgtgaggattaatgacatattggctctaaagtcctttgagctcctgggaacaggtggtgaaagtgtgcgttactgctaaggattagtccctggcctcttctagaatgccgccctcccagctctgcagggcacgctgccagaatccaggctggtcgtaaacatctcagagataatcagggaccaccagaggcagaggccatgagactgtctttggaaaggtttggaaatgcagaaataactacaagggccattctccttagcttctggctttcaactgtttctagatgcttccaagaacaagaacccagcaccaaccagaattaggccacgttttcaccattacttaagctcaatcgcctcttagatgaaatgaggagataaactaaacattaaaatgatgaaggaaaaaaaattatttggaagccgaaaaccgcatgggtggggaaacatcaggaacgaaatcagacacactgactcaaaccacgcaagggtttgagaagcccacccctctaattccaggcgtttgtaatttctctacttcgcacttgagagaaggcagaggtggtccgtgggaaagctccgggaaacagccgtctttcatccttgccacattgaaaaatgtccacaattttatgaattgctgtcctaaccctggcgtttttatccagtgttaaaataaattatttcaagtttcaatgtaaacacttaacagatgacttctttgcagaagaaatgttcgttacctactatcaaactactttttaacagattttgtatatacacacacaagttgacagaggtttacctccctactttcttagattttatgtaactcttttcattggtgcttattcagaacctgaaagccttgggcatccaagctttcacctactcaatggaggagaggtgataatgaatgaaaagattgacaccaggtttcttggacaaatttaagttcaaatttatctctttcaagtagaccatggtctccctagagagtgtgttggcttgtgtctgccagtacgacaaaggacgctcccagcttgatcgtggtaccttatggaagccactcacgcattctctgatttacccccaaaacactaccatgccccagccccactcatttaaataatacaatcatatcactttcaaagggctcagcacgaatgttcccctcactccactttttaactcgtttgctgaactcgacaaggcttccccttacgagcagtgagacctaggctactttcgaacgcttccttccgaacggtaagccacttcgctctcgggcaggacaggtcctccctgcagagagagacaactcatcccccgaccttccatactacagaccaaaatacccaggtgtggcctaaggactatattaaatgcctcctatagaaattcaaggaatgttagaaccaggaaactagctgtttaaagttttaaagaagtatataaatatatatataaatataaatatgaaatcatatcgagtgtgaggatgagcagagtgccaaatattcagcatctgtacaaagtcattcactggaattcaactattttatgtcattctctttctcacgcttttatggttcttttgataaattctatttagtagcatgcaggatacctaatctgaatgtgcaatatgctattcatcaccacgacaatttcttacttcctcttaataacttaccagaatgttggtcattcctttaaggcagttaaggattgctttatttgtgttcttttttcccatgactttttttcactctcagctgactgtaagaaactgtgcaccgtttccgccataaccgtcctgtgacgatgcctccatttgacttctgtatcgctgatgttcacctcctgtaaatagtttggcaattaaattttttgagaaaagtaatgtttacttttttattggagtgaattctcgtgttattttaatctcagaaaaattatatagaccaaagagttttatccgaaaaaaaattacactcttcctccattatatatttcattgttgaaatatcctcaatttctctatattttaagaagtaatggacatttattaaggttacagatttaatatgtatgcaaaatggtatagattaaatgagtttttaattaataaatcctacagtatttagttaa

SEQ ID NO: 5671 - DNA, 456 bp, Homo sapiens
  source 1..456: mol_type = unassigned DNA
tactctccagggctgtcacgtggaaacccctttatcgatgagccctcctcacatctccacccgcgggctctctgaccatgtgtccatgtcgcactcaacacccttgataaatcagcgctgtgaaacactgccaggaaaggcgtcatcagaagcaagtgtttaaacggacctcatccctgccaagctgtctcatatacaaattacaagaaaacgcccccaccggtgccccctcggaccacctccaagcctctgatctcggtgacggcgcagagcagcaccgaatccacccaggacgcctaccaggacagccgcgcacagaggatgtccccatggccccaggacagccgcggcctctacaactccacggacagcctggacagcaacaaggccatgaacctcgcgctggaaacggccgctgcccagcgccacctgccagagagccagagcagctctgtg

SEQ ID NO: 5672 - DNA, 632 bp, Homo sapiens
  source 1..632: mol_type = unassigned DNA
aaacggccacagattctgacacggagagccgcggtctgcgggaataccactctgtcggggtgcaagtggaagatgagaagcgacacggacgttttaaacgttctaacagcgtcacggccgccgtccaagctgacctggagctggaggggttcccaggccacatcaccacggaggacaaaggccttcagttcggctcatccttccagcggcactccgagcccagcacccccacccagtacagcgcggtgagaactgtacggacccaggggctcttcagctatagagaagactatcggacccaagtggacacctccaccctgccccctccagacccctggctggagcccgccatcgacacggtagagactgggaggatgtctccgtgccgcagggatggctcgtggtttttgaagctgctgcacgcagagacaaagaggatggaaggctggtgcaaagagatggagagagaggcggaggagaacgacctctcggaggaaagtaagagctcaggcttccctagggcctcttaaatatcatttctcagtaatgcaaatatgcacatcacagcattagtggagaaaagttcctccctttggtattcaagtgaagggaaataaatgtgctttctagta

SEQ ID NO: 5673 - DNA, 709 bp, Homo sapiens
  source 1..709: mol_type = unassigned DNA
cggaggacaaaggccttcagttcggctcatccttccagcggcactccgagcccagcacccccacccagtacagcgcggtgagaactgtacggacccaggggctcttcagctatagagaagactatcggacccaagtggacacctccaccctgccccctccagacccctggctggagcccgccatcgacacggtagagactgggaggatgtctccgtgccgcagggatggctcgtggtttttgaagctgctgcacgcagagacaaagaggatggaaggctggtgcaaagagatggagagagaggcggaggagaacgacctctcggaggaaaaattgttaccagctcatgctttacaagaaaatgccttggcattatgccaaagagaagtcgatggaggtgacgatggacgccgaatgttggggagatgctgccttccacgtgacccacagtccccgcagcacggctgcatggggctggtgcaagtcagcacagccgtgttccgatcgttcacacggcgtttgcatttctcatggctggctggtaaatcagatccaaggaagagcagcctgtcttgaagtggatttgtgaacggcacaaggccccggtgttaagatgcccgacagacaaccttccatccttcttttcaagacagaaacaatgccaaagtgttatccgagttacttgcttttattaaaagttatgctttttt

SEQ ID NO: 5674 - DNA, 615 bp, Homo sapiens
  source 1..615: mol_type = unassigned DNA
agcgcggtgagaactgtacggacccaggggctcttcagctatagagaagactatcggacccaagtggacacctccaccctgccccctccagacccctggctggagcccgccatcgacacggtagagactgggaggatgtctccgtgccgcagggatggctcgtggtttttgaagctgctgcacgcagagacaaagaggatggaaggctggtgcaaagagatggagagagaggcggaggagaacgacctctcggaggaaaaattgttaccagctcatgctttacaagaaaatgccttggcattatgccaaagagaagtcgatggaggtgacgatggacgccgaatgttggggagatgctgccttccacgtgacccacagtccccgcagcacggctgcatggggctggtgcaagtcagcacagccgtgttccgatcgttcacacggcgtttgcatttctcatggttagggtacatttaacagagtaacttcacaattttgatatctaaaaatcactcattttctgcagcatcttccacccttgttagtatatgcctcaacttggccaaattgtcttaattataaaagggatttataatctttagcacaaagataaaa

SEQ ID NO: 5675 - DNA, 1336 bp, Homo sapiens
  source 1..1336: mol_type = unassigned DNA
aggaagaagctggagacttggtccagccgggcatcagctttccggggccggcagaggaggatctagacccgcagtactcatggtcgcccacgcagcacttcaatgaggagcgctactcgcccgcgcccaggagcatgaagggcctttccggaagtcggacccagccgccgctgtgttccgggcacacgtgtggtctggcgcccccggaggactgcgagcacctgcaccacgggcccgacgcgcggccgccctacctgctgagccccgccgacagctgccccggggggcgccaccgctgctcgccgcgcagctcggtgcactcggagtgcgtgatgatgccggtggtgctgggcgaccacgtgtccagcagcaccttcccgcggatgcactacagctcgcactacgacacgcgcgacgactgcgctgtggcccacgcgggcgccaagatcaaccgcatcccggccaacctgctggaccagttcgagaagcagctgccgctgcaccgggacggcttccacacgctgcagtaccagaggacgtccgcggccgccgagcagcgcagcgagagccccgggcggatccgccacctggtacactccgtgcagaagctcttcaccaagtcgcactcgctggagggctcctccaaaagcaacgccaacggcaccaaggcggacggccgggcggacgaccaccaccacgcccaccacgccaagcacagcaagaggagcaagagcaaggagcgcaagccggagggcaagccccggcccggcatgagcagctggtggagctcggacgacaacctggacagcgacagcacctatcggacgcccagcgtgctcaaccggcaccacctgggccccgtggcccactgctaccccgacgcgctgcagagccccttcggggacctgtccctcaagacctccaagagcaacaacgacgtcaagtgctcggcctgtgaggggttggcgctgacgcccgacgccaagtacctgaagcgcagctcctggtctacgctgacggtcagccaggccaaggaggcctaccgcaagagctcgctgaacctggacaagccgctgctgcaccaggacgccaagcccgccctgaggccgtgccactacctccaggtacctcaggatgagtggggagggtaccccaccggtggcaaagatgaggagattccctgcaggagaatgagaagtgggagttacattaaagccatgggggacgaggagagcggagagtcagactccagccccaagacatcaccaaagtcggcaatcctaccagagccgctgctgaagtccatcggacagagaccgcttggagagcaccagac

SEQ ID NO: 5676 - DNA, 1252 bp, Homo sapiens
  source 1..1252: mol_type = unassigned DNA
cgcccacgcagcacttcaatgaggagcgctactcgcccgcgcccaggagcatgaagggcctttccggaagtcggacccagccgccgctgtgttccgggcacacgtgtggtctggcgcccccggaggactgcgagcacctgcaccacgggcccgacgcgcggccgccctacctgctgagccccgccgacagctgccccggggggcgccaccgctgctcgccgcgcagctcggtgcactcggagtgcgtgatgatgccggtggtgctgggcgaccacgtgtccagcagcaccttcccgcggatgcactacagctcgcactacgacacgcgcgacgactgcgctgtggcccacgcgggcgccaagatcaaccgcatcccggccaacctgctggaccagttcgagaagcagctgccgctgcaccgggacggcttccacacgctgcagtaccagaggacgtccgcggccgccgagcagcgcagcgagagccccgggcggatccgccacctggtacactccgtgcagaagctcttcaccaagtcgcactcgctggagggctcctccaaaagcaacgccaacggcaccaaggcggacggccgggcggacgaccaccaccacgcccaccacgccaagcacagcaagaggagcaagagcaaggagcgcaagccggagggcaagccccggcccggcatgagcagctggtggagctcggacgacaacctggacagcgacagcacctatcggacgcccagcgtgctcaaccggcaccacctgggccccgtggcccactgctaccccgacgcgctgcagagccccttcggggacctgtccctcaagacctccaagagcaacaacgacgtcaagtgctcggcctgtgaggggttggcgctgacgcccgacgccaagtacctgaagcgcagctcctggtctacgctgacggtcagccaggccaaggaggcctaccgcaagagctcgctgaacctggacaagccgctgctgcaccaggacgccaagcccgccctgaggccgtgccactacctccaggtacctcaggatgagtggggagggtaccccaccggtggcaaagatgaggagattccctgcaggagaatgagaagtgggagttacattaaagccatgggggacgaggagagcggagagtcagactccagccccaagacatcaccaaagtcggcaatcctaccagagccgctgctgaagtccatcggacagagaccgcttggagagcaccagac

SEQ ID NO: 5677 - DNA, 277 bp, Homo sapiens
  source 1..277: mol_type = unassigned DNA
agcgcggtctgagcgcgcggcgcctgcggcggcgaacggacggacggaccgcggacggacgtactgaccccaacccgcgagccccgggagccgtcggtctgaggaggggccgcttcgccatgtcgccccgcacctgctgagcccggagcgtccgaggatgtccgcgctgaggaaggctttctcgccatccgaggcttggccctagccctgcgcggcttccctcgcggctgcgaaccctctgcctgcgcccagcccagccacaatggggactgctcag

SEQ ID NO: 5678 - DNA, 965 bp, Homo sapiens
  source 1..965: mol_type = unassigned DNA
cgcgcggcgcctgcggcggcgaacggacggacggaccgcggacggacgtactgaccccaacccgcgagccccgggagccgtcggtctgaggaggggccgcttcgccatgtcgccccgcacctgctgagcccggagcgtccgaggatgtccgcgctgaggaaggaaagaagaattgcagggatgcctgtgagatgggaggtgccgctgaaggtcttttgagattgtggacagacctgcaggaatgagaagttctccgcgaggcgctgagagggaggcacagatgcctgggggaatgaaaaggagccacagacggtggatggagagggaggaagtagttggtggagcagccagcagccctaggagcttcgagttctttattcatcattcgaatgctgtgggtataaaaacgtgccggctcaccagatggagccttatccactccacagacacacttgcgtgtcctctaagatgatccaagataatgaaatagataaatacttgttattttccttgaggtcttaaaaaatcctgcacagagaaagctgggtatgttgagtgggccgccgtggggtcggccgtttcctgtccgggcggcgcggtgcggcgtgtgattgccgcaggaagggccttcgcggccccaccacgggccgaccctgggcgcggtgtcaggtgcactttaattccccattcaacagccctgccttcttgtctaccttgcctggagccctctttctgagggtgggaagcttcggttgcctggcagatctgagtgaggatggaaccgcaccgctccacgtggggagtgagtggtacagcgtgggaggcctcagatcaggtgcctttccgagtcctcacggcagcctctgcagcaggcgtcccagccacacctgacaacctttcctggggctcactttgcgagaccctgacggatttcgtccactgtcactgccgtatcccgtcgccaa

SEQ ID NO: 5679 - DNA, 186 bp, Homo sapiens
  source 1..186: mol_type = unassigned DNA
cgtcggtctgaggaggggccgcttcgccatgtcgccccgcacctgctgagcccggagcgtccgaggatgtccgcgctgaggaaggctttctcgccatccgaggcttggccctagccctgcgcggcttccctcgcggctgcgaaccctctgcctgcgcccagcccagccacaatggggactgctcag

SEQ ID NO: 5680 - DNA, 3380 bp, Homo sapiens
  source 1..3380: mol_type = unassigned DNA
ctgggcgccgagtgcgcaggcgccggccgtgaagaccgaccgtgcgccgggctcgagcgcggtctgagcgcgcggcgcctgcggcggcgaacggacggacggaccgcggacggacgtactgaccccaacccgcgagccccgggagccgtcggtctgaggaggggccgcttcgccatgtcgccccgcacctgctgagcccggagcgtccgaggatgtccgcgctgaggaaggttttgcctggcattctgcagaagcattgctgtatcttaccagacaggaatacagagtcgcagtgcacgctctgcggggagccggaagaggaagaagctggagacttggtccagccgggcatcagctttccggggccggcagaggaggatctagacccgcagtactcatggtcgcccacgcagcacttcaatgaggagcgctactcgcccgcgcccaggagcatgaagggcctttccggaagtcggacccagccgccgctgtgttccgggcacacgtgtggtctggcgcccccggaggactgcgagcacctgcaccacgggcccgacgcgcggccgccctacctgctgagccccgccgacagctgccccggggggcgccaccgctgctcgccgcgcagctcggtgcactcggagtgcgtgatgatgccggtggtgctgggcgaccacgtgtccagcagcaccttcccgcggatgcactacagctcgcactacgacacgcgcgacgactgcgctgtggcccacgcgggcgccaagatcaaccgcatcccggccaacctgctggaccagttcgagaagcagctgccgctgcaccgggacggcttccacacgctgcagtaccagaggacgtccgcggccgccgagcagcgcagcgagagccccgggcggatccgccacctggtacactccgtgcagaagctcttcaccaagtcgcactcgctggagggctcctccaaaagcaacgccaacggcaccaaggcggacggccgggcggacgaccaccaccacgcccaccacgccaagcacagcaagaggagcaagagcaaggagcgcaagccggagggcaagccccggcccggcatgagcagctggtggagctcggacgacaacctggacagcgacagcacctatcggacgcccagcgtgctcaaccggcaccacctgggccccgtggcccactgctaccccgacgcgctgcagagccccttcggggacctgtccctcaagacctccaagagcaacaacgacgtcaagtgctcggcctgtgaggggttggcgctgacgcccgacgccaagtacctgaagcgcagctcctggtctacgctgacggtcagccaggccaaggaggcctaccgcaagagctcgctgaacctggacaagccgctgctgcaccaggacgccaagcccgccctgaggccgtgccactacctccaggtacctcaggatgagtggggagggtaccccaccggtggcaaagatgaggagattccctgcaggagaatgagaagtgggagttacattaaagccatgggggacgaggagagcggagagtcagactccagccccaagacatcaccaaagtcggcaatcctaccagagccgctgctgaagtccatcggacagagaccgcttggagagcaccagacccagacctacctgcaagctgcaagcgatgtgcctgtgggacacagcctggaccccgctgcgaactacaactccccgaaattccgctcccggaaccagagctacatgagggccgtcagcaccctgagccaggccagctgcgtgagccaggtgagcgaggcggagatcaatgggcaattcgagtccgtgtgcgagtccgtcttcagtgaagttgaatctcaggccatggatgccctcgacctcccgggatgtttccgaacaaggagtcacagctaccttcgagccattcaagccggctactcccaagatgacgaatgtattcccatgatgacaccctctgacatcacctccaccatcaggtcaacagcagctgtctcatatacaaattacaagaaaacgcccccaccggtgccccctcggaccacctccaagcctctgatctcggtgacggcgcagagcagcaccgaatccacccaggacgcctaccaggacagccgcgcacagaggatgtccccgtggccccaggacagccgcggcctctacaactccacggacagcctggacagcaacaaggccatgaacctcgcgctggaaacggccgctgcccagcgccacctgccagagagccagagcagctctgtgcggaccagcgacaaggccatcctggtgtccaaggcggaggagctcctcaagagccgctgctcctccatcgggattcaggattctgaattcccagagcatcagccatacccaaggtcagatgtggaaacggccacagattctgacacggagagccgcggtctgcgggaataccactctgtcggggtgcaagtggaagatgagaagcgacacggacgttttaaacgttctaacagcgtcacggccgccgtccaagctgacctggagctggaggggttcccaggccacatcaccacggaggacaaaggccttcagttcggctcatccttccagcggcactccgagcccagcacccccacccagtacagcgcggtgagaactgtacggacccaggggctcttcagctatagagaagactatcggacccaagtggacacctccaccctgccccctccagacccctggctggagcccgccatcgacacggtagagactgggaggatgtctccgtgccgcagggatggctcgtggtttttgaagctgctgcacgcagagacaaagaggatggaaggctggtgcaaagagatggagagagaggcggaggagaacgacctctcggaggaaattctcggtaaaatcaggagtgctgttgggagtgcccagcttctcatgtcccagaaattccagcagttttattggctttgccaacagaatatggaccccagcgccatgccgaggccgacgtcgcaggacctggccggctactgggacatgctgcagctctccattgaggacgtcagcatgaagttcgacgagctgcagcggctgcggctcaacgactggaagatgatggagtccccggaaagaaaggaagaaagaaaggtcccgcctccaataccaaagaagcctcccaaggggaagtttcccatcacaagagaaaaatccctggacctgcccgacagacaacgccaggaagcccggaggcgcctcatggccgccaagcgagcggcgtccttccggcagaattccgcctccgagcgcgcggacagcatcgagatctacatccccgaggcccagacccggctctga

SEQ ID NO: 5681 - DNA, 811 bp, Homo sapiens
  source 1..811: mol_type = unassigned DNA
agcgcggtctgagcgcgcggcgcctgcggcggcgaacggacggacggaccgcggacggacgtactgaccccaacccgcgagccccgggagccgtcggtctgaggaggggccgcttcgccatgtcgccccgcacctgctgagcccggagcgtccgaggatgtccgcgctgaggaaggctttctcgccatccgaggcttggccctagccctgcgcggcttccctcgcggctgctaaccctctgcctgcgcccagcccagccacaatggggactgctcaggttttgcctggcattctgcagaagcattgctgtatcttaccagacaggaatacaggccgtctccaaactatagtcctattggactggtgcaccaaatatggatttggggtgtgcgtaattcagtccatagcacccaccaaaccacagaagctgccccgagctgatgtcccgctatcggtgcggctgcaggacactgtcccattgctgcatggagcctctcgctgtctgagcctcacctgaagccggcccacaccattttcttactctatgcattggagcgaaaatgtttaattgactacgatgggtgattcctaaagttatatttgactcagaaaaaaatgcattagtaaaactccctgtttgaatgtttctagtattcacagcccgggtcactgtctttctataacgattggtatctgaaataagaacatgggctgcaacttacagccttgctctttctactatataaacttccctaatcaaatatttttcattaaaaaaatgtgtttttggaaataaacagttacaacctgg

SEQ ID NO: 5682 - DNA, 965 bp, Homo sapiens; identical to SEQ ID NO: 5678
  source 1..965: mol_type = unassigned DNA

SEQ ID NO: 5683 - DNA, 431 bp, Homo sapiens
  source 1..431: mol_type = unassigned DNA
cgtcggtctgaggaggggccgcttcgccatgtcgccccgcacctgctgagcccggagcgtccgaggatgtccgcgctgaggaaggctttctcgccatccgaggcttggccctagccctgcgcggcttccctcgcggctgctaaccctctgcctgcgcccagcccagccacaatggggactgctcaggttttgcctggcattctgcagaagcattgctgtatcttaccagacaggaatacaggcaatgctgtgaagcgtcagagggaattccgttggttactttcccatacggtcttgttcagctgcttgttctcagaaaagtgtgtttgttggtggaggagaatgcgaccaaggagaccatccttttcatgaaggcacaaacgtgaatacatatgtgacttttaagcctttaaataaaaacccaaagcaca

SEQ ID NO: 5684 - DNA, 3165 bp, Homo sapiens
  source 1..3165: mol_type = unassigned DNA
atggggactgctcaggttttgcctggcattctgcagaagcattgctgtatcttaccagacaggaatacagagtcgcagtgcacgctctgcggggagccggaagaggaagaagctggagacttggtccagccgggcatcagctttccggggccggcagaggaggatctagacccgcagtactcatggtcgcccacgcagcacttcaatgaggagcgctactcgcccgcgcccaggagcatgaagggcctttccggaagtcggacccagccgccgctgtgttccgggcacacgtgtggtctggcgcccccggaggactgcgagcacctgcaccacgggcccgacgcgcggccgccctacctgctgagccccgccgacagctgccccggggggcgccaccgctgctcgccgcgcagctcggtgcactcggagtgcgtgatgatgccggtggtgctgggcgaccacgtgtccagcagcaccttcccgcggatgcactacagctcgcactacgacacgcgcgacgactgcgctgtggcccacgcgggcgccaagatcaaccgcatcccggccaacctgctggaccagttcgagaagcagctgccgctgcaccgggacggcttccacacgctgcagtaccagaggacgtccgcggccgccgagcagcgcagcgagagccccgggcggatccgccacctggtacactccgtgcagaagctcttcaccaagtcgcactcgctggagggctcctccaaaagcaacgccaacggcaccaaggcggacggccgggcggacgaccaccaccacgcccaccacgccaagcacagcaagaggagcaagagcaaggagcgcaagccggagggcaagccccggcccggcatgagcagctggtggagctcggacgacaacctggacagcgacagcacctatcggacgcccagcgtgctcaaccggcaccacctgggccccgtggcccactgctaccccgacgcgctgcagagccccttcggggacctgtccctcaagacctccaagagcaacaacgacgtcaagtgctcggcctgtgaggggttggcgctgacgcccgacgccaagtacctgaagcgcagctcctggtctacgctgacggtcagccaggccaaggaggcctaccgcaagagctcgctgaacctggacaagccgctgctgcaccaggacgccaagcccgccctgaggccgtgccactacctccaggtacctcaggatgagtggggagggtaccccaccggtggcaaagatgaggagattccctgcaggagaatgagaagtgggagttacattaaagccatgggggacgaggagagcggagagtcagactccagccccaagacatcaccaaagtcggcaatcctaccagagccgctgctgaagtccatcggacagagaccgcttggagagcaccagacccagacctacctgcaagctgcaagcgatgtgcctgtgggacacagcctggaccccgctgcgaactacaactccccgaaattccgctcccggaaccagagctacatgagggccgtcagcaccctgagccaggccagctgcgtgagccaggtgagcgaggcggagatcaatgggcaattcgagtccgtgtgcgagtccgtcttcagtgaagttgaatctcaggccatggatgccctcgacctcccgggatgtttccgaacaaggagtcacagctaccttcgagccattcaagccggctactcccaagatgacgaatgtattcccatgatgacaccctctgacatcacctccaccatcaggtcaacagcagctgtctcatatacaaattacaagaaaacgcccccaccggtgccccctcggaccacctccaagcctctgatctcggtgacggcgcagagcagcaccgaatccacccaggacgcctaccaggacagccgcgcacagaggatgtccccgtggccccaggacagccgcggcctctacaactccacggacagcctggacagcaacaaggccatgaacctcgcgctggaaacggccgctgcccagcgccacctgccagagagccagagcagctctgtgcggaccagcgacaaggccatcctggtgtccaaggcggaggagctcctcaagagccgctgctcctccatcgggattcaggattctgaattcccagagcatcagccatacccaaggtcagatgtggaaacggccacagattctgacacggagagccgcggtctgcgggaataccactctgtcggggtgcaagtggaagatgagaagcgacacggacgttttaaacgttctaacagcgtcacggccgccgtccaagctgacctggagctggaggggttcccaggccacatcaccacggaggacaaaggccttcagttcggctcatccttccagcggcactccgagcccagcacccccacccagtacagcgcggtgagaactgtacggacccaggggctcttcagctatagagaagactatcggacccaagtggacacctccaccctgccccctccagacccctggctggagcccgccatcgacacggtagagactgggaggatgtctccgtgccgcagggatggctcgtggtttttgaagctgctgcacgcagagacaaagaggatggaaggctggtgcaaagagatggagagagaggcggaggagaacgacctctcggaggaaattctcggtaaaatcaggagtgctgttgggagtgcccagcttctcatgtcccagaaattccagcagttttattggctttgccaacagaatatggaccccagcgccatgccgaggccgacgtcgcaggacctggccggctactgggacatgctgcagctctccattgaggacgtcagcatgaagttcgacgagctgcagcggctgcggctcaacgactggaagatgatggagtccccggaaagaaaggaagaaagaaaggtcccgcctccaataccaaagaagcctcccaaggggaagtttcccatcacaagagaaaaatccctggacctgcccgacagacaacgccaggaagcccggaggcgcctcatggccgccaagcgagcggcgtccttccggcagaattccgcctccgagcgcgcggacagcatcgagatctacatccccgaggcccagacccggctctga

SEQ ID NO: 5685 - DNA, 1744 bp, Homo sapiens
  source 1..1744: mol_type = unassigned DNA
actgggcagaccttgctggccacggcctccacgtgcagtgaccgttctcttggcagcgtctcaggctgtctggaccagctgtcacagtctcgctgtgggtgagtcacctgaggcactgtatggcggatagaaggattcattgccctgggaggttttgcctggcattctgcagaagcattgctgtatcttaccagacaggaatacagatgaagacccccaggcccagggaattcgatcactggctgagaactcacagctaaggagggggagcctgggattccttcctggtgctcacacccgagacccttttgtcactgtgttcaaaggcactgctgcacagacgtgattcttctttcaacgaacatctccaggacttcctccggggtctgtgacctcatctataattaaagggaaagagatcttcctgagattagcccatttaacttgtttaactagatgcatgctgcaaaaactgttttcaagaaatgaacaattgactatttaaaaagagccaagccttaaaagaagaccaggttttaatagggaaaacattcagtaaaatattattctgcagtaacttgtggaatgactgctgtacacacagctctgggctgggtacctggaagctcacgagcttgtttggcctcccctcctggacacaggaggtgtcaaggctgtggtcagcagaatctacccagctggacactgagtggacgccctgtggggtggctgtgaaatgggtccactttgtagtggcagcatccctgatagtacttctgaaagggacaagatagaaaagcaaaccaaactgaaactgagaagtcgtggatgataccaggggcgcacagtggctgacaggaagagactgcctggggggtctcggagccagtggctggagtggagttagtttgaccgagtcctggactagggaggggacccccaaagcatgcccagcatggcgctagtggggcccaggcaccccatgtcccaacgactagaaccaataatcaggttaacactcattaaataagaagtgtctgtgcctcctgggataaaaatcctttataacgatctgggacgcgagctcaagtccctgttcccttgtcctccacagcagtgtgcagcgtggaactcggcggttcggggtccctgagtccctgagccactgtctaccccctgctccatcccaaatgcagagacccctgagcactcatgtggacatgccccaccatgccctggctgctccttcaggatggcgcagggccaccgctatgggaggactctaaagggtgggtctcaagccctcctctgcttaccctaaatcaggagagcaaaccgaatgcactgccctcttccttcactcctgcatcccatcccccgctatggcctcactatcaggtctgctgtgtgccaaaatattttaccatgccctaaaagtgagatgttggaagtggacaaggaggaaatatttatgaatatttgagtctgttattctttatgttaagcattttggcttctgttgtactcctaaatcactactgagagcagagaaagagctctttgtagaaatgagatgtgttcctgtgtgctgcctgtgacgcatcccgttgtcaccggagtgccgtggccctaaggaatgacagcattaaggcatggacgttaaagatggacaaaagaattgttcacggtgttgtattttaaaatgactatgtgtatgacaattaaactattgtgtcttcgttta

SEQ ID NO: 5686 - DNA, 260 bp, Homo sapiens
  source 1..260: mol_type = unassigned DNA
aaggattcattgccctgggaggttttgcctggcattctgcagaagcattgctgtatcttaccagacaggaatacagggcctctgaagagcaccggcagcttccttcttagcagaggagaaaatctctgccatctcgtgctcgcctacctcgactcgccagacgccctggagcagaggaggagcagtggtcggcagcggccagccgtgcaggtgccacacctgatggtccacctgggagaaccaggcaggaagccggaaag

SEQ ID NO: 5687 - DNA, 381 bp, Homo sapiens
  source 1..381: mol_type = unassigned DNA
gggcctctgaagagcaccggcagcttccttcttagcagaggagaaaatctctgccatctcgtgctcgcctacctcgactcgccagacgccctggagcagaggaggagcagtggtcggcagcggccagccgtgcaggtgccacacctgatggtccacctgggagaaccaggcaggaagccggaaagagtcgcagtgcacgctctgcggggagccggaagatacagacagcccaactaaatccttgaaatgcagcgtggcgtgaaaatggagcggcattttagttaacgagggtctggatgccattcacaggaatgcagtttctacagggttctgctttgcagagacctctcctgataataataataaatttactcagaacaa

SEQ ID NO: 5688 - DNA, 539 bp, Homo sapiens
  source 1..539: mol_type = unassigned DNA
gggctcccgaatgagacatcctgtgttgatcgcagccgtctcccagcatgtggagcaacactaggaccgtggtagatgttcagtcatgttcgctgaaggaagaagggagtgaatgaatgtcttctctgaggatagctgagcatccgtgcatccgtctggccatgagaacttggttgcgctcacatgaggatcctgagcagagtcgcagtgcacgctctgcggggagccggaagggagagatggggagagatgatcccaacgtgtgactctaaaagccgaatactaaaggcttctgtatactcagggtcacagaagctcaaccgtgtccattggaaaggctcttactcgtaatttaaaacacaaaaatgaaaaaaagatacagacagcccaactaaatccttgaaatgcagcgtggcgtgaaaatggagcggcattttagttaacgagggtctggatgccattcacaggaatgcagtttctacagggttctgctttgcagagacctctcctgataataataataaatttactcagaacaa

SEQ ID NO: 5689 - DNA, 396 bp, Homo sapiens
  source 1..396: mol_type = unassigned DNA; mol_type = unassigned DNA
gaaaaagagtcagccttggggaactcgggacacagccaaccccaggaatgtgcctttgggtcagagcccagcccagctctgcttccacagggagagatggggagagatgatcccaacgtgtgactctaaaagccgaatactaaaggcttctgtatactcagggtcacagaagctcaaccgtgtccattggaaaggctcttactcgtaatttaaaacacaaaaatgaaaaaaagatacagacagcccaactaaatccttgaaatgcagcgtggcgtgaaaatggagcggcattttagttaacgagggtctggatgccattcacaggaatgcagtttctacagggttctgctttgcagagacctctcctgataataataataaatttactcagaacaa

SEQ ID NO: 5690 - DNA, 3515 bp, Homo sapiens
  source 1..3515: mol_type = unassigned DNA; mol_type = unassigned DNA
cgcccacgcagcacttcaatgaggagcgctactcgcccgcgcccaggagcatgaagggcctttccggaagtcggacccagccgccgctgtgttccgggcacacgtgtggtctggcgcccccggaggactgcgagcacctgcaccacgggcccgacgcgcggccgccctacctgctgagccccgccgacagctgccccggggggcgccaccgctgctcgccgcgcagctcggtgcactcggagtgcgtgatgatgccggtggtgctgggcgaccacgtgtccagcagcaccttcccgcggatgcactacagctcgcactacgacacgcgcgacgactgcgctgtggcccacgcgggcgccaagatcaaccgcatcccggccaacctgctggaccagttcgagaagcagctgccgctgcaccgggacggcttccacacgctgcagtaccagaggacgtccgcggccgccgagcagcgcagcgagagccccgggcggatccgccacctggtacactccgtgcagaagctcttcaccaagtcgcactcgctggagggctcctccaaaagcaacgccaacggcaccaaggcggacggccgggcggacgaccaccaccacgcccaccacgccaagcacagcaagaggagcaagagcaaggagcgcaagccggagggcaagccccggcccggcatgagcagctggtggagctcggacgacaacctggacagcgacagcacctatcggacgcccagcgtgctcaaccggcaccacctgggccccgtggcccactgctaccccgacgcgctgcagagccccttcggggacctgtccctcaagacctccaagagcaacaacgacgtcaagtgctcggcctgtgaggggttggcgctgacgcccgacgccaagtacctgaagcgcagctcctggtctacgctgacggtcagccaggccaaggaggcctaccgcaagagctcgctgaacctggacaagccgctgctgcaccaggacgccaagcccgccctgaggccgtgccactacctccaggtacctcaggatgagtggggagggtaccccaccggtggcaaagatgaggagattccctgcaggagaatgagaagtgggagttacattaaagccatgggggacgaggagagcggagagtcagactccagccccaagacatcaccaaagtcggcaatcctaccagagccgctgctgaagtccatcggacagagaccgcttggagagcaccagacccagacctacctgcaagctgcaagcgatgtgcctgtgggacacagcctggaccccgctgcgaactacaactccccgaaattccgctcccggaaccagagctacatgagggccgtcagcaccctgagccaggccagctgcgtgagccaggtgagcgaggcggagatcaatgggcaattcgagtccgtgtgcgagtccgtcttcagtgaagttgaatctcaggccatggatgccctcgacctcccgggatgtttccgaacaaggagtcacagctaccttcgagccattcaagccggctactcccaagatgacgaatgtattcccatgatgacaccctctgacatcacctccaccatcaggtcaacagcagctgtctcatatacaaattacaagaaaacgcccccaccggtgccccctcggaccacctccaagcctctgatctcggtgacggcgcagagcagcaccgaatccacccaggacgcctaccaggacagccgcgcacagaggatgtccccgtggccccaggacagccgcggcctctacaactccacggacagcctggacagcaacaaggccatgaacctcgcgctggaaacggccgctgcccagcgccacctgccagagagccagagcagctctgtgcggaccagcgacaaggccatcctggtgtccaaggcggaggagctcctcaagagccgctgctcctccatcgggattcaggtggaaacggccacagattctgacacggagagccgcggtctgcgggaataccactctgtcggggtgcaagtggaagatgagaagcgacacggacgttttaaacgttctaacagcgtcacggccgccgtccaagctgacctggagctggaggggttcccaggccacatcaccacggaggacaaaggccttcagttcggctcatccttccagcggcactccgagcccagcacccccacccagtacagcgcggtgagaactgtacggacccaggggctcttcagctatagagaagactatcggacccaagtggacacctccaccctgccccctccagacccctggctggagcccgccatcgacacggtagagactgggaggatgtctccgtgccgcagggatggctcgtggtttttgaagctgctgcacgcagagacaaagaggatggaaggctggtgcaaagagatggagagagaggcggaggagaacgacctctcggaggaaattctcggtaaaatcaggagtgctgttgggagtgcccagcttctcatgtcccagaaattccagcagttttattggctttgccaacagaatatggaccccagcgccatgccgaggccgacgtcgcaggacctggccggctactgggacatgctgcagctctccattgaggacgtcagcatgaagttcgacgagctgcagcggctgcggctcaacgactggaagatgatggagtccccggaaagaaaggaagaaagaaaggtcccgcctccaataccaaagaagcctcccaaggggaagtttcccatcacaagagaaaaatccctggacctgcccgacagacaacgccaggaagcccggaggcgcctcatggccgccaagcgagcggcgtccttccggcagaattccgcctccgagcgcgcggacagcatcgagatctacatccccgaggcccagacccggctctgagggcggaggccggcgccttcccctcgtcgcttccgctttcccggacgcttgtgcagcgcggcgccgccctggtggtttctgtctcctcctcccgctgaacacgtcctcgctcccgcgctccccgcgccccggacacagcgggacgcggccggcggcctcagagtccacggagctcgcggcgaggacgacttctgcttttgttgttgttgttgttgttcacgggtggcctggctcacacttggctctgagggacaggtgtggcgagacctgatttctcctgcgtgttctcagaggacggcgagaaatgcctctggagctggaacccagcttacattttgttatttctatttttataaattgtgtgataattagaggtaagaataacaagtaactataaacgggtgcatcccaccactccctggaggcattagacacccaagtggaaggtgctacaacctgaagcgcaggaaagaaaggcccattcccctcgcacagccgagcttttactccctgagcacgggccgctccgctcccctgctcctgtctgtctcggacagaaaacacgaggctccttgtgtc

SEQ ID NO: 5691 - DNA, 632 bp, Homo sapiens; identical to SEQ ID NO: 5672
  source 1..632: mol_type = unassigned DNA; mol_type = unassigned DNA

SEQ ID NO: 5692 - DNA, 709 bp, Homo sapiens; identical to SEQ ID NO: 5673
  source 1..709: mol_type = unassigned DNA; mol_type = unassigned DNA

SEQ ID NO: 5693 - DNA, 615 bp, Homo sapiens; identical to SEQ ID NO: 5674
  source 1..615: mol_type = unassigned DNA; mol_type = unassigned DNA

SEQ ID NO: 5694 - DNA, 10088 bp, Homo sapiens
  source 1..10088: mol_type = unassigned DNA; mol_type = unassigned DNA
aggaagaagctggagacttggtccagccgggcatcagctttccggggccggcagaggaggatctagacccgcagtactcatggtcgcccacgcagcacttcaatgaggagcgctactcgcccgcgcccaggagcatgaagggcctttccggaagtcggacccagccgccgctgtgttccgggcacacgtgtggtctggcgcccccggaggactgcgagcacctgcaccacgggcccgacgcgcggccgccctacctgctgagccccgccgacagctgccccggggggcgccaccgctgctcgccgcgcagctcggtgcactcggagtgcgtgatgatgccggtggtgctgggcgaccacgtgtccagcagcaccttcccgcggatgcactacagctcgcactacgacacgcgcgacgactgcgctgtggcccacgcgggcgccaagatcaaccgcatcccggccaacctgctggaccagttcgagaagcagctgccgctgcaccgggacggcttccacacgctgcagtaccagaggacgtccgcggccgccgagcagcgcagcgagagccccgggcggatccgccacctggtacactccgtgcagaagctcttcaccaagtcgcactcgctggagggctcctccaaaagcaacgccaacggcaccaaggcggacggccgggcggacgaccaccaccacgcccaccacgccaagcacagcaagaggagcaagagcaaggagcgcaagccggagggcaagccccggcccggcatgagcagctggtggagctcggacgacaacctggacagcgacagcacctatcggacgcccagcgtgctcaaccggcaccacctgggccccgtggcccactgctaccccgacgcgctgcagagccccttcggggacctgtccctcaagacctccaagagcaacaacgacgtcaagtgctcggcctgtgaggggttggcgctgacgcccgacgccaagtacctgaagcgcagctcctggtctacgctgacggtcagccaggccaaggaggcctaccgcaagagctcgctgaacctggacaagccgctgctgcaccaggacgccaagcccgccctgaggccgtgccactacctccaggtacctcaggatgagtggggagggtaccccaccggtggcaaagatgaggagattccctgcaggagaatgagaagtgggagttacattaaagccatgggggacgaggagagcggagagtcagactccagccccaagacatcaccaaagtcggcaatcctaccagagccgctgctgaagtccatcggacagagaccgcttggagagcaccagacccagacctacctgcaagctgcaagcgatgtgcctgtgggacacagcctggaccccgctgcgaactacaactccccgaaattccgctcccggaaccagagctacatgagggccgtcagcaccctgagccaggccagctgcgtgagccaggtgagcgaggcggagatcaatgggcaattcgagtccgtgtgcgagtccgtcttcagtgaagttgaatctcaggccatggatgccctcgacctcccgggatgtttccgaacaaggagtcacagctaccttcgagccattcaagccggctactcccaagatgacgaatgtattcccatgatgacaccctctgacatcacctccaccatcaggtcaacagcagctgtctcatatacaaattacaagaaaacgcccccaccggtgccccctcggaccacctccaagcctctgatctcggtgacggcgcagagcagcaccgaatccacccaggacgcctaccaggacagccgcgcacagaggatgtccccgtggccccaggacagccgcggcctctacaactccacggacagcctggacagcaacaaggccatgaacctcgcgctggaaacggccgctgcccagcgccacctgccagagagccagagcagctctgtgcggaccagcgacaaggccatcctggtgtccaaggcggaggagctcctcaagagccgctgctcctccatcgggattcaggtggaaacggccacagattctgacacggagagccgcggtctgcgggaataccactctgtcggggtgcaagtggaagatgagaagcgacacggacgttttaaacgttctaacagcgtcacggccgccgtccaagctgacctggagctggaggggttcccaggccacatcaccacggaggacaaaggccttcagttcggctcatccttccagcggcactccgagcccagcacccccacccagtacagcgcggtgagaactgtacggacccaggggctcttcagctatagagaagactatcggacccaagtggacacctccaccctgccccctccagacccctggctggagcccgccatcgacacggtagagactgggaggatgtctccgtgccgcagggatggctcgtggtttttgaagctgctgcacgcagagacaaagaggatggaaggctggtgcaaagagatggagagagaggcggaggagaacgacctctcggaggaaattctcggtaaaatcaggagtgctgttgggagtgcccagcttctcatgtcccagaaattccagcagttttattggctttgccaacagaatatggaccccagcgccatgccgaggccgacgtcgcaggacctggccggctactgggacatgctgcagctctccattgaggacgtcagcatgaagttcgacgagctgcagcggctgcggctcaacgactggaagatgatggagtccccggaaagaaaggaagaaagaaaggtcccgcctccaataccaaagaagcctcccaaggggaagtttcccatcacaagagaaaaatccctggacctgcccgacagacaacgccaggaagcccggaggcgcctcatggccgccaagcgagcggcgtccttccggcagaattccgcctccgagcgcgcggacagcatcgagatctacatccccgaggcccagacccggctctgagggcggaggccggcgccttcccctcgtcgcttccgctttcccggacgcttgtgcagcgcggcgccgccctggtggtttctgtctcctcctcccgctgaacacgtcctcgctcccgcgctccccgcgccccggacacagcgggacgcggccggcggcctcagagtccacggagctcgcggcgaggacgacttctgcttttgttgttgttgttgttgttcacgggtggcctggctcacacttggctctgagggacaggtgtggcgagacctgatttctcctgcgtgttctcagaggacggcgagaaatgcctctggagctggaacccagcttacattttgttatttctatttttataaattgtgtgataattagaggtaagaataacaagtaactataaacgggtgcatcccaccactccctggaggcattagacacccaagtggaaggtgctacaacctgaagcgcaggaaagaaaggcccattcccctcgcacagccgagcttttactccctgagcacgggccgctccgctcccctgctcctgtctgtctcggacagaaaacacgaggctccttgtgtcaagcttcctgtgatggaaagcgacctctccaaccaccacactccccgccgtacagttctccagaatcccaggcgatgacaagtctgaacccacgaaaatacccagcgcagcatctacacattcaaaagataagctgagtgttcccaccaggaagtcacgcgcagagaggagagtcttacggagggctgggagcttaaaaggaaaacaatgtccttacttgtaaacagttattgtattttttatttctttctaacttaaaatacgacacccagtattttctttaagtttcaccatttacgctacatgtgatttttttaatgtatgtatatatatatattctcaaattgctctatcagctgacttttcagggtatccttaaaaaaaaacacacacgaaaaacaaaagtttgcttgtttaaaatgacagttgtgatgtaaaaagtttaagaaatatgaatgtgagtggtaagtatatctcagtttaaatggtaaagaagaaatgtagtttacatttgtatttttccagaattcttttgtcctatgcagtattgctaaagtcgagaatatattccttgcctgtgttagacatgaagggaaaaagaggtcacatattgtgatttccagctgtagcattcaaaaaaaaaattggtgttcatgactctgtggtcggtgccagaggaaaataggaacgactctaattaataggctttctgtgtatataattaaatttagctgctgcaaccattgttctgacacgacttctgtttcacagttcagaccggtcttcaaaggaaaagcctgtccgatttttccatgggttccagtttcagagttctcattattactcaaagtaaaagcggactgcgatttaagatgtttccaccccaatacctggtcttccttcccggcttaaggagtaccatgtacttagccacaggcagaatagctttcgatgaccccatagcactttgtttcttcgccttgatttgcactttacaatgtccccagcccctctgcagcccgtggctggcagggcgttcgatgtgcggttggcccccagcgcgccctccagagctgcggtgtctccctgcctcattccccacatcccactgagcatgggaccattgggagcagagctgatattaaagcatgtttagcttcgaagttttacttttttaaagctgagtagttaagaattccctgtaaaaacaaaaccctgtaaattgagcctcatgtctggtatatattttaccaaacagccttaaaatatatttggaagcaaaaatcagtacgaatgtatctccttgaaaaatgcaaaaaaaaaaaaatccctgaaatattcttctataaatgaatcctatttccccagagtgttcaaggcatttttctacctaaatgaatacctaaatcttgagtagtgtacggtaatgacgcttcttcctatatccactcttattatgttaaaacaaatgtatttgcgagtattggcattttagactttaaaaatgctgtatgatttcagatgaactctgctgtttagaagtaaccacagaaaagcaaagtcagtgtacactctgagtgaaaggaaatgtaatgtggataaaggcccgccacctcctcacattggtctatctactggcagctgatacgtttaactcatttccttgagcttatacaaaacatagaaaagcaaactgttaaagtagtcaataattatttgtctcagatcccagattctatgatccctgcttaaaagaaaatgttcactgcatgtaggttgatttcttatgttttgtagactcattgttatttttcaatccccaaaagtcttggcctaaaccatccctaggggagcagattaacctaccactacattgcacagggttggtgactcgacgtggtgaatgtgcacacgccctgcctggtccgccatgttccaaagaagatgatttaatggtagaacggatacctgctgctagacctgatggaatgttacctgtccgtgttacataatcaagtgcaatatactcagttctcatgcaggtgacattctaccatgaaacgcagaagataagccatgtttctgtattgtacatgtaaagaaaaataaaactgtttatgatacttgtgttagtcactcgagctagcttatttcagccacttctagcagatcatgccatggagctcacgacgtgtgaccatttcgtcatatttaaaatataacttcaagaaaagagtaaacatccattggagaacacggctgaaaattattgtgctgttctaggaacatcatcctagagagtgtgatgttcactataaccccatacctacattccctaatgatacagccaatgacaggtgaaacccagacactctccttagagccgacaggttgatcctgctgtgttgaaggctgtggttaataaaacacaagtatgataaacaggacctagcgtttagcccgggaaaggagaatgctgcttgtcacctagagtgctttccttgtgatgcgtctctcgcatcttcacgtgttgttgtgtttgaagtaaaactagttgttatcgatgacaatttttaccatagttttctcagcaaatttatatcaccatcttagaatggtatataaaaaaattgaactgtttatgataccaaaaaaattacagttttgtttaaaaggaaatgttgatgttttcaactccaaatcaattctaaaaacttcaagcacttaatggaaaggtaaatggtcagataaaaatataattacctgtaaggttatctggttttaaaagaaaaaaaaaaagcctacaaactcagtgacctactacgcagagggaatttttccctgctgcttcttatgaaagtggccaggtttattattagaagacacagtggcagagcacacatgtgcacaggttctgattatttctcttggagcatatgtccttgtcttgatttttgccttttcgatgccatattaagcagccaccgtttccacccctttcattagaaggccctgcatccgtaaattcgcgcatctctgtttttgttagatccttgtaagcatcgctacccgagtccaggatggaatttcacaggaaagtgaagggatactgcaggcctgtgtttgcagcgcctgtggtaactgtggaatgagctctgttagggacagttgtctggtttgtgccaaaccttcgaggggcgagtagggagtgggggaggtgggtccaagtctccctcaggaaggccttttctatcggcagcaattccatcaagccaagcctcctgtggtcctgagcatgaaggggccaggggacctcctgggagatgcagcttttgtttccgctgcgtttcatcagtcagccttgcttggaattctggcaggttccccggggtgtttcagtggacaggaggcccccgtgccgtggctgagtcagcctgggtaccccagtcaccagcagggccacccttgatgacagggccccccacgaacctgggaaaggcagcgggaaatgtgtgagagggtgtgcgctggtacggacataaaagcattgtccaaaacagcgctggttcggggagggcccctggatactgcctttggcccacactgaaaactgaaattgccccacctgtgagcacagaaacacgcttctccaacacgggccgaaataactaaactccacatggttcctgcctgctcatttcccagccctcttcttctcaagcctgaacttcatttttttttttagctgcaaatttaacaggctaatttaaaactgcagttttcagacgacagcccctgggaatgttccagggttctcttgttttgatctgcatgtctgtttacacttctctgtaggcgtgggttgaatacaagtttccaaaactttaaaatagaaaaccacgagcttaagaggtgaaaaagatgacccctttctgattaggatctgtaactctgtgggctgggtcaatgcagtgtgcttcattcagggccatgtggcagccatgacacacaccacataaggtcagctcagagcccatggcttccctgcaggagccccatcttgtcgctattagttgggagttgcaatacattgttggccataaacaaagtgctaaaggaaagggtttgcttctacacattcggctgaatgtcccccagtgcagggtggcagcagaatgttctggaaatgaaggagatattgctaggaatctctaggctgttaggcaacctggcttttattcatcctcagccggcaactcatctcaagtttatgtctcagtttttttcctctagaaaggggattacagttcctgtccctgtcttcctccaggacacactgtgaggattaatgacatattggctctaaagtcctttgagctcctgggaacaggtggtgaaagtgtgcgttactgctaaggattagtccctggcctcttctagaatgccgccctcccagctctgcagggcacgctgccagaatccaggctggtcgtaaacatctcagagataatcagggaccaccagaggcagaggccatgagactgtctttggaaaggtttggaaatgcagaaataactacaagggccattctccttagcttctggctttcaactgtttctagatgcttccaagaacaagaacccagcaccaaccagaattaggccacgttttcaccattacttaagctcaatcgcctcttagatgaaatgaggagataaactaaacattaaaatgatgaaggaaaaaaaattatttggaagccgaaaaccgcatgggtggggaaacatcaggaacgaaatcagacacactgactcaaaccacgcaagggtttgagaagcccacccctctaattccaggcgtttgtaatttttctacttcgcacttgagagaaggcagaggtggtccgtgggaaagctccgggaaacagccgtctttcatccttgccacattgaaaaatgtccacaattttatgaattgctgtcctaaccctggcgtttttatccagtgttaaaataaattatttcaagtttcaatgtaaacacttaacagatgacttctttgcagaagaaatgttcgttacctactatcaaactactttttaacagattttgtatatacacacacaagttgacagaggtttacctccctactttcttagattttatgtaactcttttcattggtgcttattcagaacctgaaagccttgggcatccaagctttcacctactcaatggaggagaggtgataatgaatgaaaagattgacaccaggtttcttggacaaatttaagttcaaatttatctctttcaagtagaccatggtctccctagagagtgtgttggcttgtgtctgccagtacgacaaaggacgctcccagcttgatcgtggtaccttatggaagccactcacgcattctctgatttacccccaaaacactaccatgccccagccccactcatttaaataatacaatcatatcactttcaaagggctcagcacgaatgttcccctcactccactttttaactcgtttgctgaactcgacaaggcttccccttacgagcagtgagacctaggctactttcgaacgcttccttccgaacggtaagccacttcgctctcgggcaggacaggtcctccctgcagagagagacaactcatcccccgaccttccatactacagaccaaaatacccaggtgtggcctaaggactatattaaatgcctcctatagaaattcaaggaatgttagaaccaggaaactagctgtttaaagttttaaagaagtatataaatatatatataaatataaatatgaaatcatatcgagtgtgaggatgagcagagtgccaaatattcagcatctgtacaaagtcattcactggaattcaactattttatgtcattctctttctcacgcttttatggttcttttgataaattctatttagtagcatgcaggatacctaatctgaatgtgcaatatgctattcatcaccacgacaatttcttacttcctcttaataacttaccagaatgttggtcattcctttaaggcagttaaggattgctttatttgtgttcttttttcccatgactttttttcactctcagctgactgtaagaaactgtgcaccgtttccgccataaccgtcctgtgacgatgcctccatttgacttctgtatcgctgatgttcacctcctgtaaatagtttggcaattaaattttttgagaaaagtaatgtttacttttttattggagtgaattctcgtgttattttaatctcagaaaaattatatagaccaaagagttttatccgaaaaaaaattacactcttcctccattatatatttcattgttgaaatatcctcaatttctctatattttaagaagtaatggacatttattaaggttacagatttaatatgtatgcaaaatggtatagattaaatgagtttttaattaataaatcctacagtatttagtt

SEQ ID NO: 5695 - DNA, 5056 bp, Homo sapiens
  source 1..5056: mol_type = unassigned DNA; mol_type = unassigned DNA
cccgcagccgcatctggggcgccgcgccggccggaggagaggcatggggcgcccgcgggccggagccggggcgggggccggggcctaggcgcgcggacctgcgagcggacccgagaggcggcggcggcgcagcggaacggcagagcgggccggaggcggccgaggcgcccggcgcaggcacccgtgcctcccctctgccaggaaccttggggccttgtgtgtgaccaggacctggtggcccccgggcggtggcagagcccctgtcccaagctgcttcctgccggcacctctgatcaagtgcctagagggatgtgtgtgccagccctcggtccagtgcccgctcctgagctgactcctgctgggccccgacagcttgccgtgtttcctgtgcctgtagctccctggttggatagctgccgcccgggagaggtgacccgggcgccctgctagggtgaaggcccctgccctcggcccgggatcatgaaaggcctcggtgacagccgcccccgccacctctccgacagcctagacccaccccacgagcccctgtttgcagggaccgaccgcaacccctacctgctgtcgcccacggaggccttcgcccgcgaggcccgcttccccgggcagaacaccctgccaggagatggcctctttcccctcaacaaccagctgcccccgcccagcagcacctttccccgcatccactacaactcccacttcgaggtgccagaggagagccccttccccagccatgcccaagccaccaagatcaaccggctgcccgccaacctcctggaccagtttgagaagcagctgcccatccaccgtgatggcttcagcaccctccaatttccccgtggcgaggccaaggcccgtggtgagagccctggccgcatccgccacctggtccactcagtccagcggcttttcttcaccaaggcaccctcactggagggcacagcgggcaaggtcggtggcaatggcagcaagaagggtggcatggaggacggcaagggccggagggccaaaagcaaggagcgggccaaggctggggagcccaaacggcgcagccgctccaacatctcaggctggtggagctccgatgacaacttggacggcgaggccggcgccttccgcagcagtggcccagcctctgggctgatgacactaggccgccaggcagaacgcagccagccacgctacttcatgcacgcctacaacaccatcagtgggcacatgctcaaaaccaccaagaacaacactactgagctgactgccccaccacccccgcccgcacccccagccacctgccccagccttggggtgggcactgacaccaactacgtcaaacggggctcctggtccactctgaccctcagccacgcccacgaggtctgccagaagacctcagccaccttggataagagcctgctcaagtccaaatcctgccaccagggtctagcctaccattacctgcaggtgcccggcggcggcggcgagtggagcaccacgctgctgtccccacgcgagacggatgccgcggccgagggccctatcccgtgccggcgcatgcgcagcggcagctacatcaaggccatgggcgacgaggacagcgacgagtccggcggcagccccaagccctcacccaagaccgcggcgcggcgccagagctatctgagggccacgcagcagtcgctgggagagcagagcaacccccgcaggagtctggaccgcctggattcagtggacatgctgctgccctccaagtgtccgagctgggaagaggactacacccccgtcagcgacagcctcaacgactccagctgcatcagccagatttttggacaggcctccctgatcccccagttgtttggccatgagcagcaggtacgggaggcagagctgagtgaccagtatgaggcggcctgcgagtcagcctgcagtgaagcggagtccacagcggcagagacgcttgacttgccactgcccagctacttccgctcccgcagccacagctacctgcgtgccatccaggcaggctgctcgcaggaggaggacagtgtctccctgcagtccctctccccaccgcccagtaccggcagcctcagcaatagtcgcacgcttccgagttcatcatgcctagtggcgtataagaagaccccgccaccggtccctccacgcaccacttcaaagccgttcatctcagtcacagtccagagcagtactgagtctgcccaggacacctacctggacagccaggaccacaagagcgaggtgactagccagtcgggcctgagcaactcgtcggacagcctggacagcagtacccgaccgcccagcgtgacacggggtggagtcgccccagcccctgaggccccagagccacccccaaaacatgcagctctgaaaagtgaacaagggacgctgaccagctctgagtcccaccccgaggccgcccccaaaaggaaactgtcatcgataggaatacaagagaggactagaaggaacggttcccacctctcggaggacaacggacccaaagcgatcgatgtgatggcaccctcctcagaaagcagcgtcccctctcacagtatgtcctcccgacgggacacagactcggatacccaggatgccaatgactcaagctgtaagtcatctgagaggagcctcccggactgtacccctcaccccaactccatcagcatcgatgccggtccccggcaggcccccaagattgcccagatcaagcgcaacctctcctatggagacaacagcgaccctgccctagaggcgtcctcgctgcccccacccgacccctggctcgagacctcctccagctccccagcagagccggcacagccaggggcctgccgccgagacggctactggttcctaaagctactgcaggcagaaacagagcggctggaaggctggtgctgccagatggacaaggagaccaaagagaacaacctctctgaagaagtcttaggaaaagtcctcagtgctgtgggcagtgcccagctactgatgtcccagaaattccagcagttccggggcctctgtgagcaaaacttgaaccctgatgccaacccacgccccacagcccaggacctggcagggttctgggacctgctacagctgtccatcgaggatatcagcatgaagttcgatgaactctaccacctcaaggccaacagctggcagctggtggagacccccgagaagaggaaggaagagaagaaaccaccccctccggtcccaaagaagccagccaaatccaagccggcagtgagccgcgacaaggcctcagacgccagcgacaagcagcgccaggaggcccgcaagagactcctggcggccaagcgggcagcttctgtgcggcagaactcagccaccgagagcgcagacagcatcgagatttatgtcccggaggcccagaccaggctctgagaccatgcaggaggaaagaaacgattttaaatcattaaaaacacaaaaactaagtgcgaacggaacagagttttctcaacctttgctatggttattctgtctagagaccctgagccaactttcaaattgacgcatacaagggctcacaatttggcttttttgggtccctcccagctttaggttatgaagattttactcacaaaaaaaatcaacaaaaatcacgaaactagaaaactttttttttcctcttgctggccgtggtggactagatagatggacgtcggcaactcccggcccagcctccatactgcggtctttttactcgttctatctgatgagaactcacactagcttgtttacaagatgacgacagtccaagggcagccttgggcacctgccatgtccctcctttccccagctatccccgctctgaccttgattttcattcttatgtttttctcttttcccttcagagctcacacagtggtcaccattgtggcaagcggctttctgggtctcagccctctctgcggttgagggcccagaggacagagagatggacatgcgtcccctccctccccccgccaagtgctcacacacaacctcacgcgcacacacacacacgcagatggaggcgcctcactgggaggtgccccgccagccctgggcagtgtcaggcaggactcactcaccgctgagcagatgagggaagttttagtcttggcgggtggaaatgagacgaagccacagttatcacactccagactcctgcccttttattttctccagccccttcttccttcagcaaaatctaggactcccgagtggcttccagggggccgtcagtcctcagccgcgcctgtgtccggtgcccgaggggcgggcggcggtgtctgtatgtatgtgtacatatgcacatagaccttagagtgtatagttaacaaacgcccatctgctcacccatgcccacccagcgccgccgccgctggctctcggggcacctggcaggaggcgggtgtgtgaatagcatatatttttacatgtactatatctaggtgtgtgtacaagtgtgtgtaaaaatatataccttgtgtgtaagcagccctttttttttttggtctccacccccctccccccgccccgcactcctaagggcccatctgcccagcctctgagttttctgttctattttttttttaaccccaattatccttctctctctcctgcccccgcatcccactcccagggtgtcacgagccctgagctgcaatggcccgggcctgcagggcggggtaggggagggcaggggctgagccccgaagccagctcagtacctgaggggctgctctatgctgtgtatgcgcctctctggcatccgagacatcctcttggctggcgcttgctgcagggggggacccccccccgtccccaggtgaaccaagggtctgctccggggcccatttccagcttggccgccgtctgtgaccttgggcaagtcacttgacctctgtgtgcctcaacttcctcctctgtaaaacggggacagtccctgcccctccctacctcacaggcatgttgtgagaataaatgaggtaacgtgtaccaa

SEQ ID NO: 5696 - DNA, 3337 bp, Homo sapiens
  source 1..3337: mol_type = unassigned DNA; mol_type = unassigned DNA
cggcacctctgatcaagtgcctagagggatgtgtgtgccagccctcggtccagtgcccgctcctgagctgactcctgctgggccccgacagcttgccgtgtttcctgtgcctgtagctccctggttggatagctgccgcccgggagaggtgacccgggcgccctgctagggtgaaggcccctgccctcggcccgggatcatgaaaggcctcggtgacagccgcccccgccacctctccgacagcctagacccaccccacgagcccctgtttgcagggaccgaccgcaacccctacctgctgtcgcccacggaggccttcgcccgcgaggcccgcttccccgggcagaacaccctgccaggagatggcctctttcccctcaacaaccagctgcccccgcccagcagcacctttccccgcatccactacaactcccacttcgaggtgccagaggagagccccttccccagccatgcccaagccaccaagatcaaccggctgcccgccaacctcctggaccagtttgagaagcagctgcccatccaccgtgatggcttcagcaccctccaatttccccgtggcgaggccaaggcccgtggtgagagccctggccgcatccgccacctggtccactcagtccagcggcttttcttcaccaaggcaccctcactggagggcacagcgggcaaggtcggtggcaatggcagcaagaagggtggcatggaggacggcaagggccggagggccaaaagcaaggagcgggccaaggctggggagcccaaacggcgcagccgctccaacatctcaggctggtggagctccgatgacaacttggacggcgaggccggcgccttccgcagcagtggcccagcctctgggctgatgacactaggccgccaggcagaacgcagccagccacgctacttcatgcacgcctacaacaccatcagtgggcacatgctcaaaaccaccaagaacaacactactgagctgactgccccaccacccccgcccgcacccccagccacctgccccagccttggggtgggcactgacaccaactacgtcaaacggggctcctggtccactctgaccctcagccacgcccacgaggtctgccagaagacctcagccaccttggataagagcctgctcaagtccaaatcctgccaccagggtctagcctaccattacctgcaggtgcccggcggcggcggcgagtggagcaccacgctgctgtccccacgcgagacggatgccgcggccgagggccctatcccgtgccggcgcatgcgcagcggcagctacatcaaggccatgggcgacgaggacagcgacgagtccggcggcagccccaagccctcacccaagaccgcggcgcggcgccagagctatctgagggccacgcagcagtcgctgggagagcagagcaacccccgcaggagtctggaccgcctggattcagtggacatgctgctgccctccaagtgtccgagctgggaagaggactacacccccgtcagcgacagcctcaacgactccagctgcatcagccagatttttggacaggcctccctgatcccccagttgtttggccatgagcagcaggtacgggaggcagagctgagtgaccagtatgaggcggcctgcgagtcagcctgcagtgaagcggagtccacagcggcagagacgcttgacttgccactgcccagctacttccgctcccgcagccacagctacctgcgtgccatccaggcaggctgctcgcaggaggaggacagtgtctccctgcagtccctctccccaccgcccagtaccggcagcctcagcaatagtcgcacgcttccgagttcatcatgcctagtggcgtataagaagaccccgccaccggtccctccacgcaccacttcaaagccgttcatctcagtcacagtccagagcagtactgagtctgcccaggacacctacctggacagccaggaccacaagagcgaggtgactagccagtcgggcctgagcaactcgtcggacagcctggacagcagtacccgaccgcccagcgtgacacggggtggagtcgccccagcccctgaggccccagagccacccccaaaacatgcagctctgaaaagtgaacaagggacgctgaccagctctgagtcccaccccgaggccgcccccaaaaggaaactgtcatcgataggaatacaagttgactgcattcagccagtgccaaaagaggagcccagtcccgctaccaaattccagtccatcggggttcaggtagaggacgactggcgaagcagcgtcccctctcacagtatgtcctcccgacgggacacagactcggatacccaggatgccaatgactcaagctgtaagtcatctgagaggagcctcccggactgtacccctcaccccaactccatcagcatcgatgccggtccccggcaggcccccaagattgcccagatcaagcgcaacctctcctatggagacaacagcgaccctgccctagaggcgtcctcgctgcccccacccgacccctggctcgagacctcctccagctccccagcagagccggcacagccaggggcctgccgccgagacggctactggttcctaaagctactgcaggcagaaacagagcggctggaaggctggtgctgccagatggacaaggagaccaaagagaacaacctctctgaagaagtcttaggaaaagtcctcagtgctgtgggcagtgcccagctactgatgtcccagaaattccagcagttccggggcctctgtgagcaaaacttgaaccctgatgccaacccacgccccacagcccaggacctggcagggttctgggacctgctacagctgtccatcgaggatatcagcatgaagttcgatgaactctaccacctcaaggccaacagctggcagctggtggagacccccgagaagaggaaggaagagaagaaaccaccccctccggtcccaaagaagccagccaaatccaagccggcagtgagccgcgacaaggcctcagacgccagcgacaagcagcgccaggaggcccgcaagagactcctggcggccaagcgggcagcttctgtgcggcagaactcagccaccgagagcgcagacagcatcgagatttatgtcccggaggcccagaccaggctctgagaccatgcaggaggaaagaaacgattttaaatcattaaaaacacaaaaactaagtgcgaacggaacagagttttctcaacctttgctatggttattctgtctagagaccctgagccaactttcaaattgacgcatacaagggctcacaatttggctttt

SEQ ID NO: 5697 - DNA, 3110 bp, Homo sapiens
  source 1..3110: mol_type = unassigned DNA; mol_type = unassigned DNA
acatgccaagcgggctgcgcgcgcccctgcccggcccgggagtccctgacgacgcgcgcgcggctgacgcggggggcggggaggggcggggcaggtgcgggactttaacccggagccccgcccctcgggcgtacaaaaccggagcctcgggccgggctgcgtgagggaggagggttcatcatgcctagtggcgtataagaagaccccgccaccggtccctccacgcaccacttcaaagccgttcatctcagtcacagtccagagcagtactgagtctgcccaggacacctacctggacagccaggaccacaagagcgaggtgactagccagtcgggcctgagcaactcgtcggacagcctggacagcagtacccgaccgcccagcgtgacacggggtggagtcgccccagcccctgaggccccagagccacccccaaaacatgcagctctgaaaagtgaacaagggacgctgaccagctctgagtcccaccccgaggccgcccccaaaaggaaactgtcatcgataggaatacaagttgactgcattcagccagtgccaaaagaggagcccagtcccgctaccaaattccagtccatcggggttcaggtagaggacgactggcgaagcagcgtcccctctcacagtatgtcctcccgacgggacacagactcggatacccaggatgccaatgactcaagctgtaagtcatctgagaggagcctcccggactgtacccctcaccccaactccatcagcatcgatgccggtccccggcaggcccccaagattgcccagatcaagcgcaacctctcctatggagacaacagcgaccctgccctagaggcgtcctcgctgcccccacccgacccctggctcgagacctcctccagctccccagcagagccggcacagccaggggcctgccgccgagacggctactggttcctaaagctactgcaggcagaaacagagcggctggaaggctggtgctgccagatggacaaggagaccaaagagaacaacctctctgaagaagtcttaggaaaagtcctcagtgctgtgggcagtgcccagctactgatgtcccagaaattccagcagttccggggcctctgtgagcaaaacttgaaccctgatgccaacccacgccccacagcccaggacctggcagggttctgggacctgctacagctgtccatcgaggatatcagcatgaagttcgatgaactctaccacctcaaggccaacagctggcagctggtggagacccccgagaagaggaaggaagagaagaaaccaccccctccggtcccaaagaagccagccaaatccaagccggcagtgagccgcgacaaggcctcagacgccagcgacaagcagcgccaggaggcccgcaagagactcctggcggccaagcgggcagcttctgtgcggcagaactcagccaccgagagcgcagacagcatcgagatttatgtcccggaggcccagaccaggctctgagaccatgcaggaggaaagaaacgattttaaatcattaaaaacacaaaaactaagtgcgaacggaacagagttttctcaacctttgctatggttattctgtctagagaccctgagccaactttcaaattgacgcatacaagggctcacaatttggcttttttgggtccctcccagctttaggttatgaagattttactcacaaaaaaaatcaacaaaaatcacgaaactagaaaactttttttttcctcttgctggccgtggtggactagatagatggacgtcggcaactcccggcccagcctccatactgcggtctttttactcgttctatctgatgagaactcacactagcttgtttacaagatgacgacagtccaagggcagccttgggcacctgccatgtccctcctttccccagctatccccgctctgaccttgattttcattcttatgtttttctcttttcccttcagagctcacacagtggtcaccattgtggcaagcggctttctgggtctcagccctctctgcggttgagggcccagaggacagagagatggacatgcgtcccctccctccccccgccaagtgctcacacacaacctcacgcgcacacacacacacgcagatggaggcgcctcactgggaggtgccccgccagccctgggcagtgtcaggcaggactcactcaccgctgagcagatgagggaagttttagtcttggcgggtggaaatgagacgaagccacagttatcacactccagactcctgcccttttattttctccagccccttcttccttcagcaaaatctaggactcccgagtggcttccagggggccgtcagtcctcagccgcgcctgtgtccggtgcccgaggggcgggcggcggtgtctgtatgtatgtgtacatatgcacatagaccttagagtgtatagttaacaaacgcccatctgctcacccatgcccacccagcgccgccgccgctggctctcggggcacctggcaggaggcgggtgtgtgaatagcatatatttttacatgtactatatctaggtgtgtgtacaagtgtgtgtaaaaatatataccttgtgtgtaagcagccctttttttttttggtctccacccccctccccccgccccgcactcctaagggcccatctgcccagcctctgagttttctgttctattttttttttaaccccaattatccttctctctctcctgcccccgcatcccactcccagggtgtcacgagccctgagctgcaatggcccgggcctgcagggcggggtaggggagggcaggggctgagccccgaagccagctcagtacctgaggggctgctctatgctgtgtatgcgcctctctggcatccgagacatcctcttggctggcgcttgctgcagggggggacccccccccgtccccaggtgaaccaagggtctgctccggggcccatttccagcttggccgccgtctgtgaccttgggcaagtcacttgacctctgtgtgcctcaacttcctcctctgtaaaacggggacagtccctgcccctccctacctcacaggcatgttgtgagaataaatgaggtaacgtgtaccaa

SEQ ID NO: 5698 - DNA, 839 bp, Homo sapiens
  source 1..839: mol_type = unassigned DNA; mol_type = unassigned DNA
gtacaaaaccggagcctcgggccgggctgcgtgagggaggagggctgtgtgaggcattgtgtaatcagccaggctctttcccgaccattgttctccaccaacaggcctggaagtcggaagccagtggagttctccctgtttcacaggttcatcatgcctagtggcgtataagaagaccccgccaccggtccctccacgcaccacttcaaagccgttcatctcagtcacagtccagagcagtactgagtctgcccaggacacctacctggacagccaggaccacaagagcgaggtgactagccagtcgggcctgagcaactcgtcggacagcctggacagcagtacccgaccgcccagcgtgacacggggtggagtcgccccagcccctgaggccccagagccacccccaaaacatgcagctctgaaaagtgaacaagggacgctgaccagctctgagtcccaccccgaggccgcccccaaaaggaaactgtcatcgataggaatacaagagaggactagaaggaacggttcccacctctcggaggacaacggacccaaagcgatcgatgtgatggcaccctcctcagagttgactgcattcagccagtgccaaaagaggagcccagtcccgctaccaaattccagtccatcggggttcaggtagaggacgactggcgaagcagcgtcccctctcacagtatgtcctcccgacgggacacagactcggatacccaggatgccaatgactcaagctgtaagtcatctgagaggagcctcccggactgtacccctcaccccaactccatcagcatcgatgccggtccccggcaggcccccaa

SEQ ID NO: 5699 - DNA, 794 bp, Homo sapiens
  source 1..794: mol_type = unassigned DNA; mol_type = unassigned DNA
ggagcctcgggccgggctgcgtgagggaggagggttcatcatgcctagtggcgtataagaagaccccgccaccggtccctccacgcaccacttcaaagccgttcatctcagtcacagtccagagcagtactgagtctgcccaggacacctacctggacagccaggaccacaagagcgaggtgactagccagtcgggcctgagcaactcgtcggacagcctggacagcagtacccgaccgcccagcgtgacacggggtggagtcgccccagcccctgaggccccagagccacccccaaaacatgcagctctgaaaagtgaacaagggacgctgaccagctctgagtcccaccccgaggccgcccccaaaaggaaactgtcatcgataggaatacaaaagcagcgtcccctctcacagtatgtcctcccgacgggacacagactcggatacccaggatgccaatgactcaagctgtaagtcatctgagaggagcctcccggactgtacccctcaccccaactccatcagcatcgatgccggtccccggcaggcccccaagattgcccagatcaagcgcaacctctcctatggagacaacagcgaccctgccctagaggcgtcctcgctgcccccacccgacccctggctcgagacctcctccagctccccagcagagccggcacagccaggggcctgccgccgagacggctactggttcctaaagctactgcaggcagaaacagagcggctggaaggctggtgctgccagatggacaaggagaccaaagagaacaa

SEQ ID NO: 5700 - DNA, 469 bp, Homo sapiens
  source 1..469: mol_type = unassigned DNA; mol_type = unassigned DNA
agcctcgggccgggctgcgtgagggaggagggttcatcatgcctagtggcgtataagaagaccccgccaccggtccctccacgcaccacttcaaagccgttcatctcagtcacagtccagagcagtactgagtctgcccaggacacctacctggacagccaggaccacaagagcgaggtgactagccagtcgggcctgagcaactcgtcggacagcctggacagcagtacccgaccgcccagcgtgacacggggtggagtcgccccagcccctgaggccccagagccacccccaaaacatgcagctctgaaaagtgaacaagggacgctgaccagctctgagtcccaccccgaggccgcccccaaaaggaaactgtcatcgataggaatacaagagaggactagaaggaacggttcccacctctcggaggacaacggacccaaagcgatcgatgtgatggcaccctcct

SEQ ID NO: 5701 - DNA, 603 bp, Homo sapiens
  source 1..603: mol_type = unassigned DNA; mol_type = unassigned DNA
ggctgcgtgagggaggagggcccagttgtgtctgtaccagaaatgaggagtgatgccaagcctaggcctggcccagccttagcttctgcaatgcaacctatgtaatcacacccattttacaaggaggaaactggggccatacaacaggttcatcatgcctagtggcgtataagaagaccccgccaccggtccctccacgcaccacttcaaagccgttcatctcagtcacagtccagagcagtactgagtctgcccaggacacctacctggacagccaggaccacaagagcgaggtgactagccagtcgggcctgagcaactcgtcggacagcctggacagcagtacccgaccgcccagcgtgacacggggtggagtcgccccagcccctgaggccccagagccacccccaaaacatgcagctctgaaaagtgaacaagggacgctgaccagctctgagtcccaccccgaggccgcccccaaaaggaaactgtcatcgataggaatacaagttgactgcattcagccagtgccaaaagaggagcccagtcccgctaccaaattccagtccatcggggttcaggtagaggacgactggcgaagca

SEQ ID NO: 5702 - DNA, 2392 bp, Homo sapiens
  source 1..2392: mol_type = unassigned DNA; mol_type = unassigned DNA
gtccgcccgcccgcccgcccgcccgcgcttccgtcctgtccagccgccagtcctccagcccgtgtccccgctccgcccgctttgtctctccccggctcgctgtctctttgtctctgccctcgcgctcctccgcagcccctccctcgctccccatctcgggtccccttctcagagcgctcttcagccctcagagccgccctttctgggcgaccccactcttcgggactccccctcagagcgcccccagatcttttggggttccccttgagaacaccttccactctccccaagggctccccgtgagtttcttgcacatcctttgggggttctgcaccccaagtcgctggggtctcgcctcctctgaacccccattgcccctgggctttccctcttctgggtgttccccatatccactgggagctcctaggtcccaagttggggtctttctccttgggaccccccaatatgtcctcagctccctgacttcaggagctcctctctgctttcccctggtttgtcccctgtcgctgtctctccttgttctctctcaggtctccgagcacccccacttctcgggatcggggtcccctgctttgctctccctgcccctctgtgcccccacatctgtctcggtggtctcgccactctgtgcctcttgcgctgaaggcccccctttgagcctgcttctttgcctggggcccttggcccccccttgctttttcagccctagccccctgtctccccttctctctgctccttgtctccctctccctttttctgtctttgccgggtctctgggtctctgacccccatccggccctcatggctttgtgtctggagctcttgaagcaatgttcatcatgcctagtggcgtataagaagaccccgccaccggtccctccacgcaccacttcaaagccgttcatctcagtcacagtccagagcagtactgagtctgcccaggacacctacctggacagccaggaccacaagagcgaggtgactagccagtcgggcctgagcaactcgtcggacagcctggacagcagtacccgaccgcccagcgtgacacggggtggagtcgccccagcccctgaggccccagagccacccccaaaacatgcagctctgaaaagtgaacaagggacgctgaccagctctgagtcccaccccgaggccgcccccaaaaggaaactgtcatcgataggaatacaagttgactgcattcagccagtgccaaaagaggagcccagtcccgctaccaaattccagtccatcggggttcaggtagaggacgactggcgaagcagcgtcccctctcacagtatgtcctcccgacgggacacagactcggatacccaggatgccaatgactcaagctgtaagtcatctgagaggagcctcccggactgtacccctcaccccaactccatcagcatcgatgccggtccccggcaggcccccaagattgcccagatcaagcgcaacctctcctatggagacaacagcgaccctgccctagaggcgtcctcgctgcccccacccgacccctggctcgagacctcctccagctccccagcagagccggcacagccaggggcctgccgccgagacggctactggttcctaaagctactgcaggcagaaacagagcggctggaaggctggtgctgccagatggacaaggagaccaaagagaacaacctctctgaagaagtcttaggaaaagtcctcagtgctgtgggcagtgcccagctactgatgtcccagaaattccagcagttccggggcctctgtgagcaaaacttgaaccctgatgccaacccacgccccacagcccaggacctggcagggttctgggacctgctacagctgtccatcgaggatatcagcatgaagttcgatgaactctaccacctcaaggccaacagctggcagctggtggagacccccgagaagaggaaggaagagaagaaaccaccccctccggtcccaaagaagccagccaaatccaagccggcagtgagccgcgacaaggcctcagacgccagcgacaagcagcgccaggaggcccgcaagagactcctggcggccaagcgggcagcttctgtgcggcagaactcagccaccgagagcgcagacagcatcgagatttatgtcccggaggcccagaccaggctctgagaccatgcaggaggaaagaaacgattttaaatcattaaaaacacaaaaactaagtgcgaacggaacagagttttctcaacctttgctatggttattctgtctagagaccctgagccaactttcaaattgacgcatacaagggctcacaatttggcttttttgggtccctcccagctttaggttatgaagattttactcacaaaaaaaa

SEQ ID NO: 5703 - DNA, 577 bp, Homo sapiens
  source 1..577: mol_type = unassigned DNA; mol_type = unassigned DNA
gaaatcctggcttcccaaacccagctttcacagagcatttcactttccctgaaggttcatcatgcctagtggcgtataagaagaccccgccaccggtccctccacgcaccacttcaaagccgttcatctcagtcacagtccagagcagtactgagtctgcccaggacacctacctggacagccaggaccacaagagcgaggtgactagccagtcgggcctgagcaactcgtcggacagcctggacagcagtacccgaccgcccagcgtgacacggggtggagtcgccccagcccctgaggccccagagccacccccaaaacatgcagctctgaaaagtgaacaagggacgctgaccagctctgagtcccaccccgaggccgcccccaaaaggaaactgtcatcgataggaatacaagttgactgcattcagccagtgccaaaagaggagcccagtcccgctaccaaattccagtccatcggggttcaggtagaggacgactggcgaagcagcgtcccctctcacagtatgtcctcccgacgggacacagactcggatacccaggatgccaatgactc

SEQ ID NO: 5704 - DNA, 2396 bp, Homo sapiens
  source 1..2396: mol_type = unassigned DNA; mol_type = unassigned DNA
tcactttcctcttaccgaatcaggcctggacttgctttctggctgggttactttccctctgatgactggctgcctaggccagggctcagggcgtctgagggtgcttagtagaactctgggcccagcagctctgagagagaggctggagggtcagtcctttgtccagaccctgactgtgggcagtcctgttgtcttccattgggaagaaggtgtgcctcttcccaccagaacctcgtgaatgctgcatgcacactcttcatggacagtgtcatccctaccccacagatgggaacaaggactctggtgtcacacagcctaagctaggcttagtgcccagttcttgctcccccatactaactgctaccctcctaagggagatatactcccttaaacattttgagcaaattgaggttggcttccgttttctgatctagggcaaaaaaccccatttgtttgggactttaggtcaaacaaatccattcctttcctgaaatcctcagtgagttagtcctgtctctgctggtggccatagatttcaagagttgctctaaacaaacgtccaggtcttggtggaaactgtccctgggccagtcagagaaccagcccagactccctgccagtggctggggagtggtagaaatttggctcgcccccccatccccaccctacccacaggcccagttgtgtctgtaccagaaatgaggagtgatgccaagcctaggcctggcccagccttagcttctgcaatgcaacctatgtaatcacacccattttacaaggaggaaactggggccatacaacaggttcatcatgcctagtggcgtataagaagaccccgccaccggtccctccacgcaccacttcaaagccgttcatctcagtcacagtccagagcagtactgagtctgcccaggacacctacctggacagccaggaccacaagagcgaggtgactagccagtcgggcctgagcaactcgtcggacagcctggacagcagtacccgaccgcccagcgtgacacggggtggagtcgccccagcccctgaggccccagagccacccccaaaacatgcagctctgaaaagtgaacaagggacgctgaccagctctgagtcccaccccgaggccgcccccaaaaggaaactgtcatcgataggaatacaagagaggactagaaggaacggttcccacctctcggaggacaacggacccaaagcgatcgatgtgatggcaccctcctcagaaagcagcgtcccctctcacagtatgtcctcccgacgggacacagactcggatacccaggatgccaatgactcaagctgtaagtcatctgagaggagcctcccggactgtacccctcaccccaactccatcagcatcgatgccggtccccggcaggcccccaagattgcccagatcaagcgcaacctctcctatggagacaacagcgaccctgccctagaggcgtcctcgctgcccccacccgacccctggctcgagacctcctccagctccccagcagagccggcacagccaggggcctgccgccgagacggctactggttcctaaagctactgcaggcagaaacagagcggctggaaggctggtgctgccagatggacaaggagaccaaagagaacaacctctctgaagaagtcttaggaaaagtcctcagtgctgtgggcagtgcccagctactgatgtcccagaaattccagcagttccggggcctctgtgagcaaaacttgaaccctgatgccaacccacgccccacagcccaggacctggcagggttctgggacctgctacagctgtccatcgaggatatcagcatgaagttcgatgaactctaccacctcaaggccaacagctggcagctggtggagacccccgagaagaggaaggtgagcatggagcagtgcggaggggaagtccagggacaaattcctggtcggcaataacgctgcccacatcggaagagaagaaaccaccccctccggtcccaaagaagccagccaaatccaagccggcagtgagccgcgacaaggcctcagacgccagcgacaagcagcgccaggaggcccgcaagagactcctggcggccaagcgggcagcttctgtgcggcagaactcagccaccgagagcgcagacagcatcgagatttatgtcccggaggcccagaccaggctctgagaccatgcaggaggaaagaaacgattttaaatcattaaaaacacaaaaactaagtgcgaacggaacagagttttctcaacctttgctatggttattctgtctagagaccctgagccaactttcaaattgacgcatacaagggctcacaatttggcttttttgggtccctcccagctttaggttatgaagattttactcac

SEQ ID NO: 5705 - DNA, 631 bp, Homo sapiens
  source 1..631: mol_type = unassigned DNA; mol_type = unassigned DNA
gggacgctgaccagctctgagtcccaccccgaggccgcccccaaaaggaaactgtcatcgataggaatacaagtcagctcgggtgcggaggccatagccccgcttggcggcaggagcagcatggagcatagacgctgttgggccaggggcccaggacccagggcccttgagccatgggggttgctcgaggggaactttgcccagagccctctcgggccttggggacagccagtgccaaaagaggagcccagtcccgctaccaaattccagtccatcggggttcaggtagaggacgactggcgaagcagcgtcccctctcacagtatgtcctcccgacgggacacagactcggatacccaggatgccaatgactcaagctgtaagtcatctgagaggagcctcccggactgtacccctcaccccaactccatcagcatcgatgccggtccccggcaggcccccaagattgcccagatcaagcgcaacctctcctatggagacaacagcgaccctgccctagaggcgtcctcgctgcccccacccgacccctggctcgagacctcctccagctccccagcagagccggcacagccaggggcctgccgccgagacggctactggttcctaaagc

SEQ ID NO: 5706 - DNA, 2674 bp, Homo sapiens
  source 1..2674: mol_type = unassigned DNA; mol_type = unassigned DNA
tgtcttgtttgctgagctggggaaacttgggccctgccttgtagtttttaagagtttctctaaatccagattgagtggactctccctgccctggctggacctgcagaccaaactagggcacgttcagagccatgagggaggggcagctacagtgggtgagggcgagaggggagacagggcccccccaagcccaggggttgagtcagggaggacgaggcattgtgtgttgtggcacaggctgcaagggactcctccagccacccctgagcaattggatgtggcccagctgataacaaagcactggaatgcaggagcgtgggacacaaagtggagcttgaatggaacagagaaggctcactgagcaatttcttgcagttgcctgtatttgtttcctccaagaggcagctctaggcttccacttccccatgtataaacagagagagagttggccaggagactctgctgctgttttctgggcttcttaagtgtccagtccctgcgctgcacaggtgggattctcagaaacacagagagtagcctgatcttcaacccttggtcctgaccacccatatctttgggcagccccaccctcttgctggccaaaccagacgctcttatcttcccggaaagcctaagagttaggactacccttgattcctttcacccagaaaatgacaccgggataaggactctcttaggcctgtcctgggcgtcccattccctggattcaccccagccccattcttggtctcattgcagctccttggagatccagtggtgctgcattccttgagccggcttttgccgaggggaaatgtggctgcatccctgtcccagaaagcttccctggcccctacttctctccacaaggccaagagactgaagagtccccagtttctgaggatgccctgaacccttggtgcctcatgccctagattgagtgtgggtttctccctcattcttgagtgatgataggaaagctggcctggctgccccatggcccgggacctttgtcccagagaagaaaggcaggcgcagggcatcactgttgtcctgttccacttcacaggagtggagggagtgacagctttccacttggccctgaccccagtccttcctactgctccccagggccacccagtgctaaaggtaacctcagccaagtgtgaataacgtccagggacttcggtggctcctgtgggtggcagtttctgaatctagaactgccgtccagggtttgcccttagtgcaggcgcctctggcctgccctccaggtttctgccacagggttcagggagtgatctttgcctcaagacagccgccagcttcaactacaccagataacggctgtggctttgtgtgtgtgtgtgtgttttctttctctttcgtcgtccttttttttttttctctctgatgcgtgtgaaggagaggactagaaggaacggttcccacctctcggaggacaacggacccaaagcgatcgatgtgatggcaccctcctcagagttgactgcattcagccagtgccaaaagaggagcccagtcccgctaccaaattccagtccatcggggttcaggtagaggacgactggcgaagcagcgtcccctctcacagtatgtcctcccgacgggacacagactcggatacccaggatgccaatgactcaagctgtaagtcatctgagaggagcctcccggactgtacccctcaccccaactccatcagcatcgatgccggtccccggcaggcccccaagattgcccagatcaagcgcaacctctcctatggagacaacagcgaccctgccctagaggcgtcctcgctgcccccacccgacccctggctcgagacctcctccagctccccagcagagccggcacagccaggggcctgccgccgagacggctactggttcctaaagctactgcaggcagaaacagagcggctggaaggctggtgctgccagatggacaaggagaccaaagagaacaacctctctgaagaagtcttaggaaaagtcctcagtgctgtgggcagtgcccagctactgatgtcccagaaattccagcagttccggggcctctgtgagcaaaacttgaaccctgatgccaacccacgccccacagcccaggacctggcagggttctgggacctgctacagctgtccatcgaggatatcagcatgaagttcgatgaactctaccacctcaaggccaacagctggcagctggtggagacccccgagaagaggaaggaagagaagaaaccaccccctccggtcccaaagaagccagccaaatccaagccggcagtgagccgcgacaaggcctcagacgccagcgacaagcagcgccaggaggcccgcaagagactcctggcggccaagcgggcagcttctgtgcggcagaactcagccaccgagagcgcagacagcatcgagatttatgtcccggaggcccagaccaggctctgagaccatgcaggaggaaagaaacgattttaaatcattaaaaacacaaaaactaagtgcgaacggaacagagttttctcaacctttgctatggttattctgtctagagaccctgagccaactttcaaattgacgcatacaagggctcacaatttggcttttttgggtccctcccagctttaggttatgaagattttactcac

SEQ ID NO: 5707 - DNA, 467 bp, Homo sapiens
  source 1..467: mol_type = unassigned DNA; mol_type = unassigned DNA
agaagcagcgtcccctctcacagtatgtcctcccgacgggacacagactcggatacccaggatgccaatgactcaagctacggctactggttcctaaagctactgcaggcagaaacagagcggctggaaggctggtgctgccagatggacaaggagaccaaagagaacaacctctctgaagaagtcttaggaaaagtcctcagtgctgtgggcagtgcccagctactgatgtcccagaaattccagcagttccggggcctctgtgagcaaaacttgaaccctgatgccaacccacgccccacagcccaggacctggcagggttctgggacctgctacagctgtccatcgaggatatcagcatgaagttcgatgaactctaccacctcaaggccaacagctggcagctggtggagacccccgagaagaggaaggaagagaagaaaccaccccctccggtcccaaagaa

SEQ ID NO: 5708 - DNA, 490 bp, Homo sapiens
  source 1..490: mol_type = unassigned DNA; mol_type = unassigned DNA
ctgtgagcaaaacttgaaccctgatgccaacccacgccccacagcccaggacctggcagggttctgggacctgctacagctgtccatcgaggatatcagcatgaagttcgatgaactctaccacctcaaggccaacagctggcagctggtggagacccccgagaagaggaaggtgagcatggagcagtgcggaggggaagtccagggacaaattcctggtcggcaataacgctgcccacatcggaagagaagaaaccaccccctccggtcccaaagaagccagccaaatccaagccggcagtgagccgcgacaaggcctcagacgccagcgacaagcagcgccaggaggcccgcaagagactcctggcggccaagcgggcagcttctgtgcggcagaactcagccaccgagagcgcagacagcatcgagatttatgtcccggaggcccagaccaggctctgagaccatgcaggaggaaagaaacgatttt

SEQ ID NO: 5709 - DNA, 4881 bp, Homo sapiens
  source 1..4881: mol_type = unassigned DNA; mol_type = unassigned DNA
gcaggcacccgtgcctcccctctgccaggaaccttggggccttgtgtgtgaccaggacctggtggcccccgggcggtggcagagcccctgtcccaagctgcttcctgccggcacctctgatcaagtgcctagagggatgtgtgtgccagccctcggtccagtgcccgctcctgagctgactcctgctgggccccgacagcttgccgtgtttcctgtgcctgtagctccctggttggatagctgccgcccgggagaggtgacccgggcgccctgctagggtgaaggcccctgccctcggcccgggatcatgaaaggcctcggtgacagccgcccccgccacctctccgacagcctagacccaccccacgagcccctgtttgcagggaccgaccgcaacccctacctgctgtcgcccacggaggccttcgcccgcgaggcccgcttccccgggcagaacaccctgccaggagatggcctctttcccctcaacaaccagctgcccccgcccagcagcacctttccccgcatccactacaactcccacttcgaggtgccagaggagagccccttccccagccatgcccaagccaccaagatcaaccggctgcccgccaacctcctggaccagtttgagaagcagctgcccatccaccgtgatggcttcagcaccctccaatttccccgtggcgaggccaaggcccgtggtgagagccctggccgcatccgccacctggtccactcagtccagcggcttttcttcaccaaggcaccctcactggagggcacagcgggcaaggtcggtggcaatggcagcaagaagggtggcatggaggacggcaagggccggagggccaaaagcaaggagcgggccaaggctggggagcccaaacggcgcagccgctccaacatctcaggctggtggagctccgatgacaacttggacggcgaggccggcgccttccgcagcagtggcccagcctctgggctgatgacactaggccgccaggcagaacgcagccagccacgctacttcatgcacgcctacaacaccatcagtgggcacatgctcaaaaccaccaagaacaacactactgagctgactgccccaccacccccgcccgcacccccagccacctgccccagccttggggtgggcactgacaccaactacgtcaaacggggctcctggtccactctgaccctcagccacgcccacgaggtctgccagaagacctcagccaccttggataagagcctgctcaagtccaaatcctgccaccagggtctagcctaccattacctgcaggtgcccggcggcggcggcgagtggagcaccacgctgctgtccccacgcgagacggatgccgcggccgagggccctatcccgtgccggcgcatgcgcagcggcagctacatcaaggccatgggcgacgaggacagcgacgagtccggcggcagccccaagccctcacccaagaccgcggcgcggcgccagagctatctgagggccacgcagcagtcgctgggagagcagagcaacccccgcaggagtctggaccgcctggattcagtggacatgctgctgccctccaagtgtccgagctgggaagaggactacacccccgtcagcgacagcctcaacgactccagctgcatcagccagatttttggacaggcctccctgatcccccagttgtttggccatgagcagcaggtacgggaggcagagctgagtgaccagtatgaggcggcctgcgagtcagcctgcagtgaagcggagtccacagcggcagagacgcttgacttgccactgcccagctacttccgctcccgcagccacagctacctgcgtgccatccaggcaggctgctcgcaggaggaggacagtgtctccctgcagtccctctccccaccgcccagtaccggcagcctcagcaatagtcgcacgcttccgagttcatcatgcctagtggcgtataagaagaccccgccaccggtccctccacgcaccacttcaaagccgttcatctcagtcacagtccagagcagtactgagtctgcccaggacacctacctggacagccaggaccacaagagcgaggtgactagccagtcgggcctgagcaactcgtcggacagcctggacagcagtacccgaccgcccagcgtgacacggggtggagtcgccccagcccctgaggccccagagccacccccaaaacatgcagctctgaaaagtgaacaagggacgctgaccagctctgagtcccaccccgaggccgcccccaaaaggaaactgtcatcgataggaatacaagagaggactagaaggaacggttcccacctctcggaggacaacggacccaaagcgatcgatgtgatggcaccctcctcagaaagcagcgtcccctctcacagtatgtcctcccgacgggacacagactcggatacccaggatgccaatgactcaagctgtaagtcatctgagaggagcctcccggactgtacccctcaccccaactccatcagcatcgatgccggtccccggcaggcccccaagattgcccagatcaagcgcaacctctcctatggagacaacagcgaccctgccctagaggcgtcctcgctgcccccacccgacccctggctcgagacctcctccagctccccagcagagccggcacagccaggggcctgccgccgagacggctactggttcctaaagctactgcaggcagaaacagagcggctggaaggctggtgctgccagatggacaaggagaccaaagagaacaacctctctgaagaagtcttaggaaaagtcctcagtgctgtgggcagtgcccagctactgatgtcccagaaattccagcagttccggggcctctgtgagcaaaacttgaaccctgatgccaacccacgccccacagcccaggacctggcagggttctgggacctgctacagctgtccatcgaggatatcagcatgaagttcgatgaactctaccacctcaaggccaacagctggcagctggtggagacccccgagaagaggaaggaagagaagaaaccaccccctccggtcccaaagaagccagccaaatccaagccggcagtgagccgcgacaaggcctcagacgccagcgacaagcagcgccaggaggcccgcaagagactcctggcggccaagcgggcagcttctgtgcggcagaactcagccaccgagagcgcagacagcatcgagatttatgtcccggaggcccagaccaggctctgagaccatgcaggaggaaagaaacgattttaaatcattaaaaacacaaaaactaagtgcgaacggaacagagttttctcaacctttgctatggttattctgtctagagaccctgagccaactttcaaattgacgcatacaagggctcacaatttggcttttttgggtccctcccagctttaggttatgaagattttactcacaaaaaaaatcaacaaaaatcacgaaactagaaaactttttttttcctcttgctggccgtggtggactagatagatggacgtcggcaactcccggcccagcctccatactgcggtctttttactcgttctatctgatgagaactcacactagcttgtttacaagatgacgacagtccaagggcagccttgggcacctgccatgtccctcctttccccagctatccccgctctgaccttgattttcattcttatgtttttctcttttcccttcagagctcacacagtggtcaccattgtggcaagcggctttctgggtctcagccctctctgcggttgagggcccagaggacagagagatggacatgcgtcccctccctccccccgccaagtgctcacacacaacctcacgcgcacacacacacacgcagatggaggcgcctcactgggaggtgccccgccagccctgggcagtgtcaggcaggactcactcaccgctgagcagatgagggaagttttagtcttggcgggtggaaatgagacgaagccacagttatcacactccagactcctgcccttttattttctccagccccttcttccttcagcaaaatctaggactcccgagtggcttccagggggccgtcagtcctcagccgcgcctgtgtccggtgcccgaggggcgggcggcggtgtctgtatgtatgtgtacatatgcacatagaccttagagtgtatagttaacaaacgcccatctgctcacccatgcccacccagcgccgccgccgctggctctcggggcacctggcaggaggcgggtgtgtgaatagcatatatttttacatgtactatatctaggtgtgtgtacaagtgtgtgtaaaaatatataccttgtgtgtaagcagccctttttttttttggtctccacccccctccccccgccccgcactcctaagggcccatctgcccagcctctgagttttctgttctattttttttttaaccccaattatccttctctctctcctgcccccgcatcccactcccagggtgtcacgagccctgagctgcaatggcccgggcctgcagggcggggtaggggagggcaggggctgagccccgaagccagctcagtacctgaggggctgctctatgctgtgtatgcgcctctctggcatccgagacatcctcttggctggcgcttgctgcagggggggacccccccccgtccccaggtgaaccaagggtctgctccggggcccatttccagcttggccgccgtctgtgaccttgggcaagtcacttgacctctgtgtgcctcaacttcctcctctgtaaaacggggacagtccctgcccctccctacctcacaggcatgttgtgagaataaatgaggtaacgtgtacc

SEQ ID NO: 5710 - DNA, 5016 bp, Homo sapiens
  source 1..5016: mol_type = unassigned DNA; mol_type = unassigned DNA
ggggcgcccgcgggccggagccggggcgggggccggggcctaggcgcgcggacctgcgagcggacccgagaggcggcggcggcgcagcggaacggcagagcgggccggaggcggccgaggcgcccggcgcaggcacccgtgcctcccctctgccaggaaccttggggccttgtgtgtgaccaggacctggtggcccccgggcggtggcagagcccctgtcccaagctgcttcctgccggcacctctgatcaagtgcctagagggatgtgtgtgccagccctcggtccagtgcccgctcctgagctgactcctgctgggccccgacagcttgccgtgtttcctgtgcctgtagctccctggttggatagctgccgcccgggagaggtgacccgggcgccctgctagggtgaaggcccctgccctcggcccgggatcatgaaaggcctcggtgacagccgcccccgccacctctccgacagcctagacccaccccacgagcccctgtttgcagggaccgaccgcaacccctacctgctgtcgcccacggaggccttcgcccgcgaggcccgcttccccgggcagaacaccctgccaggagatggcctctttcccctcaacaaccagctgcccccgcccagcagcacctttccccgcatccactacaactcccacttcgaggtgccagaggagagccccttccccagccatgcccaagccaccaagatcaaccggctgcccgccaacctcctggaccagtttgagaagcagctgcccatccaccgtgatggcttcagcaccctccaatttccccgtggcgaggccaaggcccgtggtgagagccctggccgcatccgccacctggtccactcagtccagcggcttttcttcaccaaggcaccctcactggagggcacagcgggcaaggtcggtggcaatggcagcaagaagggtggcatggaggacggcaagggccggagggccaaaagcaaggagcgggccaaggctggggagcccaaacggcgcagccgctccaacatctcaggctggtggagctccgatgacaacttggacggcgaggccggcgccttccgcagcagtggcccagcctctgggctgatgacactaggccgccaggcagaacgcagccagccacgctacttcatgcacgcctacaacaccatcagtgggcacatgctcaaaaccaccaagaacaacactactgagctgactgccccaccacccccgcccgcacccccagccacctgccccagccttggggtgggcactgacaccaactacgtcaaacggggctcctggtccactctgaccctcagccacgcccacgaggtctgccagaagacctcagccaccttggataagagcctgctcaagtccaaatcctgccaccagggtctagcctaccattacctgcaggtgcccggcggcggcggcgagtggagcaccacgctgctgtccccacgcgagacggatgccgcggccgagggccctatcccgtgccggcgcatgcgcagcggcagctacatcaaggccatgggcgacgaggacagcgacgagtccggcggcagccccaagccctcacccaagaccgcggcgcggcgccagagctatctgagggccacgcagcagtcgctgggagagcagagcaacccccgcaggagtctggaccgcctggattcagtggacatgctgctgccctccaagtgtccgagctgggaagaggactacacccccgtcagcgacagcctcaacgactccagctgcatcagccagatttttggacaggcctccctgatcccccagttgtttggccatgagcagcaggtacgggaggcagagctgagtgaccagtatgaggcggcctgcgagtcagcctgcagtgaagcggagtccacagcggcagagacgcttgacttgccactgcccagctacttccgctcccgcagccacagctacctgcgtgccatccaggcaggctgctcgcaggaggaggacagtgtctccctgcagtccctctccccaccgcccagtaccggcagcctcagcaatagtcgcacgcttccgagttcatcatgcctagtggcgtataagaagaccccgccaccggtccctccacgcaccacttcaaagccgttcatctcagtcacagtccagagcagtactgagtctgcccaggacacctacctggacagccaggaccacaagagcgaggtgactagccagtcgggcctgagcaactcgtcggacagcctggacagcagtacccgaccgcccagcgtgacacggggtggagtcgccccagcccctgaggccccagagccacccccaaaacatgcagctctgaaaagtgaacaagggacgctgaccagctctgagtcccaccccgaggccgcccccaaaaggaaactgtcatcgataggaatacaagttgactgcattcagccagtgccaaaagaggagcccagtcccgctaccaaattccagtccatcggggttcaggtagaggacgactggcgaagcagcgtcccctctcacagtatgtcctcccgacgggacacagactcggatacccaggatgccaatgactcaagctgtaagtcatctgagaggagcctcccggactgtacccctcaccccaactccatcagcatcgatgccggtccccggcaggcccccaagattgcccagatcaagcgcaacctctcctatggagacaacagcgaccctgccctagaggcgtcctcgctgcccccacccgacccctggctcgagacctcctccagctccccagcagagccggcacagccaggggcctgccgccgagacggctactggttcctaaagctactgcaggcagaaacagagcggctggaaggctggtgctgccagatggacaaggagaccaaagagaacaacctctctgaagaagtcttaggaaaagtcctcagtgctgtgggcagtgcccagctactgatgtcccagaaattccagcagttccggggcctctgtgagcaaaacttgaaccctgatgccaacccacgccccacagcccaggacctggcagggttctgggacctgctacagctgtccatcgaggatatcagcatgaagttcgatgaactctaccacctcaaggccaacagctggcagctggtggagacccccgagaagaggaaggaagagaagaaaccaccccctccggtcccaaagaagccagccaaatccaagccggcagtgagccgcgacaaggcctcagacgccagcgacaagcagcgccaggaggcccgcaagagactcctggcggccaagcgggcagcttctgtgcggcagaactcagccaccgagagcgcagacagcatcgagatttatgtcccggaggcccagaccaggctctgagaccatgcaggaggaaagaaacgattttaaatcattaaaaacacaaaaactaagtgcgaacggaacagagttttctcaacctttgctatggttattctgtctagagaccctgagccaactttcaaattgacgcatacaagggctcacaatttggcttttttgggtccctcccagctttaggttatgaagattttactcacaaaaaaaatcaacaaaaatcacgaaactagaaaactttttttttcctcttgctggccgtggtggactagatagatggacgtcggcaactcccggcccagcctccatactgcggtctttttactcgttctatctgatgagaactcacactagcttgtttacaagatgacgacagtccaagggcagccttgggcacctgccatgtccctcctttccccagctatccccgctctgaccttgattttcattcttatgtttttctcttttcccttcagagctcacacagtggtcaccattgtggcaagcggctttctgggtctcagccctctctgcggttgagggcccagaggacagagagatggacatgcgtcccctccctccccccgccaagtgctcacacacaacctcacgcgcacacacacacacgcagatggaggcgcctcactgggaggtgccccgccagccctgggcagtgtcaggcaggactcactcaccgctgagcagatgagggaagttttagtcttggcgggtggaaatgagacgaagccacagttatcacactccagactcctgcccttttattttctccagccccttcttccttcagcaaaatctaggactcccgagtggcttccagggggccgtcagtcctcagccgcgcctgtgtccggtgcccgaggggcgggcggcggtgtctgtatgtatgtgtacatatgcacatagaccttagagtgtatagttaacaaacgcccatctgctcacccatgcccacccagcgccgccgccgctggctctcggggcacctggcaggaggcgggtgtgtgaatagcatatatttttacatgtactatatctaggtgtgtgtacaagtgtgtgtaaaaatatataccttgtgtgtaagcagccctttttttttttggtctccacccccctccccccgccccgcactcctaagggcccatctgcccagcctctgagttttctgttctattttttttttaaccccaattatccttctctctctcctgcccccgcatcccactcccagggtgtcacgagccctgagctgcaatggcccgggcctgcagggcggggtaggggagggcaggggctgagccccgaagccagctcagtacctgaggggctgctctatgctgtgtatgcgcctctctggcatccgagacatcctcttggctggcgcttgctgcagggggggacccccccccgtccccaggtgaaccaagggtctgctccggggcccatttccagcttggccgccgtctgtgaccttgggcaagtcacttgacctctgtgtgcctcaacttcctcctctgtaaaacggggacagtccctgcccctccctacctcacaggcatgttgtgagaataaatgaggtaacgtgta

SEQ ID NO: 5711 - DNA, 621 bp, Homo sapiens
  source 1..621: mol_type = unassigned DNA; mol_type = unassigned DNA
ccaggactcccccctgagccagcctcgtagtcctgcccagatcttgatttccttagagagtgaggaaagaggggagctagagagaatcctagcagatcttgaggaagaaaacagatatacacagaagttcctgctcttcgctacaatgagggaaaaaagtggcaacatcgatagaggctagaggcagagaaattctaggcagacaagggtgggacctagcaaaaccccaccttcaagctgaaacccacagcccaaagtgagaacttctatccctgtttgctcgctctctcccagttgactctttctgaataatgtctttctacctattgaatgttgccttttcccaaaattacttatgaccctccctgccccccatcatatccctataaagaccccagactcagtaggtagaaagggagacgcagcttgactggagagaggcaacttgacttcagagggacagctggactttggaggagtgatggcttaacttcggagaagagctggctggagactgccagatgtcagggaagattacctgcccgtcctgcctcctcttcagctcccctctccactgtgagacatttccatccctaaataaaattctccacctccaccatc

SEQ ID NO: 5712 - DNA, 4645 bp, Homo sapiens
  source 1..4645: mol_type = unassigned DNA
agtgctttcagctgtgagcttgggcggcggcggcggcggcgctccactttcggggagcccggcggctctgggaagctcactcctccactcgtacccacactcgaccgcggagcccttgcagccatgagggaacagctcaaaggccacgagactcaaacaacttgctgggaccatcccaaaatgacagagctctaccagtctttagctgacctgaataatgtcagattctcagcttataggactgccatgaaactccgaagactgcagaaggccctttgcttggatctcttgagcctgtcagctgcatgtgatgccttggaccagcacaacctcaagcaaaatgaccagcccatggatatcctgcagattattaattgtttgaccactatttatgaccgcctggagcaagagcacaacaatttggtcaacgtccctctctgcgtggatatgtgtctgaactggctgctgaatgtttatgatacgggacgaacagggaggatccgtgtcctgtcttttaaaactggcatcatttccctgtgtaaagcacatttggaagacaagtacagataccttttcaagcaagtggcaagttcaacaggattttgtgaccagcgcaggctgggcctccttctgcatgattctatccaaattccaagacagttgggtgaagttgcatcctttgggggcagtaacattgagccaagtgtccggagctgcttccaatttgctaataataagccagagatcgaagcggccctcttcctagactggatgagactggaaccccagtccatggtgtggctgcccgtcctgcacagagtggctgctgcagaaactgccaagcatcaggccaaatgtaacatctgcaaagagtgtccaatcattggattcaggtacaggagtctaaagcactttaattatgacatctgccaaagctgctttttttctggtcgagttgcaaaaggccataaaatgcactatcccatggtggaatattgcactccgactacatcaggagaagatgttcgagactttgccaaggtactaaaaaacaaatttcgaaccaaaaggtattttgcgaagcatccccgaatgggctacctgccagtgcagactgtcttagagggggacaacatggaaactcccgttactctgatcaacttctggccagtagattctgcgcctgcctcgtcccctcagctttcacacgatgatactcattcacgcattgaacattatgctagcaggctagcagaaatggaaaacagcaatggatcttatctaaatgatagcatctctcctaatgagagcatagatgatgaacatttgttaatccagcattactgccaaagtttgaaccaggactcccccctgagccagcctcgtagtcctgcccagatcttgatttccttagagagtgaggaaagaggggagctagagagaatcctagcagatcttgaggaagaaaacaggaatctgcaagcagaatatgaccgtctaaagcagcagcacgaacataaaggcctgtccccactgccgtcccctcctgaaatgatgcccacctctccccagagtccccgggatgctgagctcattgctgaggccaagctactgcgtcaacacaaaggccgcctggaagccaggatgcaaatcctggaagaccacaataaacagctggagtcacagttacacaggctaaggcagctgctggagcaaccccaggcagaggccaaagtgaatggcacaacggtgtcctctccttctacctctctacagaggtccgacagcagtcagcctatgctgctccgagtggttggcagtcaaacttcggactccatgggtgaggaagatcttctcagtcctccccaggacacaagcacagggttagaggaggtgatggagcaactcaacaactccttccctagttcaagaggacacaatgtaggaagtcttttccacatggcagatgatttgggcagagcgatggagtccttagtatcagtcatgacagatgaagaaggagcagaataaatgttttacaactcctgattcccgcatggtttttataatattcatacaacaaagaggattagacagtaagagtttacaagaaataaatctatatttttgtgaagggtagtggtattatactgtagatttcagtagtttctaagtctgttattgttttgttaacaatggcaggttttacacgtctatgcaattgtacaaaaaagttataagaaaactacatgtaaaatcttgatagctaaataacttgccatttctttatatggaacgcattttgggttgtttaaaaatttataacagttataaagaaagattgtaaactaaagtgtgctttataaaaaaaagttgtttataaaaacccctaaaaacaaaacaaacacacacacacacacatacacacacacacacaaaactttgaggcagcgcattgttttgcatccttttggcgtgatatccatatgaaattcatggctttttctttttttgcatattaaagataagacttcctctaccaccacaccaaatgactactacacactgctcatttgagaactgtcagctgagtggggcaggcttgagttttcatttcatatatctatatgtctataagtatataaatactatagttatatagataaagagatacgaatttctatagactgactttttccattttttaaatgttcatgtcacatcctaatagaaagaaattacttctagtcagtcatccaggcttacctgcttggtctagaatggatttttcccggagccggaagccaggaggaaactacaccacactaaaacattgtctacagctccagatgtttctcattttaaacaactttccactgacaacgaaagtaaagtaaagtattggatttttttaaagggaacatgtgaatgaatacacaggacttattatatcagagtgagtaatcggttggttggttgattgattgattgattgatacattcagcttcctgctgctagcaatgccacgatttagatttaatgatgcttcagtggaaatcaatcagaaggtattctgaccttgtgaacatcagaaggtattttttaactcccaagcagtagcaggacgatgatagggctggagggctatggattcccagcccatccctgtgaaggagtaggccactctttaagtgaaggattggatgattgttcataatacataaagttctctgtaattacaactaaattattatgccctcttctcacagtcaaaaggaactgggtggtttggtttttgttgcttttttagatttattgtcccatgtgggatgagtttttaaatgccacaagacataatttaaaataaataaactttgggaaaaggtgtaaaacagtagccccatcacatttgtgatactgacaggtatcaacccagaagcccatgaactgtgtttccatcctttgcatttctctgcgagtagttccacacaggtttgtaagtaagtaagaaagaaggcaaattgattcaaatgttacaaaaaaacccttcttggtggattagacaggttaaatatataaacaaacaaacaaaaattgctcaaaaaagaggagaaaagctcaagaggaaaagctaaggactggtaggaaaaagctttactctttcatgccattttatttctttttgatttttaaatcattcattcaatagataccaccgtgtgacctataattttgcaaatctgttacctctgacatcaagtgtaattagcttttggagagtgggctgacatcaagtgtaattagcttttggagagtgggttttgtccattattaataattaattaattaacatcaaacacggcttctcatgctatttctacctcactttggttttggggtgttcctgataattgtgcacacctgagttcacagcttcaccacttgtccattgcgttattttctttttcctttataattctttctttttccttcataattttcaaaagaaaacccaaagctctaaggtaacaaattaccaaattacatgaagatttggtttttgtcttgcatttttttcctttatgtgacgctggaccttttctttacccaaggatttttaaaactcagatttaaaacaaggggttactttacatcctactaagaagtttaagtaagtaagtttcattctaaaatcagaggtaaatagagtgcataaataattttgttttaatctttttgtttttcttttagacacattagctctggagtgagtctgtcataatatttgaacaaaaattgagagctttattgctgcattttaagcataattaatttggacattatttcgtgttgtgttctttataaccaccaagtattaaactgtaaatcataatgtaactgaagcataaacatcacatggcatgttttgtcattgttttcaggtactgagttcttacttgagtatcataatatattgtgttttaacaccaacactgtaacatttacgaattatttttttaaacttcagttttactgcattttcacaacatatcagacttcaccaaatatatgccttactattgtattatagtactgctttactgtgtatctcaataaagcacgcagttatgttacaaaaaagta

SEQ ID NO: 5713 - DNA, 6773 bp, Homo sapiens
  source 1..6773: mol_type = unassigned DNA
gtttccagagctttacctgagaaacaaggagaaattgaagctcaaataaaagaccttgggcagcttgaaaaaaagcttgaagaccttgaagagcagttaaatcatctgctgctgtggttatctcctattaggaatcagttggaaatttataaccaaccaaaccaagaaggaccatttgacgttaaggaaactgaaatagcagttcaagctaaacaaccggatgtggaagagattttgtctaaagggcagcatttgtacaaggaaaaaccagccactcagccagtgaagaggaagttagaagatctgagctctgagtggaaggcggtaaaccgtttacttcaagagctgagggcaaagcagcctgacctagctcctggactgaccactattggagcctctcctactcagactgttactctggtgacacaacctgtggttactaaggaaactgccatctccaaactagaaatgccatcttccttgatgttggaggtacctgctctggcagatttcaaccgggcttggacagaacttaccgactggctttctctgcttgatcaagttataaaatcacagagggtgatggtgggtgaccttgaggatatcaacgagatgatcatcaagcagaaggcaacaatgcaggatttggaacagaggcgtccccagttggaagaactcattaccgctgcccaaaatttgaaaaacaagaccagcaatcaagaggctagaacaatcattacggatcgaattgaaagaattcagaatcagtgggatgaagtacaagaacaccttcagaaccggaggcaacagttgaatgaaatgttaaaggattcaacacaatggctggaagctaaggaagaagctgagcaggtcttaggacaggccagagccaagcttgagtcatggaaggagggtccctatacagtagatgcaatccaaaagaaaatcacagaaaccaagcagttggccaaagacctccgccagtggcagacaaatgtagatgtggcaaatgacttggccctgaaacttctccgggattattctgcagatgataccagaaaagtccacatgataacagagaatatcaatgcctcttggagaagcattcataaaagggtgagtgagcgagaggctgctttggaagaaactcatagattactgcaacagttccccctggacctggaaaagtttcttgcctggcttacagaagctgaaacaactgccaatgtcctacaggatgctacccgtaaggaaaggctcctagaagactccaagggagtaaaagagctgatgaaacaatggcaagacctccaaggtgaaattgaagctcacacagatgtttatcacaacctggatgaaaacagccaaaaaatcctgagatccctggaaggttccgatgatgcagtcctgttacaaagacgtttggataacatgaacttcaagtggagtgaacttcggaaaaagtctctcaacattaggtcccatttggaagccagttctgaccagtggaagcgtctgcacctttctctgcaggaacttctggtgtggctacagctgaaagatgatgaattaagccggcaggcacctattggaggcgactttccagcagttcagaagcagaacgatgtacatagggccttcaagagggaattgaaaactaaagaacctgtaatcatgagtactcttgagactgtacgaatatttctgacagagcagcctttggaaggactagagaaactctaccaggagcccagagagctgcctcctgaggagagagcccagaatgtcactcggcttctacgaaagcaggctgaggaggtcaatactgagtgggaaaaattgaacctgcactccgctgactggcagagaaaaatagatgagacccttgaaagactccgggaacttcaagaggccacggatgagctggacctcaagctgcgccaagctgaggtgatcaagggatcctggcagcccgtgggcgatctcctcattgactctctccaagatcacctcgagaaagtcaaggcacttcgaggagaaattgcgcctctgaaagagaacgtgagccacgtcaatgaccttgctcgccagcttaccactttgggcattcagctctcaccgtataacctcagcactctggaagacctgaacaccagatggaagcttctgcaggtggccgtcgaggaccgagtcaggcagctgcatgaagcccacagggactttggtccagcatctcagcactttctttccacgtctgtccagggtccctgggagagagccatctcgccaaacaaagtgccctactatatcaaccacgagactcaaacaacttgctgggaccatcccaaaatgacagagctctaccagtctttagctgacctgaataatgtcagattctcagcttataggactgccatgaaactccgaagactgcagaaggccctttgcttggatctcttgagcctgtcagctgcatgtgatgccttggaccagcacaacctcaagcaaaatgaccagcccatggatatcctgcagattattaattgtttgaccactatttatgaccgcctggagcaagagcacaacaatttggtcaacgtccctctctgcgtggatatgtgtctgaactggctgctgaatgtttatgatacgggacgaacagggaggatccgtgtcctgtcttttaaaactggcatcatttccctgtgtaaagcacatttggaagacaagtacagataccttttcaagcaagtggcaagttcaacaggattttgtgaccagcgcaggctgggcctccttctgcatgattctatccaaattccaagacagttgggtgaagttgcatcctttgggggcagtaacattgagccaagtgtccggagctgcttccaatttgctaataataagccagagatcgaagcggccctcttcctagactggatgagactggaaccccagtccatggtgtggctgcccgtcctgcacagagtggctgctgcagaaactgccaagcatcaggccaaatgtaacatctgcaaagagtgtccaatcattggattcaggtacaggagtctaaagcactttaattatgacatctgccaaagctgctttttttctggtcgagttgcaaaaggccataaaatgcactatcccatggtggaatattgcactccgactacatcaggagaagatgttcgagactttgccaaggtactaaaaaacaaatttcgaaccaaaaggtattttgcgaagcatccccgaatgggctacctgccagtgcagactgtcttagagggggacaacatggaaacgcctgcctcgtcccctcagctttcacacgatgatactcattcacgcattgaacattatgctagcaggctagcagaaatggaaaacagcaatggatcttatctaaatgatagcatctctcctaatgagagcatagatgatgaacatttgttaatccagcattactgccaaagtttgaaccaggactcccccctgagccagcctcgtagtcctgcccagatcttgatttccttagagagtgaggaaagaggggagctagagagaatcctagcagatcttgaggaagaaaacaggaatctgcaagcagaatatgaccgtctaaagcagcagcacgaacataaaggcctgtccccactgccgtcccctcctgaaatgatgcccacctctccccagagtccccgggatgctgagctcattgctgaggccaagctactgcgtcaacacaaaggccgcctggaagccaggatgcaaatcctggaagaccacaataaacagctggagtcacagttacacaggctaaggcagctgctggagcaaccccaggcagaggccaaagtgaatggcacaacggtgtcctctccttctacctctctacagaggtccgacagcagtcagcctatgctgctccgagtggttggcagtcaaacttcggactccatgggtgaggaagatcttctcagtcctccccaggacacaagcacagggttagaggaggtgatggagcaactcaacaactccttccctagttcaagaggacacaatgtaggaagtcttttccacatggcagatgatttgggcagagcgatggagtccttagtatcagtcatgacagatgaagaaggagcagaataaatgttttacaactcctgattcccgcatggtttttataatattcatacaacaaagaggattagacagtaagagtttacaagaaataaatctatatttttgtgaagggtagtggtattatactgtagatttcagtagtttctaagtctgttattgttttgttaacaatggcaggttttacacgtctatgcaattgtacaaaaaagttataagaaaactacatgtaaaatcttgatagctaaataacttgccatttctttatatggaacgcattttgggttgtttaaaaatttataacagttataaagaaagattgtaaactaaagtgtgctttataaaaaaaagttgtttataaaaacccctaaaaacaaaacaaacacacacacacacacatacacacacacacacaaaactttgaggcagcgcattgttttgcatccttttggcgtgatatccatatgaaattcatggctttttctttttttgcatattaaagataagacttcctctaccaccacaccaaatgactactacacactgctcatttgagaactgtcagctgagtggggcaggcttgagttttcatttcatatatctatatgtctataagtatataaatactatagttatatagataaagagatacgaatttctatagactgactttttccattttttaaatgttcatgtcacatcctaatagaaagaaattacttctagtcagtcatccaggcttacctgcttggtctagaatggatttttcccggagccggaagccaggaggaaactacaccacactaaaacattgtctacagctccagatgtttctcattttaaacaactttccactgacaacgaaagtaaagtaaagtattggatttttttaaagggaacatgtgaatgaatacacaggacttattatatcagagtgagtaatcggttggttggttgattgattgattgattgatacattcagcttcctgctgctagcaatgccacgatttagatttaatgatgcttcagtggaaatcaatcagaaggtattctgaccttgtgaacatcagaaggtattttttaactcccaagcagtagcaggacgatgatagggctggagggctatggattcccagcccatccctgtgaaggagtaggccactctttaagtgaaggattggatgattgttcataatacataaagttctctgtaattacaactaaattattatgccctcttctcacagtcaaaaggaactgggtggtttggtttttgttgcttttttagatttattgtcccatgtgggatgagtttttaaatgccacaagacataatttaaaataaataaactttgggaaaaggtgtaaaacagtagccccatcacatttgtgatactgacaggtatcaacccagaagcccatgaactgtgtttccatcctttgcatttctctgcgagtagttccacacaggtttgtaagtaagtaagaaagaaggcaaattgattcaaatgttacaaaaaaacccttcttggtggattagacaggttaaatatataaacaaacaaacaaaaattgctcaaaaaagaggagaaaagctcaagaggaaaagctaaggactggtaggaaaaagctttactctttcatgccattttatttctttttgatttttaaatcattcattcaatagataccaccgtgtgacctataattttgcaaatctgttacctctgacatcaagtgtaattagcttttggagagtgggctgacatcaagtgtaattagcttttggagagtgggttttgtccattattaataattaattaattaacatcaaacacggcttctcatgctatttctacctcactttggttttggggtgttcctgataattgtgcacacctgagttcacagcttcaccacttgtccattgcgttattttctttttcctttataattctttctttttccttcataattttcaaaagaaaacccaaagctctaaggtaacaaattaccaaattacatgaagatttggtttttgtcttgcatttttttcctttatgtgacgctggaccttttctttacccaaggatttttaaaactcagatttaaaacaaggggttactttacatcctactaagaagtttaagtaagtaagtttcattctaaaatcagaggtaaatagagtgcataaataattttgttttaatctttttgtttttcttttagacacattagctctggagtgagtctgtcataatatttgaacaaaaattgagagctttattgctgcattttaagcataattaatttggacattatttcgtgttgtgttctttataaccaccaagtattaaactgtaaatcataatgtaactgaagcataaacatcacatggcatgttttgtcattgttttcaggtactgagttcttacttgagtatcataatatattgtgttttaacaccaacactgtaacatttacgaattatttttttaaacttcagttttactgcattttcacaacatatcagacttcaccaaatatatgccttactattgtattatagtactgctttactgtgtatctcaataaagcacgcagttatgttacaaaaaag

SEQ ID NO: 5714 - DNA, 13932 bp, Homo sapiens
  source 1..13932: mol_type = unassigned DNA
gtgcaaaaagattgtgtgtttgtctgcttttgtgaggctggtcagagattctgtgcctgctttatctgtgcttggctatgactctacctccaggtttaccataccccatagaatgtgtaagagaaaagtaccaacagggaaatcagcaaaaagctttcctatgaaggtgtgtagccagcctccgcagaatttgaaatgtctgaggtctcatctgatgaaagagaagatgttcaaaagaaaacattcacaaaatgggtaaatgcacaattttctaagtttgggaagcagcatattgagaacctcttcagtgacctacaggatgggaggcgcctcctagacctcctcgaaggcctgacagggcaaaaactgccaaaagaaaaaggatccacaagagttcatgccctgaacaatgtcaacaaggcactgcgggttttgcagaacaataatgttgatttagtgaatattggaagtactgacatcgtagatggaaatcataaactgactcttggtttgatttggaatataatcctccactggcaggtcaaaaatgtaatgaaaaatatcatggctggattgcaacaaaccaacagtgaaaagattctcctgagctgggtccgacaatcaactcgtaattatccacaggttaatgtaatcaacttcaccaccagctggtctgatggcctggctttgaatgctctcatccatagtcataggccagacctatttgactggaatagtgtggtttgccagcagtcagccacacaacgactggaacatgcattcaacatcgccagatatcaattaggcatagagaaactactcgatcctgaagatgttgataccacctatccagataagaagtccatcttaatgtacatcacatcactcttccaagttttgcctcaacaagtgagcattgaagccatccaggaagtggaaatgttgccaaggccacctaaagtgactaaagaagaacattttcagttacatcatcaaatgcactattctcaacagatcacggtcagtctagcacagggatatgagagaacttcttcccctaagcctcgattcaagagctatgcctacacacaggctgcttatgtcaccacctctgaccctacacggagcccatttccttcacagcatttggaagctcctgaagacaagtcatttggcagttcattgatggagagtgaagtaaacctggaccgttatcaaacagctttagaagaagtattatcgtggcttctttctgctgaggacacattgcaagcacaaggagagatttctaatgatgtggaagtggtgaaagaccagtttcatactcatgaggggtacatgatggatttgacagcccatcagggccgggttggtaatattctacaattgggaagtaagctgattggaacaggaaaattatcagaagatgaagaaactgaagtacaagagcagatgaatctcctaaattcaagatgggaatgcctcagggtagctagcatggaaaaacaaagcaatttacatagagttttaatggatctccagaatcagaaactgaaagagttgaatgactggctaacaaaaacagaagaaagaacaaggaaaatggaggaagagcctcttggacctgatcttgaagacctaaaacgccaagtacaacaacataaggtgcttcaagaagatctagaacaagaacaagtcagggtcaattctctcactcacatggtggtggtagttgatgaatctagtggagatcacgcaactgctgctttggaagaacaacttaaggtattgggagatcgatgggcaaacatctgtagatggacagaagaccgctgggttcttttacaagacatccttctcaaatggcaacgtcttactgaagaacagtgcctttttagtgcatggctttcagaaaaagaagatgcagtgaacaagattcacacaactggctttaaagatcaaaatgaaatgttatcaagtcttcaaaaactggccgttttaaaagcggatctagaaaagaaaaagcaatccatgggcaaactgtattcactcaaacaagatcttctttcaacactgaagaataagtcagtgacccagaagacggaagcatggctggataactttgcccggtgttgggataatttagtccaaaaacttgaaaagagtacagcacagatttcacaggctgtcaccaccactcagccatcactaacacagacaactgtaatggaaacagtaactacggtgaccacaagggaacagatcctggtaaagcatgctcaagaggaacttccaccaccacctccccaaaagaagaggcagattactgtggattctgaaattaggaaaaggttggatgttgatataactgaacttcacagctggattactcgctcagaagctgtgttgcagagtcctgaatttgcaatctttcggaaggaaggcaacttctcagacttaaaagaaaaagtcaatgccatagagcgagaaaaagctgagaagttcagaaaactgcaagatgccagcagatcagctcaggccctggtggaacagatggtgaatgagggtgttaatgcagatagcatcaaacaagcctcagaacaactgaacagccggtggatcgaattctgccagttgctaagtgagagacttaactggctggagtatcagaacaacatcatcgctttctataatcagctacaacaattggagcagatgacaactactgctgaaaactggttgaaaatccaacccaccaccccatcagagccaacagcaattaaaagtcagttaaaaatttgtaaggatgaagtcaaccggctatcagatcttcaacctcaaattgaacgattaaaaattcaaagcatagccctgaaagagaaaggacaaggacccatgttcctggatgcagactttgtggcctttacaaatcattttaagcaagtcttttctgatgtgcaggccagagagaaagagctacagacaatttttgacactttgccaccaatgcgctatcaggagaccatgagtgccatcaggacatgggtccagcagtcagaaaccaaactctccatacctcaacttagtgtcaccgactatgaaatcatggagcagagactcggggaattgcaggctttacaaagttctctgcaagagcaacaaagtggcctatactatctcagcaccactgtgaaagagatgtcgaagaaagcgccctctgaaattagccggaaatatcaatcagaatttgaagaaattgagggacgctggaagaagctctcctcccagctggttgagcattgtcaaaagctagaggagcaaatgaataaactccgaaaaattcagaatcacatacaaaccctgaagaaatggatggctgaagttgatgtttttctgaaggaggaatggcctgcccttggggattcagaaattctaaaaaagcagctgaaacagtgcagacttttagtcagtgatattcagacaattcagcccagtctaaacagtgtcaatgaaggtgggcagaagataaagaatgaagcagagccagagtttgcttcgagacttgagacagaactcaaagaacttaacactcagtgggatcacatgtgccaacaggtctatgccagaaaggaggccttgaagggaggtttggagaaaactgtaagcctccagaaagatctatcagagatgcacgaatggatgacacaagctgaagaagagtatcttgagagagattttgaatataaaactccagatgaattacagaaagcagttgaagagatgaagagagctaaagaagaggcccaacaaaaagaagcgaaagtgaaactccttactgagtctgtaaatagtgtcatagctcaagctccacctgtagcacaagaggccttaaaaaaggaacttgaaactctaaccaccaactaccagtggctctgcactaggctgaatgggaaatgcaagactttggaagaagtttgggcatgttggcatgagttattgtcatacttggagaaagcaaacaagtggctaaatgaagtagaatttaaacttaaaaccactgaaaacattcctggcggagctgaggaaatctctgaggtgctagattcacttgaaaatttgatgcgacattcagaggataacccaaatcagattcgcatattggcacagaccctaacagatggcggagtcatggatgagctaatcaatgaggaacttgagacatttaattctcgttggagggaactacatgaagaggctgtaaggaggcaaaagttgcttgaacagagcatccagtctgcccaggagactgaaaaatccttacacttaatccaggagtccctcacattcattgacaagcagttggcagcttatattgcagacaaggtggacgcagctcaaatgcctcaggaagcccagaaaatccaatctgatttgacaagtcatgagatcagtttagaagaaatgaagaaacataatcaggggaaggaggctgcccaaagagtcctgtctcagattgatgttgcacagaaaaaattacaagatgtctccatgaagtttcgattattccagaaaccagccaattttgagcagcgtctacaagaaagtaagatgattttagatgaagtgaagatgcacttgcctgcattggaaacaaagagtgtggaacaggaagtagtacagtcacagctaaatcattgtgtgaacttgtataaaagtctgagtgaagtgaagtctgaagtggaaatggtgataaagactggacgtcagattgtacagaaaaagcagacggaaaatcccaaagaacttgatgaaagagtaacagctttgaaattgcattataatgagctgggagcaaaggtaacagaaagaaagcaacagttggagaaatgcttgaaattgtcccgtaagatgcgaaaggaaatgaatgtcttgacagaatggctggcagctacagatatggaattgacaaagagatcagcagttgaaggaatgcctagtaatttggattctgaagttgcctggggaaaggctactcaaaaagagattgagaaacagaaggtgcacctgaagagtatcacagaggtaggagaggccttgaaaacagttttgggcaagaaggagacgttggtggaagataaactcagtcttctgaatagtaactggatagctgtcacctcccgagcagaagagtggttaaatcttttgttggaataccagaaacacatggaaacttttgaccagaatgtggaccacatcacaaagtggatcattcaggctgacacacttttggatgaatcagagaaaaagaaaccccagcaaaaagaagacgtgcttaagcgtttaaaggcagaactgaatgacatacgcccaaaggtggactctacacgtgaccaagcagcaaacttgatggcaaaccgcggtgaccactgcaggaaattagtagagccccaaatctcagagctcaaccatcgatttgcagccatttcacacagaattaagactggaaaggcctccattcctttgaaggaattggagcagtttaactcagatatacaaaaattgcttgaaccactggaggctgaaattcagcagggggtgaatctgaaagaggaagacttcaataaagatatgaatgaagacaatgagggtactgtaaaagaattgttgcaaagaggagacaacttacaacaaagaatcacagatgagagaaagcgagaggaaataaagataaaacagcagctgttacagacaaaacataatgctctcaaggatttgaggtctcaaagaagaaaaaaggctctagaaatttctcatcagtggtatcagtacaagaggcaggctgatgatctcctgaaatgcttggatgacattgaaaaaaaattagccagcctacctgagcccagagatgaaaggaaaataaaggaaattgatcgggaattgcagaagaagaaagaggagctgaatgcagtgcgtaggcaagctgagggcttgtctgaggatggggccgcaatggcagtggagccaactcagatccagctcagcaagcgctggcgggaaattgagagcaaatttgctcagtttcgaagactcaactttgcacaaattcacactgtccgtgaagaaacgatgatggtgatgactgaagacatgcctttggaaatttcttatgtgccttctacttatttgactgaaatcactcatgtctcacaagccctattagaagtggaacaacttctcaatgctcctgacctctgtgctaaggactttgaagatctctttaagcaagaggagtctctgaagaatataaaagatagtctacaacaaagctcaggtcggattgacattattcatagcaagaagacagcagcattgcaaagtgcaacgcctgtggaaagggtgaagctacaggaagctctctcccagcttgatttccaatgggaaaaagttaacaaaatgtacaaggaccgacaagggcgatttgacagatctgttgagaaatggcggcgttttcattatgatataaagatatttaatcagtggctaacagaagctgaacagtttctcagaaagacacaaattcctgagaattgggaacatgctaaatacaaatggtatcttaaggaactccaggatggcattgggcagcggcaaactgttgtcagaacattgaatgcaactggggaagaaataattcagcaatcctcaaaaacagatgccagtattctacaggaaaaattgggaagcctgaatctgcggtggcaggaggtctgcaaacagctgtcagacagaaaaaagaggctagaagaacaaaagaatatcttgtcagaatttcaaagagatttaaatgaatttgttttatggttggaggaagcagataacattgctagtatcccacttgaacctggaaaagagcagcaactaaaagaaaagcttgagcaagtcaagttactggtggaagagttgcccctgcgccagggaattctcaaacaattaaatgaaactggaggacccgtgcttgtaagtgctcccataagcccagaagagcaagataaacttgaaaataagctcaagcagacaaatctccagtggataaaggtttccagagctttacctgagaaacaaggagaaattgaagctcaaataaaagaccttgggcagcttgaaaaaaagcttgaagaccttgaagagcagttaaatcatctgctgctgtggttatctcctattaggaatcagttggaaatttataaccaaccaaaccaagaaggaccatttgacgttaaggaaactgaaatagcagttcaagctaaacaaccggatgtggaagagattttgtctaaagggcagcatttgtacaaggaaaaaccagccactcagccagtgaagaggaagttagaagatctgagctctgagtggaaggcggtaaaccgtttacttcaagagctgagggcaaagcagcctgacctagctcctggactgaccactattggagcctctcctactcagactgttactctggtgacacaacctgtggttactaaggaaactgccatctccaaactagaaatgccatcttccttgatgttggaggtacctgctctggcagatttcaaccgggcttggacagaacttaccgactggctttctctgcttgatcaagttataaaatcacagagggtgatggtgggtgaccttgaggatatcaacgagatgatcatcaagcagaaggcaacaatgcaggatttggaacagaggcgtccccagttggaagaactcattaccgctgcccaaaatttgaaaaacaagaccagcaatcaagaggctagaacaatcattacggatcgaattgaaagaattcagaatcagtgggatgaagtacaagaacaccttcagaaccggaggcaacagttgaatgaaatgttaaaggattcaacacaatggctggaagctaaggaagaagctgagcaggtcttaggacaggccagagccaagcttgagtcatggaaggagggtccctatacagtagatgcaatccaaaagaaaatcacagaaaccaagcagttggccaaagacctccgccagtggcagacaaatgtagatgtggcaaatgacttggccctgaaacttctccgggattattctgcagatgataccagaaaagtccacatgataacagagaatatcaatgcctcttggagaagcattcataaaagggtgagtgagcgagaggctgctttggaagaaactcatagattactgcaacagttccccctggacctggaaaagtttcttgcctggcttacagaagctgaaacaactgccaatgtcctacaggatgctacccgtaaggaaaggctcctagaagactccaagggagtaaaagagctgatgaaacaatggcaagacctccaaggtgaaattgaagctcacacagatgtttatcacaacctggatgaaaacagccaaaaaatcctgagatccctggaaggttccgatgatgcagtcctgttacaaagacgtttggataacatgaacttcaagtggagtgaacttcggaaaaagtctctcaacattaggtcccatttggaagccagttctgaccagtggaagcgtctgcacctttctctgcaggaacttctggtgtggctacagctgaaagatgatgaattaagccggcaggcacctattggaggcgactttccagcagttcagaagcagaacgatgtacatagggccttcaagagggaattgaaaactaaagaacctgtaatcatgagtactcttgagactgtacgaatatttctgacagagcagcctttggaaggactagagaaactctaccaggagcccagagagctgcctcctgaggagagagcccagaatgtcactcggcttctacgaaagcaggctgaggaggtcaatactgagtgggaaaaattgaacctgcactccgctgactggcagagaaaaatagatgagacccttgaaagactccgggaacttcaagaggccacggatgagctggacctcaagctgcgccaagctgaggtgatcaagggatcctggcagcccgtgggcgatctcctcattgactctctccaagatcacctcgagaaagtcaaggcacttcgaggagaaattgcgcctctgaaagagaacgtgagccacgtcaatgaccttgctcgccagcttaccactttgggcattcagctctcaccgtataacctcagcactctggaagacctgaacaccagatggaagcttctgcaggtggccgtcgaggaccgagtcaggcagctgcatgaagcccacagggactttggtccagcatctcagcactttctttccacgtctgtccagggtccctgggagagagccatctcgccaaacaaagtgccctactatatcaaccacgagactcaaacaacttgctgggaccatcccaaaatgacagagctctaccagtctttagctgacctgaataatgtcagattctcagcttataggactgccatgaaactccgaagactgcagaaggccctttgcttggatctcttgagcctgtcagctgcatgtgatgccttggaccagcacaacctcaagcaaaatgaccagcccatggatatcctgcagattattaattgtttgaccactatttatgaccgcctggagcaagagcacaacaatttggtcaacgtccctctctgcgtggatatgtgtctgaactggctgctgaatgtttatgatacgggacgaacagggaggatccgtgtcctgtcttttaaaactggcatcatttccctgtgtaaagcacatttggaagacaagtacagataccttttcaagcaagtggcaagttcaacaggattttgtgaccagcgcaggctgggcctccttctgcatgattctatccaaattccaagacagttgggtgaagttgcatcctttgggggcagtaacattgagccaagtgtccggagctgcttccaatttgctaataataagccagagatcgaagcggccctcttcctagactggatgagactggaaccccagtccatggtgtggctgcccgtcctgcacagagtggctgctgcagaaactgccaagcatcaggccaaatgtaacatctgcaaagagtgtccaatcattggattcaggtacaggagtctaaagcactttaattatgacatctgccaaagctgctttttttctggtcgagttgcaaaaggccataaaatgcactatcccatggtggaatattgcactccgactacatcaggagaagatgttcgagactttgccaaggtactaaaaaacaaatttcgaaccaaaaggtattttgcgaagcatccccgaatgggctacctgccagtgcagactgtcttagagggggacaacatggaaactcccgttactctgatcaacttctggccagtagattctgcgcctgcctcgtcccctcagctttcacacgatgatactcattcacgcattgaacattatgctagcaggctagcagaaatggaaaacagcaatggatcttatctaaatgatagcatctctcctaatgagagcatagatgatgaacatttgttaatccagcattactgccaaagtttgaaccaggactcccccctgagccagcctcgtagtcctgcccagatcttgatttccttagagagtgaggaaagaggggagctagagagaatcctagcagatcttgaggaagaaaacaggaatctgcaagcagaatatgaccgtctaaagcagcagcacgaacataaaggcctgtccccactgccgtcccctcctgaaatgatgcccacctctccccagagtccccgggatgctgagctcattgctgaggccaagctactgcgtcaacacaaaggccgcctggaagccaggatgcaaatcctggaagaccacaataaacagctggagtcacagttacacaggctaaggcagctgctggagcaaccccaggcagaggccaaagtgaatggcacaacggtgtcctctccttctacctctctacagaggtccgacagcagtcagcctatgctgctccgagtggttggcagtcaaacttcggactccatgggtgaggaagatcttctcagtcctccccaggacacaagcacagggttagaggaggtgatggagcaactcaacaactccttccctagttcaagaggaagaaatacccctggaaagccaatgagagaggacacaatgtaggaagtcttttccacatggcagatgatttgggcagagcgatggagtccttagtatcagtcatgacagatgaagaaggagcagaataaatgttttacaactcctgattcccgcatggtttttataatattcatacaacaaagaggattagacagtaagagtttacaagaaataaatctatatttttgtgaagggtagtggtattatactgtagatttcagtagtttctaagtctgttattgttttgttaacaatggcaggttttacacgtctatgcaattgtacaaaaaagttataagaaaactacatgtaaaatcttgatagctaaataacttgccatttctttatatggaacgcattttgggttgtttaaaaatttataacagttataaagaaagattgtaaactaaagtgtgctttataaaaaaaagttgtttataaaaacccctaaaaacaaaacaaacacacacacacacacatacacacacacacacaaaactttgaggcagcgcattgttttgcatccttttggcgtgatatccatatgaaattcatggctttttctttttttgcatattaaagataagacttcctctaccaccacaccaaatgactactacacactgctcatttgagaactgtcagctgagtggggcaggcttgagttttcatttcatatatctatatgtctataagtatataaatactatagttatatagataaagagatacgaatttctatagactgactttttccattttttaaatgttcatgtcacatcctaatagaaagaaattacttctagtcagtcatccaggcttacctgcttggtctagaatggatttttcccggagccggaagccaggaggaaactacaccacactaaaacattgtctacagctccagatgtttctcattttaaacaactttccactgacaacgaaagtaaagtaaagtattggatttttttaaagggaacatgtgaatgaatacacaggacttattatatcagagtgagtaatcggttggttggttgattgattgattgattgatacattcagcttcctgctgctagcaatgccacgatttagatttaatgatgcttcagtggaaatcaatcagaaggtattctgaccttgtgaacatcagaaggtattttttaactcccaagcagtagcaggacgatgatagggctggagggctatggattcccagcccatccctgtgaaggagtaggccactctttaagtgaaggattggatgattgttcataatacataaagttctctgtaattacaactaaattattatgccctcttctcacagtcaaaaggaactgggtggtttggtttttgttgcttttttagatttattgtcccatgtgggatgagtttttaaatgccacaagacataatttaaaataaataaactttgggaaaaggtgtaaaacagtagccccatcacatttgtgatactgacaggtatcaacccagaagcccatgaactgtgtttccatcctttgcatttctctgcgagtagttccacacaggtttgtaagtaagtaagaaagaaggcaaattgattcaaatgttacaaaaaaacccttcttggtggattagacaggttaaatatataaacaaacaaacaaaaattgctcaaaaaagaggagaaaagctcaagaggaaaagctaaggactggtaggaaaaagctttactctttcatgccattttatttctttttgatttttaaatcattcattcaatagataccaccgtgtgacctataattttgcaaatctgttacctctgacatcaagtgtaattagcttttggagagtgggctgacatcaagtgtaattagcttttggagagtgggttttgtccattattaataattaattaattaacatcaaacacggcttctcatgctatttctacctcactttggttttggggtgttcctgataattgtgcacacctgagttcacagcttcaccacttgtccattgcgttattttctttttcctttataattctttctttttccttcataattttcaaaagaaaacccaaagctctaaggtaacaaattaccaaattacatgaagatttggtttttgtcttgcatttttttcctttatgtgacgctggaccttttctttacccaaggatttttaaaactcagatttaaaacaaggggttactttacatcctactaagaagtttaagtaagtaagtttcattctaaaatcagaggtaaatagagtgcataaataattttgttttaatctttttgtttttcttttagacacattagctctggagtgagtctgtcataatatttgaacaaaaattgagagctttattgctgcattttaagcataattaatttggacattatttcgtgttgtgttctttataaccaccaagtattaaactgtaaatcataatgtaactgaagcataaacatcacatggcatgttttgtcattgttttcaggtactgagttcttacttgagtatcataatatattgtgttttaacaccaacactgtaacatttacgaattatttttttaaacttcagttttactgcattttcacaacatatcagacttcaccaaatatatgccttactattgtattatagtactgctttactgtgtatctcaataaagcacgcagttatgttac

SEQ ID NO: 5715 - DNA, 13956 bp, Homo sapiens
  source 1..13956: mol_type = unassigned DNA
gggatcactcactttccccctacaggactcagatctgggaggcaattaccttcggagaaaaacgaataggaaaaactgaagtgttactttttttaaagctgctgaagtttgttggtttctcattgtttttaagcctactggagcaataaagtttgaagaacttttaccaggttttttttatcgctgccttgatatacacttttcaaaatgctttggtgggaagaagtagaggactgttatgaaagagaagatgttcaaaagaaaacattcacaaaatgggtaaatgcacaattttctaagtttgggaagcagcatattgagaacctcttcagtgacctacaggatgggaggcgcctcctagacctcctcgaaggcctgacagggcaaaaactgccaaaagaaaaaggatccacaagagttcatgccctgaacaatgtcaacaaggcactgcgggttttgcagaacaataatgttgatttagtgaatattggaagtactgacatcgtagatggaaatcataaactgactcttggtttgatttggaatataatcctccactggcaggtcaaaaatgtaatgaaaaatatcatggctggattgcaacaaaccaacagtgaaaagattctcctgagctgggtccgacaatcaactcgtaattatccacaggttaatgtaatcaacttcaccaccagctggtctgatggcctggctttgaatgctctcatccatagtcataggccagacctatttgactggaatagtgtggtttgccagcagtcagccacacaacgactggaacatgcattcaacatcgccagatatcaattaggcatagagaaactactcgatcctgaagatgttgataccacctatccagataagaagtccatcttaatgtacatcacatcactcttccaagttttgcctcaacaagtgagcattgaagccatccaggaagtggaaatgttgccaaggccacctaaagtgactaaagaagaacattttcagttacatcatcaaatgcactattctcaacagatcacggtcagtctagcacagggatatgagagaacttcttcccctaagcctcgattcaagagctatgcctacacacaggctgcttatgtcaccacctctgaccctacacggagcccatttccttcacagcatttggaagctcctgaagacaagtcatttggcagttcattgatggagagtgaagtaaacctggaccgttatcaaacagctttagaagaagtattatcgtggcttctttctgctgaggacacattgcaagcacaaggagagatttctaatgatgtggaagtggtgaaagaccagtttcatactcatgaggggtacatgatggatttgacagcccatcagggccgggttggtaatattctacaattgggaagtaagctgattggaacaggaaaattatcagaagatgaagaaactgaagtacaagagcagatgaatctcctaaattcaagatgggaatgcctcagggtagctagcatggaaaaacaaagcaatttacatagagttttaatggatctccagaatcagaaactgaaagagttgaatgactggctaacaaaaacagaagaaagaacaaggaaaatggaggaagagcctcttggacctgatcttgaagacctaaaacgccaagtacaacaacataaggtgcttcaagaagatctagaacaagaacaagtcagggtcaattctctcactcacatggtggtggtagttgatgaatctagtggagatcacgcaactgctgctttggaagaacaacttaaggtattgggagatcgatgggcaaacatctgtagatggacagaagaccgctgggttcttttacaagacatccttctcaaatggcaacgtcttactgaagaacagtgcctttttagtgcatggctttcagaaaaagaagatgcagtgaacaagattcacacaactggctttaaagatcaaaatgaaatgttatcaagtcttcaaaaactggccgttttaaaagcggatctagaaaagaaaaagcaatccatgggcaaactgtattcactcaaacaagatcttctttcaacactgaagaataagtcagtgacccagaagacggaagcatggctggataactttgcccggtgttgggataatttagtccaaaaacttgaaaagagtacagcacagatttcacaggctgtcaccaccactcagccatcactaacacagacaactgtaatggaaacagtaactacggtgaccacaagggaacagatcctggtaaagcatgctcaagaggaacttccaccaccacctccccaaaagaagaggcagattactgtggattctgaaattaggaaaaggttggatgttgatataactgaacttcacagctggattactcgctcagaagctgtgttgcagagtcctgaatttgcaatctttcggaaggaaggcaacttctcagacttaaaagaaaaagtcaatgccatagagcgagaaaaagctgagaagttcagaaaactgcaagatgccagcagatcagctcaggccctggtggaacagatggtgaatgagggtgttaatgcagatagcatcaaacaagcctcagaacaactgaacagccggtggatcgaattctgccagttgctaagtgagagacttaactggctggagtatcagaacaacatcatcgctttctataatcagctacaacaattggagcagatgacaactactgctgaaaactggttgaaaatccaacccaccaccccatcagagccaacagcaattaaaagtcagttaaaaatttgtaaggatgaagtcaaccggctatcagatcttcaacctcaaattgaacgattaaaaattcaaagcatagccctgaaagagaaaggacaaggacccatgttcctggatgcagactttgtggcctttacaaatcattttaagcaagtcttttctgatgtgcaggccagagagaaagagctacagacaatttttgacactttgccaccaatgcgctatcaggagaccatgagtgccatcaggacatgggtccagcagtcagaaaccaaactctccatacctcaacttagtgtcaccgactatgaaatcatggagcagagactcggggaattgcaggctttacaaagttctctgcaagagcaacaaagtggcctatactatctcagcaccactgtgaaagagatgtcgaagaaagcgccctctgaaattagccggaaatatcaatcagaatttgaagaaattgagggacgctggaagaagctctcctcccagctggttgagcattgtcaaaagctagaggagcaaatgaataaactccgaaaaattcagaatcacatacaaaccctgaagaaatggatggctgaagttgatgtttttctgaaggaggaatggcctgcccttggggattcagaaattctaaaaaagcagctgaaacagtgcagacttttagtcagtgatattcagacaattcagcccagtctaaacagtgtcaatgaaggtgggcagaagataaagaatgaagcagagccagagtttgcttcgagacttgagacagaactcaaagaacttaacactcagtgggatcacatgtgccaacaggtctatgccagaaaggaggccttgaagggaggtttggagaaaactgtaagcctccagaaagatctatcagagatgcacgaatggatgacacaagctgaagaagagtatcttgagagagattttgaatataaaactccagatgaattacagaaagcagttgaagagatgaagagagctaaagaagaggcccaacaaaaagaagcgaaagtgaaactccttactgagtctgtaaatagtgtcatagctcaagctccacctgtagcacaagaggccttaaaaaaggaacttgaaactctaaccaccaactaccagtggctctgcactaggctgaatgggaaatgcaagactttggaagaagtttgggcatgttggcatgagttattgtcatacttggagaaagcaaacaagtggctaaatgaagtagaatttaaacttaaaaccactgaaaacattcctggcggagctgaggaaatctctgaggtgctagattcacttgaaaatttgatgcgacattcagaggataacccaaatcagattcgcatattggcacagaccctaacagatggcggagtcatggatgagctaatcaatgaggaacttgagacatttaattctcgttggagggaactacatgaagaggctgtaaggaggcaaaagttgcttgaacagagcatccagtctgcccaggagactgaaaaatccttacacttaatccaggagtccctcacattcattgacaagcagttggcagcttatattgcagacaaggtggacgcagctcaaatgcctcaggaagcccagaaaatccaatctgatttgacaagtcatgagatcagtttagaagaaatgaagaaacataatcaggggaaggaggctgcccaaagagtcctgtctcagattgatgttgcacagaaaaaattacaagatgtctccatgaagtttcgattattccagaaaccagccaattttgagcagcgtctacaagaaagtaagatgattttagatgaagtgaagatgcacttgcctgcattggaaacaaagagtgtggaacaggaagtagtacagtcacagctaaatcattgtgtgaacttgtataaaagtctgagtgaagtgaagtctgaagtggaaatggtgataaagactggacgtcagattgtacagaaaaagcagacggaaaatcccaaagaacttgatgaaagagtaacagctttgaaattgcattataatgagctgggagcaaaggtaacagaaagaaagcaacagttggagaaatgcttgaaattgtcccgtaagatgcgaaaggaaatgaatgtcttgacagaatggctggcagctacagatatggaattgacaaagagatcagcagttgaaggaatgcctagtaatttggattctgaagttgcctggggaaaggctactcaaaaagagattgagaaacagaaggtgcacctgaagagtatcacagaggtaggagaggccttgaaaacagttttgggcaagaaggagacgttggtggaagataaactcagtcttctgaatagtaactggatagctgtcacctcccgagcagaagagtggttaaatcttttgttggaataccagaaacacatggaaacttttgaccagaatgtggaccacatcacaaagtggatcattcaggctgacacacttttggatgaatcagagaaaaagaaaccccagcaaaaagaagacgtgcttaagcgtttaaaggcagaactgaatgacatacgcccaaaggtggactctacacgtgaccaagcagcaaacttgatggcaaaccgcggtgaccactgcaggaaattagtagagccccaaatctcagagctcaaccatcgatttgcagccatttcacacagaattaagactggaaaggcctccattcctttgaaggaattggagcagtttaactcagatatacaaaaattgcttgaaccactggaggctgaaattcagcagggggtgaatctgaaagaggaagacttcaataaagatatgaatgaagacaatgagggtactgtaaaagaattgttgcaaagaggagacaacttacaacaaagaatcacagatgagagaaagcgagaggaaataaagataaaacagcagctgttacagacaaaacataatgctctcaaggatttgaggtctcaaagaagaaaaaaggctctagaaatttctcatcagtggtatcagtacaagaggcaggctgatgatctcctgaaatgcttggatgacattgaaaaaaaattagccagcctacctgagcccagagatgaaaggaaaataaaggaaattgatcgggaattgcagaagaagaaagaggagctgaatgcagtgcgtaggcaagctgagggcttgtctgaggatggggccgcaatggcagtggagccaactcagatccagctcagcaagcgctggcgggaaattgagagcaaatttgctcagtttcgaagactcaactttgcacaaattcacactgtccgtgaagaaacgatgatggtgatgactgaagacatgcctttggaaatttcttatgtgccttctacttatttgactgaaatcactcatgtctcacaagccctattagaagtggaacaacttctcaatgctcctgacctctgtgctaaggactttgaagatctctttaagcaagaggagtctctgaagaatataaaagatagtctacaacaaagctcaggtcggattgacattattcatagcaagaagacagcagcattgcaaagtgcaacgcctgtggaaagggtgaagctacaggaagctctctcccagcttgatttccaatgggaaaaagttaacaaaatgtacaaggaccgacaagggcgatttgacagatctgttgagaaatggcggcgttttcattatgatataaagatatttaatcagtggctaacagaagctgaacagtttctcagaaagacacaaattcctgagaattgggaacatgctaaatacaaatggtatcttaaggaactccaggatggcattgggcagcggcaaactgttgtcagaacattgaatgcaactggggaagaaataattcagcaatcctcaaaaacagatgccagtattctacaggaaaaattgggaagcctgaatctgcggtggcaggaggtctgcaaacagctgtcagacagaaaaaagaggctagaagaacaaaagaatatcttgtcagaatttcaaagagatttaaatgaatttgttttatggttggaggaagcagataacattgctagtatcccacttgaacctggaaaagagcagcaactaaaagaaaagcttgagcaagtcaagttactggtggaagagttgcccctgcgccagggaattctcaaacaattaaatgaaactggaggacccgtgcttgtaagtgctcccataagcccagaagagcaagataaacttgaaaataagctcaagcagacaaatctccagtggataaaggtttccagagctttacctgagaaacaaggagaaattgaagctcaaataaaagaccttgggcagcttgaaaaaaagcttgaagaccttgaagagcagttaaatcatctgctgctgtggttatctcctattaggaatcagttggaaatttataaccaaccaaaccaagaaggaccatttgacgttaaggaaactgaaatagcagttcaagctaaacaaccggatgtggaagagattttgtctaaagggcagcatttgtacaaggaaaaaccagccactcagccagtgaagaggaagttagaagatctgagctctgagtggaaggcggtaaaccgtttacttcaagagctgagggcaaagcagcctgacctagctcctggactgaccactattggagcctctcctactcagactgttactctggtgacacaacctgtggttactaaggaaactgccatctccaaactagaaatgccatcttccttgatgttggaggtacctgctctggcagatttcaaccgggcttggacagaacttaccgactggctttctctgcttgatcaagttataaaatcacagagggtgatggtgggtgaccttgaggatatcaacgagatgatcatcaagcagaaggcaacaatgcaggatttggaacagaggcgtccccagttggaagaactcattaccgctgcccaaaatttgaaaaacaagaccagcaatcaagaggctagaacaatcattacggatcgaattgaaagaattcagaatcagtgggatgaagtacaagaacaccttcagaaccggaggcaacagttgaatgaaatgttaaaggattcaacacaatggctggaagctaaggaagaagctgagcaggtcttaggacaggccagagccaagcttgagtcatggaaggagggtccctatacagtagatgcaatccaaaagaaaatcacagaaaccaagcagttggccaaagacctccgccagtggcagacaaatgtagatgtggcaaatgacttggccctgaaacttctccgggattattctgcagatgataccagaaaagtccacatgataacagagaatatcaatgcctcttggagaagcattcataaaagggtgagtgagcgagaggctgctttggaagaaactcatagattactgcaacagttccccctggacctggaaaagtttcttgcctggcttacagaagctgaaacaactgccaatgtcctacaggatgctacccgtaaggaaaggctcctagaagactccaagggagtaaaagagctgatgaaacaatggcaagacctccaaggtgaaattgaagctcacacagatgtttatcacaacctggatgaaaacagccaaaaaatcctgagatccctggaaggttccgatgatgcagtcctgttacaaagacgtttggataacatgaacttcaagtggagtgaacttcggaaaaagtctctcaacattaggtcccatttggaagccagttctgaccagtggaagcgtctgcacctttctctgcaggaacttctggtgtggctacagctgaaagatgatgaattaagccggcaggcacctattggaggcgactttccagcagttcagaagcagaacgatgtacatagggccttcaagagggaattgaaaactaaagaacctgtaatcatgagtactcttgagactgtacgaatatttctgacagagcagcctttggaaggactagagaaactctaccaggagcccagagagctgcctcctgaggagagagcccagaatgtcactcggcttctacgaaagcaggctgaggaggtcaatactgagtgggaaaaattgaacctgcactccgctgactggcagagaaaaatagatgagacccttgaaagactccgggaacttcaagaggccacggatgagctggacctcaagctgcgccaagctgaggtgatcaagggatcctggcagcccgtgggcgatctcctcattgactctctccaagatcacctcgagaaagtcaaggcacttcgaggagaaattgcgcctctgaaagagaacgtgagccacgtcaatgaccttgctcgccagcttaccactttgggcattcagctctcaccgtataacctcagcactctggaagacctgaacaccagatggaagcttctgcaggtggccgtcgaggaccgagtcaggcagctgcatgaagcccacagggactttggtccagcatctcagcactttctttccacgtctgtccagggtccctgggagagagccatctcgccaaacaaagtgccctactatatcaaccacgagactcaaacaacttgctgggaccatcccaaaatgacagagctctaccagtctttagctgacctgaataatgtcagattctcagcttataggactgccatgaaactccgaagactgcagaaggccctttgcttggatctcttgagcctgtcagctgcatgtgatgccttggaccagcacaacctcaagcaaaatgaccagcccatggatatcctgcagattattaattgtttgaccactatttatgaccgcctggagcaagagcacaacaatttggtcaacgtccctctctgcgtggatatgtgtctgaactggctgctgaatgtttatgatacgggacgaacagggaggatccgtgtcctgtcttttaaaactggcatcatttccctgtgtaaagcacatttggaagacaagtacagataccttttcaagcaagtggcaagttcaacaggattttgtgaccagcgcaggctgggcctccttctgcatgattctatccaaattccaagacagttgggtgaagttgcatcctttgggggcagtaacattgagccaagtgtccggagctgcttccaatttgctaataataagccagagatcgaagcggccctcttcctagactggatgagactggaaccccagtccatggtgtggctgcccgtcctgcacagagtggctgctgcagaaactgccaagcatcaggccaaatgtaacatctgcaaagagtgtccaatcattggattcaggtacaggagtctaaagcactttaattatgacatctgccaaagctgctttttttctggtcgagttgcaaaaggccataaaatgcactatcccatggtggaatattgcactccgactacatcaggagaagatgttcgagactttgccaaggtactaaaaaacaaatttcgaaccaaaaggtattttgcgaagcatccccgaatgggctacctgccagtgcagactgtcttagagggggacaacatggaaactcccgttactctgatcaacttctggccagtagattctgcgcctgcctcgtcccctcagctttcacacgatgatactcattcacgcattgaacattatgctagcaggctagcagaaatggaaaacagcaatggatcttatctaaatgatagcatctctcctaatgagagcatagatgatgaacatttgttaatccagcattactgccaaagtttgaaccaggactcccccctgagccagcctcgtagtcctgcccagatcttgatttccttagagagtgaggaaagaggggagctagagagaatcctagcagatcttgaggaagaaaacaggaatctgcaagcagaatatgaccgtctaaagcagcagcacgaacataaaggcctgtccccactgccgtcccctcctgaaatgatgcccacctctccccagagtccccgggatgctgagctcattgctgaggccaagctactgcgtcaacacaaaggccgcctggaagccaggatgcaaatcctggaagaccacaataaacagctggagtcacagttacacaggctaaggcagctgctggagcaaccccaggcagaggccaaagtgaatggcacaacggtgtcctctccttctacctctctacagaggtccgacagcagtcagcctatgctgctccgagtggttggcagtcaaacttcggactccatgggtgaggaagatcttctcagtcctccccaggacacaagcacagggttagaggaggtgatggagcaactcaacaactccttccctagttcaagaggaagaaatacccctggaaagccaatgagagaggacacaatgtaggaagtcttttccacatggcagatgatttgggcagagcgatggagtccttagtatcagtcatgacagatgaagaaggagcagaataaatgttttacaactcctgattcccgcatggtttttataatattcatacaacaaagaggattagacagtaagagtttacaagaaataaatctatatttttgtgaagggtagtggtattatactgtagatttcagtagtttctaagtctgttattgttttgttaacaatggcaggttttacacgtctatgcaattgtacaaaaaagttataagaaaactacatgtaaaatcttgatagctaaataacttgccatttctttatatggaacgcattttgggttgtttaaaaatttataacagttataaagaaagattgtaaactaaagtgtgctttataaaaaaaagttgtttataaaaacccctaaaaacaaaacaaacacacacacacacacatacacacacacacacaaaactttgaggcagcgcattgttttgcatccttttggcgtgatatccatatgaaattcatggctttttctttttttgcatattaaagataagacttcctctaccaccacaccaaatgactactacacactgctcatttgagaactgtcagctgagtggggcaggcttgagttttcatttcatatatctatatgtctataagtatataaatactatagttatatagataaagagatacgaatttctatagactgactttttccattttttaaatgttcatgtcacatcctaatagaaagaaattacttctagtcagtcatccaggcttacctgcttggtctagaatggatttttcccggagccggaagccaggaggaaactacaccacactaaaacattgtctacagctccagatgtttctcattttaaacaactttccactgacaacgaaagtaaagtaaagtattggatttttttaaagggaacatgtgaatgaatacacaggacttattatatcagagtgagtaatcggttggttggttgattgattgattgattgatacattcagcttcctgctgctagcaatgccacgatttagatttaatgatgcttcagtggaaatcaatcagaaggtattctgaccttgtgaacatcagaaggtattttttaactcccaagcagtagcaggacgatgatagggctggagggctatggattcccagcccatccctgtgaaggagtaggccactctttaagtgaaggattggatgattgttcataatacataaagttctctgtaattacaactaaattattatgccctcttctcacagtcaaaaggaactgggtggtttggtttttgttgcttttttagatttattgtcccatgtgggatgagtttttaaatgccacaagacataatttaaaataaataaactttgggaaaaggtgtaaaacagtagccccatcacatttgtgatactgacaggtatcaacccagaagcccatgaactgtgtttccatcctttgcatttctctgcgagtagttccacacaggtttgtaagtaagtaagaaagaaggcaaattgattcaaatgttacaaaaaaacccttcttggtggattagacaggttaaatatataaacaaacaaacaaaaattgctcaaaaaagaggagaaaagctcaagaggaaaagctaaggactggtaggaaaaagctttactctttcatgccattttatttctttttgatttttaaatcattcattcaatagataccaccgtgtgacctataattttgcaaatctgttacctctgacatcaagtgtaattagcttttggagagtgggctgacatcaagtgtaattagcttttggagagtgggttttgtccattattaataattaattaattaacatcaaacacggcttctcatgctatttctacctcactttggttttggggtgttcctgataattgtgcacacctgagttcacagcttcaccacttgtccattgcgttattttctttttcctttataattctttctttttccttcataattttcaaaagaaaacccaaagctctaaggtaacaaattaccaaattacatgaagatttggtttttgtcttgcatttttttcctttatgtgacgctggaccttttctttacccaaggatttttaaaactcagatttaaaacaaggggttactttacatcctactaagaagtttaagtaagtaagtttcattctaaaatcagaggtaaatagagtgcataaataattttgttttaatctttttgtttttcttttagacacattagctctggagtgagtctgtcataatatttgaacaaaaattgagagctttattgctgcattttaagcataattaatttggacattatttcgtgttgtgttctttataaccaccaagtattaaactgtaaatcataatgtaactgaagcataaacatcacatggcatgttttgtcattgttttcaggtactgagttcttacttgagtatcataatatattgtgttttaacaccaacactgtaacatttacgaattatttttttaaacttcagttttactgcattttcacaacatatcagacttcaccaaatatatgccttactattgtattatagtactgctttactgtgtatctcaataaagcacgcagttatgttac

SEQ ID NO: 5716 - DNA, 2617 bp, Homo sapiens
  source 1..2617: mol_type = unassigned DNA
cacactcgaccgcggagcccttgcagccatgagggaacagctcaaaggccacgagactcaaacaacttgctgggaccatcccaaaatgacagagctctaccagtctttagctgacctgaataatgtcagattctcagcttataggactgccatgaaactccgaagactgcagaaggccctttgcttggatctcttgagcctgtcagctgcatgtgatgccttggaccagcacaacctcaagcaaaatgaccagcccatggatatcctgcagattattaattgtttgaccactatttatgaccgcctggagcaagagcacaacaatttggtcaacgtccctctctgcgtggatatgtgtctgaactggctgctgaatgtttatgatacgggacgaacagggaggatccgtgtcctgtcttttaaaactggcatcatttccctgtgtaaagcacatttggaagacaagtacagataccttttcaagcaagtggcaagttcaacaggattttgtgaccagcgcaggctgggcctccttctgcatgattctatccaaattccaagacagttgggtgaagttgcatcctttgggggcagtaacattgagccaagtgtccggagctgcttccaatttgctaataataagccagagatcgaagcggccctcttcctagactggatgagactggaaccccagtccatggtgtggctgcccgtcctgcacagagtggctgctgcagaaactgccaagcatcaggccaaatgtaacatctgcaaagagtgtccaatcattggattcaggtacaggagtctaaagcactttaattatgacatctgccaaagctgctttttttctggtcgagttgcaaaaggccataaaatgcactatcccatggtggaatattgcactccgactacatcaggagaagatgttcgagactttgccaaggtactaaaaaacaaatttcgaaccaaaaggtattttgcgaagcatccccgaatgggctacctgccagtgcagactgtcttagagggggacaacatggaaactcccgttactctgatcaacttctggccagtagattctgcgcctgcctcgtcccctcagctttcacacgatgatactcattcacgcattgaacattatgctagcaggctagcagaaatggaaaacagcaatggatcttatctaaatgatagcatctctcctaatgagagcatagatgatgaacatttgttaatccagcattactgccaaagtttgaaccaggactcccccctgagccagcctcgtagtcctgcccagatcttgatttccttagagagtgaggaaagaggggagctagagagaatcctagcagatcttgaggaagaaaacaggaatctgcaagcagaatatgaccgtctaaagcagcagcacgaacataaaggcctgtccccactgccgtcccctcctgaaatgatgcccacctctccccagagtccccgggatgctgagctcattgctgaggccaagctactgcgtcaacacaaaggccgcctggaagccaggatgcaaatcctggaagaccacaataaacagctggagtcacagttacacaggctaaggcagctgctggagcaaccccaggcagaggccaaagtgaatggcacaacggtgtcctctccttctacctctctacagaggtccgacagcagtcagcctatgctgctccgagtggttggcagtcaaacttcggactccatgggtgaggaagatcttctcagtcctccccaggacacaagcacagggttagaggaggtgatggagcaactcaacaactccttccctagttcaagaggaagaaatacccctggaaagccaatgagagaggacacaatgtaggaagtcttttccacatggcagatgatttgggcagagcgatggagtccttagtatcagtcatgacagatgaagaaggagcagaataaatgttttacaactcctgattcccgcatggtttttataatattcatacaacaaagaggattagacagtaagagtttacaagaaataaatctatatttttgtgaagggtagtggtattatactgtagatttcagtagtttctaagtctgttattgttttgttaacaatggcaggttttacacgtctatgcaattgtacaaaaaagttataagaaaactacatgtaaaatcttgatagctaaataacttgccatttctttatatggaacgcattttgggttgtttaaaaatttataacagttataaagaaagattgtaaactaaagtgtgctttataaaaaaaagttgtttataaaaacccctaaaaacaaaacaaacacacacacacacacatacacacacacacacaaaactttgaggcagcgcattgttttgcatccttttggcgtgatatccatatgaaattcatggctttttctttttttgcatattaaagataagacttcctctaccaccacaccaaatgactactacacactgctcatttgagaactgtcagctgagtggggcaggcttgagttttcatttcatatatctatatgtctataagtatataaatactatagttatatagataaagagatacgaattt

SEQ ID NO: 5717 - DNA, 5209 bp, Homo sapiens
  source 1..5209: mol_type = unassigned DNA
acactagcaatggcaaagctttgtgcggaggcattgctggctgctctgaactaaaagcatccgtggggaccgaaagaggtttttgcacaccttattaaggaactccaggatggcattgggcagcggcaaactgttgtcagaacattgaatgcaactggggaagaaataattcagcaatcctcaaaaacagatgccagtattctacaggaaaaattgggaagcctgaatctgcggtggcaggaggtctgcaaacagctgtcagacagaaaaaagaggctagaagaacaaaagaatatcttgtcagaatttcaaagagatttaaatgaatttgttttatggttggaggaagcagataacattgctagtatcccacttgaacctggaaaagagcagcaactaaaagaaaagcttgagcaagtcaagttactggtggaagagttgcccctgcgccagggaattctcaaacaattaaatgaaactggaggacccgtgcttgtaagtgctcccataagcccagaagagcaagataaacttgaaaataagctcaagcagacaaatctccagtggataaaggtttccagagctttacctgagaaacaaggagaaattgaagctcaaataaaagaccttgggcagcttgaaaaaaagcttgaagaccttgaagagcagttaaatcatctgctgctgtggttatctcctattaggaatcagttggaaatttataaccaaccaaaccaagaaggaccatttgacgttaaggaaactgaaatagcagttcaagctaaacaaccggatgtggaagagattttgtctaaagggcagcatttgtacaaggaaaaaccagccactcagccagtgaagaggaagttagaagatctgagctctgagtggaaggcggtaaaccgtttacttcaagagctgagggcaaagcagcctgacctagctcctggactgaccactattggagcctctcctactcagactgttactctggtgacacaacctgtggttactaaggaaactgccatctccaaactagaaatgccatcttccttgatgttggaggtacctgctctggcagatttcaaccgggcttggacagaacttaccgactggctttctctgcttgatcaagttataaaatcacagagggtgatggtgggtgaccttgaggatatcaacgagatgatcatcaagcagaaggcaacaatgcaggatttggaacagaggcgtccccagttggaagaactcattaccgctgcccaaaatttgaaaaacaagaccagcaatcaagaggctagaacaatcattacggatcgaattgaaagaattcagaatcagtgggatgaagtacaagaacaccttcagaaccggaggcaacagttgaatgaaatgttaaaggattcaacacaatggctggaagctaaggaagaagctgagcaggtcttaggacaggccagagccaagcttgagtcatggaaggagggtccctatacagtagatgcaatccaaaagaaaatcacagaaaccaagcagttggccaaagacctccgccagtggcagacaaatgtagatgtggcaaatgacttggccctgaaacttctccgggattattctgcagatgataccagaaaagtccacatgataacagagaatatcaatgcctcttggagaagcattcataaaagggtgagtgagcgagaggctgctttggaagaaactcatagattactgcaacagttccccctggacctggaaaagtttcttgcctggcttacagaagctgaaacaactgccaatgtcctacaggatgctacccgtaaggaaaggctcctagaagactccaagggagtaaaagagctgatgaaacaatggcaagacctccaaggtgaaattgaagctcacacagatgtttatcacaacctggatgaaaacagccaaaaaatcctgagatccctggaaggttccgatgatgcagtcctgttacaaagacgtttggataacatgaacttcaagtggagtgaacttcggaaaaagtctctcaacattaggtcccatttggaagccagttctgaccagtggaagcgtctgcacctttctctgcaggaacttctggtgtggctacagctgaaagatgatgaattaagccggcaggcacctattggaggcgactttccagcagttcagaagcagaacgatgtacatagggccttcaagagggaattgaaaactaaagaacctgtaatcatgagtactcttgagactgtacgaatatttctgacagagcagcctttggaaggactagagaaactctaccaggagcccagagagctgcctcctgaggagagagcccagaatgtcactcggcttctacgaaagcaggctgaggaggtcaatactgagtgggaaaaattgaacctgcactccgctgactggcagagaaaaatagatgagacccttgaaagactccgggaacttcaagaggccacggatgagctggacctcaagctgcgccaagctgaggtgatcaagggatcctggcagcccgtgggcgatctcctcattgactctctccaagatcacctcgagaaagtcaaggcacttcgaggagaaattgcgcctctgaaagagaacgtgagccacgtcaatgaccttgctcgccagcttaccactttgggcattcagctctcaccgtataacctcagcactctggaagacctgaacaccagatggaagcttctgcaggtggccgtcgaggaccgagtcaggcagctgcatgaagcccacagggactttggtccagcatctcagcactttctttccacgtctgtccagggtccctgggagagagccatctcgccaaacaaagtgccctactatatcaaccacgagactcaaacaacttgctgggaccatcccaaaatgacagagctctaccagtctttagctgacctgaataatgtcagattctcagcttataggactgccatgaaactccgaagactgcagaaggccctttgcttggatctcttgagcctgtcagctgcatgtgatgccttggaccagcacaacctcaagcaaaatgaccagcccatggatatcctgcagattattaattgtttgaccactatttatgaccgcctggagcaagagcacaacaatttggtcaacgtccctctctgcgtggatatgtgtctgaactggctgctgaatgtttatgatacgggacgaacagggaggatccgtgtcctgtcttttaaaactggcatcatttccctgtgtaaagcacatttggaagacaagtacagataccttttcaagcaagtggcaagttcaacaggattttgtgaccagcgcaggctgggcctccttctgcatgattctatccaaattccaagacagttgggtgaagttgcatcctttgggggcagtaacattgagccaagtgtccggagctgcttccaatttgctaataataagccagagatcgaagcggccctcttcctagactggatgagactggaaccccagtccatggtgtggctgcccgtcctgcacagagtggctgctgcagaaactgccaagcatcaggccaaatgtaacatctgcaaagagtgtccaatcattggattcaggtacaggagtctaaagcactttaattatgacatctgccaaagctgctttttttctggtcgagttgcaaaaggccataaaatgcactatcccatggtggaatattgcactccgactacatcaggagaagatgttcgagactttgccaaggtactaaaaaacaaatttcgaaccaaaaggtattttgcgaagcatccccgaatgggctacctgccagtgcagactgtcttagagggggacaacatggaaactcccgttactctgatcaacttctggccagtagattctgcgcctgcctcgtcccctcagctttcacacgatgatactcattcacgcattgaacattatgctagcaggctagcagaaatggaaaacagcaatggatcttatctaaatgatagcatctctcctaatgagagcatagatgatgaacatttgttaatccagcattactgccaaagtttgaaccaggactcccccctgagccagcctcgtagtcctgcccagatcttgatttccttagagagtgaggaaagaggggagctagagagaatcctagcagatcttgaggaagaaaacaggaatctgcaagcagaatatgaccgtctaaagcagcagcacgaacataaaggcctgtccccactgccgtcccctcctgaaatgatgcccacctctccccagagtccccgggatgctgagctcattgctgaggccaagctactgcgtcaacacaaaggccgcctggaagccaggatgcaaatcctggaagaccacaataaacagctggagtcacagttacacaggctaaggcagctgctggagcaaccccaggcagaggccaaagtgaatggcacaacggtgtcctctccttctacctctctacagaggtccgacagcagtcagcctatgctgctccgagtggttggcagtcaaacttcggactccatgggtgaggaagatcttctcagtcctccccaggacacaagcacagggttagaggaggtgatggagcaactcaacaactccttccctagttcaagaggacacaatgtaggaagtcttttccacatggcagatgatttgggcagagcgatggagtccttagtatcagtcatgacagatgaagaaggagcagaataaatgttttacaactcctgattcccgcatggtttttataatattcatacaacaaagaggattagacagtaagagtttacaagaaataaatctatatttttgtgaagggtagtggtattatactgtagatttcagtagtttctaagtctgttattgttttgttaacaatggcaggttttacacgtctatgcaattgtacaaaaaagttataagaaaactacatgtaaaatcttgatagctaaataacttgccatttctttatatggaacgcattttgggttgtttaaaaatttataacagttataaagaaagattgtaaactaaagtgtgctttataaaaaaaagttgtttataaaaacccctaaaaacaaaacaaacacacacacacacacatacacacacacacacaaaactttgaggcagcgcattgttttgcatc

SEQ ID NO: 5718 - DNA, 2224 bp, Homo sapiens
  source 1..2224: mol_type = unassigned DNA
actttcggggagcccggcggctctgggaagctcactcctccactcgtacccacactcgaccgcggagcccttgcagccatgagggaacagctcaaaggccacgagactcaaacaacttgctgggaccatcccaaaatgacagagctctaccagtctttagctgacctgaataatgtcagattctcagcttataggactgccatgaaactccgaagactgcagaaggccctttgcttggatctcttgagcctgtcagctgcatgtgatgccttggaccagcacaacctcaagcaaaatgaccagcccatggatatcctgcagattattaattgtttgaccactatttatgaccgcctggagcaagagcacaacaatttggtcaacgtccctctctgcgtggatatgtgtctgaactggctgctgaatgtttatgatacgggacgaacagggaggatccgtgtcctgtcttttaaaactggcatcatttccctgtgtaaagcacatttggaagacaagtacagataccttttcaagcaagtggcaagttcaacaggattttgtgaccagcgcaggctgggcctccttctgcatgattctatccaaattccaagacagttgggtgaagttgcatcctttgggggcagtaacattgagccaagtgtccggagctgcttccaatttgctaataataagccagagatcgaagcggccctcttcctagactggatgagactggaaccccagtccatggtgtggctgcccgtcctgcacagagtggctgctgcagaaactgccaagcatcaggccaaatgtaacatctgcaaagagtgtccaatcattggattcaggtacaggagtctaaagcactttaattatgacatctgccaaagctgctttttttctggtcgagttgcaaaaggccataaaatgcactatcccatggtggaatattgcactccgactacatcaggagaagatgttcgagactttgccaaggtactaaaaaacaaatttcgaaccaaaaggtattttgcgaagcatccccgaatgggctacctgccagtgcagactgtcttagagggggacaacatggaaacgcctgcctcgtcccctcagctttcacacgatgatactcattcacgcattgaacattatgctagcaggctagcagaaatggaaaacagcaatggatcttatctaaatgatagcatctctcctaatgagagcatagatgatgaacatttgttaatccagcattactgccaaagtttgaaccaggactcccccctgagccagcctcgtagtcctgcccagatcttgatttccttagagagtgaggaaagaggggagctagagagaatcctagcagatcttgaggaagaaaacaggaatctgcaagcagaatatgaccgtctaaagcagcagcacgaacataaaggcctgtccccactgccgtcccctcctgaaatgatgcccacctctccccagagtccccgggatgctgagctcattgctgaggccaagctactgcgtcaacacaaaggccgcctggaagccaggatgcaaatcctggaagaccacaataaacagctggagtcacagttacacaggctaaggcagctgctggagcaaccccaggcagaggccaaagtgaatggcacaacggtgtcctctccttctacctctctacagaggtccgacagcagtcagcctatgctgctccgagtggttggcagtcaaacttcggactccatgggtgaggaagatcttctcagtcctccccaggacacaagcacagggttagaggaggtgatggagcaactcaacaactccttccctagttcaagaggacacaatgtaggaagtcttttccacatggcagatgatttgggcagagcgatggagtccttagtatcagtcatgacagatgaagaaggagcagaataaatgttttacaactcctgattcccgcatggtttttataatattcatacaacaaagaggattagacagtaagagtttacaagaaataaatctatatttttgtgaagggtagtggtattatactgtagatttcagtagtttctaagtctgttattgttttgttaacaatggcaggttttacacgtctatgcaattgtacaaaaaagttataagaaaactacatgtaaaatcttgatagctaaataacttgccatttctttatatggaacgcattttgggt

SEQ ID NO: 5719 - DNA, 1858 bp, Homo sapiens
  source 1..1858: mol_type = unassigned DNA
gctttcagctgtgagcttgggcggcggcggcggcggcgctccactttcggggagcccggcggctctgggaagctcactcctccactcgtacccacactcgaccgcggagcccttgcagccatgagggaacagctcaaaggccacgagactcaaacaacttgctgggaccatcccaaaatgacagagctctaccagtctttagctgacctgaataatgtcagattctcagcttataggactgccatgaaactccgaagactgcagaaggccctttgcttggatctcttgagcctgtcagctgcatgtgatgccttggaccagcacaacctcaagcaaaatgaccagcccatggatatcctgcagattattaattgtttgaccactatttatgaccgcctggagcaagagcacaacaatttggtcaacgtccctctctgcgtggatatgtgtctgaactggctgctgaatgtttatgatacgggacgaacagggaggatccgtgtcctgtcttttaaaactggcatcatttccctgtgtaaagcacatttggaagacaagtacagataccttttcaagcaagtggcaagttcaacaggattttgtgaccagcgcaggctgggcctccttctgcatgattctatccaaattccaagacagttgggtgaagttgcatcctttgggggcagtaacattgagccaagtgtccggagctgcttccaatttgctaataataagccagagatcgaagcggccctcttcctagactggatgagactggaaccccagtccatggtgtggctgcccgtcctgcacagagtggctgctgcagaaactgccaagcatcaggccaaatgtaacatctgcaaagagtgtccaatcattggattcaggtacaggagtctaaagcactttaattatgacatctgccaaagctgctttttttctggtcgagttgcaaaaggccataaaatgcactatcccatggtggaatattgcactccgactacatcaggagaagatgttcgagactttgccaaggtactaaaaaacaaatttcgaaccaaaaggtattttgcgaagcatccccgaatgggctacctgccagtgcagactgtcttagagggggacaacatggaaacgaatctgcaagcagaatatgaccgtctaaagcagcagcacgaacataaaggcctgtccccactgccgtcccctcctgaaatgatgcccacctctccccagagtccccgggatgctgagctcattgctgaggccaagctactgcgtcaacacaaaggccgcctggaagccaggatgcaaatcctggaagaccacaataaacagctggagtcacagttacacaggctaaggcagctgctggagcaaccccaggcagaggccaaagtgaatggcacaacggtgtcctctccttctacctctctacagaggtccgacagcagtcagcctatgctgctccgagtggttggcagtcaaacttcggactccatgggtgaggaagatcttctcagtcctccccaggacacaagcacagggttagaggaggtgatggagcaactcaacaactccttccctagttcaagaggacacaatgtaggaagtcttttccacatggcagatgatttgggcagagcgatggagtccttagtatcagtcatgacagatgaagaaggagcagaataaatgttttacaactcctgattcccgcatggtttttataatattcatacaacaaagaggattagacagtaagagtttacaagaaataaatctatatttttgtgaagggtagtggtattatactgtagatttcagtagtttctaagtctgttattgttttgtt

SEQ ID NO: 5720 - DNA, 714 bp, Homo sapiens
  source 1..714: mol_type = unassigned DNA
ttggaagacaagtacagataccttttcaagcaagtggcaagttcaacaggattttgtgaccagcgcaggctgggcctccttctgcatgattctatccaaattccaagacagttgggtgaagttgcatcctttgggggcagtaacattgagccaagtgtccggagctgcttccaatttgctaataataagccagagatcgaagcggccctcttcctagactggatgagactggaaccccagtccatggtgtggctgcccgtcctgcacagagtggctgctgcagaaactgccaagcatcaggccaaatgtaacatctgcaaagagtgtccaatcattggattcaggtacaggagtctaaagcactttaattatgacatctgccaaagctgctttttttctggtcgagttgcaaaaggccataaaatgcactatcccatggtggaatattgcactccgactacatcaggagaagatgttcgagactttgccaaggtactaaaaaacaaatttcgaaccaaaaggtattttgcgaagcatccccgaatgggctacctgccagtgcagactgtcttagagggggacaacatggaaactcccgttactctgatcaacttctggccagtagattctgcgcctgcctcgtcccctcagctttcacacgatgatactcattcacgcattgaacattatgctagcagagatgatgaacatttg

SEQ ID NO: 5721 - DNA, 669 bp, Homo sapiens
  source 1..669: mol_type = unassigned DNA
ctctctccctcctgtctttgcaggctaataataagccagagatcgaagcggccctcttcctagactggatgagactggaaccccagtccatggtgtggctgcccgtcctgcacagagtggctgctgcagaaactgccaagcatcaggccaaatgtaacatctgcaaagagtgtccaatcattggattcaggtacaggagtctaaagcactttaattatgacatctgccaaagctgctttttttctggtcgagttgcaaaaggccataaaatgcactatcccatggtggaatattgcactccgactacatcaggagaagatgttcgagactttgccaaggtactaaaaaacaaatttcgaaccaaaaggtattttgcgaagcatccccgaatgggctacctgccagtgcagactgtcttagagggggacaacatggaaacgtgagtagtagcaaaagcagaacacactcttgtttgatgtatatttgaactcctctcagctgaacaccctccttcactcccaaatgcaaacagtctcttctatttctttctttttatttacattagctgaaaagagaaaaataagctgatgtccagttgccactttcccacgtcacttgacaatttctttttccaaaagttaaactttatctcacagggggaaaaaaaaa

SEQ ID NO: 5722 - DNA, 555 bp, Homo sapiens
  source 1..555: mol_type = unassigned DNA
aaagaatcccctttcaggccacatgagaagctgcgtgttaaagccaactccataaaggggaatggaaactagcgtatgaaattcagaaatgctacttttaaaggtggccgtcgaggaccgagtcaggcagctgcatgaagcccacagggactttggtccagcatctcagcactttctttccacgtctgtccagggtccctgggagagagccatctcgccaaacaaagtgccctactatatcaaccacgagactcaaacaacttgctgggaccatcccaaaatgacagagctctaccagtctttagctgacctgaataatgtcagattctcagcttataggactgccatgaaactccgaagactgcagaaggccctttgcttggatctcttgagcctgtcagctgcatgtgatgccttggaccagcacaacctcaagcaaaatgaccagcccatggatatcctgcagattattaattgtttgaccactatttatgaccgcctggagcaagagcacaacaatttggtcaacgtccctctctgcgtggatatgtgtct

SEQ ID NO: 5723 - DNA, 671 bp, Homo sapiens
  source 1..671: mol_type = unassigned DNA
ttcatgtaattgaatgaggaacaaaggtgttttgttctttttgtggcaggagctgatagccagcaaccacacttcaagaaatggaagacagctgtgaatgcttcattcaggcccaagtaaatataggaagaggtgtagtggtgtatagcgtactgcgtttaaagaaaaaacactctgaaataatgggaagaaggaagttatgatatattagtcaggcagtagatataccttaagctgaaatgaaatacaggtatcatggatatgagatctgtatatgtagaggaaagagtaatggaaaaatgtcaggggcagtgaaagcaaatgagaagtgagatgatttatatttattgaactaatgtccggtatctctttgacagagttgaataataatcagttgtcggtgtcctttctgtagtgttccacattggatgggtgaagaagtcctgatagtcgattattgatcacataacaaggtcaatttatcataactgaagtgcgatcgatttgtgggtgcaaagaagaaacaaattctggaaccgaataatgtttatattgcttttctctttggaaacaaagcagaaaggggcctttctgcttgtaagataaacatttcttcaatacactatggaagcgctttgaaataaagattccgaatggttcaaaagcaaaaa

SEQ ID NO: 5724 - DNA, 655 bp, Homo sapiens
  source 1..655: mol_type = unassigned DNA
catctcgccaaacaaagtgccctactatatcaagagctgatagccagcaaccacacttcaagaaatggaagacagctgtgaatgcttcattcaggcccaagtaaatataggaagaggtgtagtggtgtatagcgtactgcgtttaaagaaaaaacactctgaaataatgggaagaaggaagttatgatatattagtcaggcagtagatataccttaagctgaaatgaaatacaggtatcatggatatgagatctgtatatgtagaggaaagagtaatggaaaaatgtcaggggcagtgaaagcaaatgagaagtgagatgatttatatttattgaactaatgtccggtatctctttgacagagttgaataataatcagttgtcggtgtcctttctgtagtgttccacattggatgggtgaagaagtcctgatagtcgattattgatcacataacaaggtcaatttatcataactgaagtgcgatcgatttgtgggtgcaaagaagaaacaaattctggaaccgaataatgtttatattgcttttctctttggaaacaaagcagaaaggggcctttctgcttgtaagataaacatttcttcaatacactatggaagcgctttgaaataaagattccgaatggttcaaaagcaaaaa

SEQ ID NO: 5725 - DNA, 781 bp, Homo sapiens
  source 1..781: mol_type = unassigned DNA
tgcatattccaggcctcctctctttgaggttcctcccacatccacacgcctggctactgtttagtgcggagtacaaagtggccgtttattattattgactggtgaggcctgtgctccaaaattcattctgtcaacagaatgtaagcaaagttggcattttaaagcagggctctttcagtttctgggttttctcaggattgctatgcaacaggatcagtgctgtagtgcccggttcaagctgaaaatgttacacaggaagacataccatgtaaaggacctccaaggtgaaattgaagctcacacagatgtttatcacaacctggatgaaaacagccaaaaaatcctgagatccctggaaggttccgatgatgcagtcctgttacaaagacgtttggataacatgaacttcaagtggagtgaacttcggaaaaagtctctcaacattaggtcccatttggaagccagttctgaccagtggaagcgtctgcacctttctctgcaggaacttctggtgtggctacagctgaaagatgatgaattaagccggcaggcacctattggaggcgactttccagcagttcagaagcagaacgatgtacatagggccttcaagagggaattgaaaactaaagaacctgtaatcatgagtactcttgagactgtacgaatatttctgacagagcagcctttggaaggactagagaaactctaccaggagcccagagagctgcctcctgaggagagagcccagaatgtcactcggcttctacgaaagcaggct

SEQ ID NO: 5726 - DNA, 362 bp, Homo sapiens
  source 1..362: mol_type = unassigned DNA
gtggaagagattttgtctaaagggcagcatttgtacaaggaaaaaccagccactcagccagtgaagctcctactcagactgttactctggtgacacaacctgtggttactaaggaaactgccatctccaaactagaaatgccatcttccttgatgttggaggtacctgctctggcagatttcaaccgggcttggacagaacttaccgactggctttctctgcttgatcaagttataaaatcacagagggtgatggtgggtgaccttgaggatatcaacgagatgatcatcaagcagaaggcaacaatgcaggatttggaacagaggcgtccccagttggaagaactcattaccgctgcccaa

SEQ ID NO: 5727 - DNA, 771 bp, Homo sapiens
  source 1..771: mol_type = unassigned DNA
ctggcatcagttactgtgttgactcactcagtgttgggatcactcactttccccctacaggactcagatctgggaggcaattaccttcggagaaaaacgaataggaaaaactgaagtgttactttttttaaagctgctgaagtttgttggtttctcattgtttttaagcctactggagcaataaagtttgaagaacttttaccaggttttttttatcgctgccttgatatacacttttcaaaatgctttggtgggaagaagtagaggactgttatgaaagagaagatgttcaaaagaaaacattcacaaaatgggtaaatgcacaattttctaaggcgatttgacagatctgttgagaaatggcggcgttttcattatgatataaagatatttaatcagtggctaacagaagctgaacagtttctcagaaagacacaaattcctgagaattgggaacatgctaaatacaaatggtatcttaaggaactccaggatggcattgggcagcggcaaactgttgtcagaacattgaatgcaactggggaagaaataattcagcaatcctcaaaaacagatgccagtattctacaggaaaaattgggaagcctgaatctgcggtggcaggaggtctgcaaacagctgtcagacagaaaaaagaggctagaagaacaaaagaatatcttgtcagaatttcaaagagatttaaatgaatttgttttatggttggaggaagcagataacattgctagtatcccacttgaacctggaaaa

SEQ ID NO: 5728 - DNA, 616 bp, Homo sapiens
  source 1..616: mol_type = unassigned DNA
gaattggagcagtttaactcagatatacaaaaattgcttgaaccactggaggctgaaattcagcagggggtgaatctgaaagaggaagacttcaataaagatatgaatgaagacaatgagggtactgtaaaagaattgttgcaaagaggagacaacttacaacaaagaatcacagatgagagaaagcgagaggaaataaagataaaacagcagctgttacagacaaaacataatgctctcaaggatttgaggtctcaaagaagaaaaaaggctctagaaatttctcatcagtggtatcagtacaagaggcaggctgatgatctcctgaaatgcttggatgacattgaaaaaaaattagccagcctacctgagcccagagatgaaaggaaaataaagatgaactaatgacttatcggtatatggacgacttcttactcatgttagcccattcatttcatcagagcatcttcacacatcagtgttcactctctatagatttatttgcatattgtctaaatatgtttttttctgttattattttacactttttattttgcttcattctctgttgagttcctcaaacctttaaaaaggaaataaataacttattcactta

SEQ ID NO: 5729 - DNA, 303 bp, Homo sapiens
  source 1..303: mol_type = unassigned DNA
atgctttggtgggaagaagtagaggactgttatgaaagagaagatgttcaaaagaaaacattcacaaaatgggtaaatgcacaattttctaaggctactcaaaaagagattgagaaacagaaggtgcacctgaagagtatcacagaggtaggagaggccttgaaaacagttttgggcaagaaggagacgttggtggaagataaactcagtcttctgaatagtaactggatagctgtcacctcccgagcagaagagtggttaaatcttttgttggaataccagaaacacatggaaacttttgac

SEQ ID NO: 5730 - DNA, 123 bp, Homo sapiens
  source 1..123: mol_type = unassigned DNA
atgctttggtgggaagaagtagaggactgttatgaaagagaagatgttcaaaagaaaacattcacaaaatgggtaaatgcacaattttctaaggaataccagaaacacatggaaacttttgac

SEQ ID NO: 5731 - DNA, 3856 bp, Homo sapiens
  source 1..3856: mol_type = unassigned DNA
atgcgaaaggggagctgttggaattcaaatagactttctggttcccagcagtcggcagtaatagaatgctttcaggaagatgacagaatcaggagaaagatgctgttttgcactatcttgatttgttacagcagccaacttattggcatgatggagtgacaggaaaaacagctggcatggaagatgaaagagaagatgttcaaaagaaaacattcacaaaatgggtaaatgcacaattttctaagtttgggaagcagcatattgagaacctcttcagtgacctacaggatgggaggcgcctcctagacctcctcgaaggcctgacagggcaaaaactgccaaaagaaaaaggatccacaagagttcatgccctgaacaatgtcaacaaggcactgcgggttttgcagaacaataatgttgatttagtgaatattggaagtactgacatcgtagatggaaatcataaactgactcttggtttgatttggaatataatcctccactggcaggtcaaaaatgtaatgaaaaatatcatggctggattgcaacaaaccaacagtgaaaagattctcctgagctgggtccgacaatcaactcgtaattatccacaggttaatgtaatcaacttcaccaccagctggtctgatggcctggctttgaatgctctcatccatagtcataggccagacctatttgactggaatagtgtggtttgccagcagtcagccacacaacgactggaacatgcattcaacatcgccagatatcaattaggcatagagaaactactcgatcctgaagatgttgataccacctatccagataagaagtccatcttaatgtacatcacatcactcttccaagttttgcctcaacaagtgagcattgaagccatccaggaagtggaaatgttgccaaggccacctaaagtgactaaagaagaacattttcagttacatcatcaaatgcactattctcaacagatcacggtcagtctagcacagggatatgagagaacttcttcccctaagcctcgattcaagagctatgcctacacacaggctgcttatgtcaccacctctgaccctacacggagcccatttccttcacagcatttggaagctcctgaagacaagtcatttggcagttcattgatggagagtgaagtaaacctggaccgttatcaaacagctttagaagaagtattatcgtggcttctttctgctgaggacacattgcaagcacaaggagagatttctaatgatgtggaagtggtgaaagaccagtttcatactcatgaggggtacatgatggatttgacagcccatcagggccgggttggtaatattctacaattgggaagtaagctgattggaacaggaaaattatcagaagatgaagaaactgaagtacaagagcagatgaatctcctaaattcaagatgggaatgcctcagggtagctagcatggaaaaacaaagcaatttacatagagttttaatggatctccagaatcagaaactgaaagagttgaatgactggctaacaaaaacagaagaaagaacaaggaaaatggaggaagagcctcttggacctgatcttgaagacctaaaacgccaagtacaacaacataaggtgcttcaagaagatctagaacaagaacaagtcagggtcaattctctcactcacatggtggtggtagttgatgaatctagtggagatcacgcaactgctgctttggaagaacaacttaaggtattgggagatcgatgggcaaacatctgtagatggacagaagaccgctgggttcttttacaagacatccttctcaaatggcaacgtcttactgaagaacagtgcctttttagtgcatggctttcagaaaaagaagatgcagtgaacaagattcacacaactggctttaaagatcaaaatgaaatgttatcaagtcttcaaaaactggccgttttaaaagcggatctagaaaagaaaaagcaatccatgggcaaactgtattcactcaaacaagatcttctttcaacactgaagaataagtcagtgacccagaagacggaagcatggctggataactttgcccggtgttgggataatttagtccaaaaacttgaaaagagtacagcacagatttcacaggctgtcaccaccactcagccatcactaacacagacaactgtaatggaaacagtaactacggtgaccacaagggaacagatcctggtaaagcatgctcaagaggaacttccaccaccacctccccaaaagaagaggcagattactgtggattctgaaattaggaaaaggttggatgttgatataactgaacttcacagctggattactcgctcagaagctgtgttgcagagtcctgaatttgcaatctttcggaaggaaggcaacttctcagacttaaaagaaaaagtcaatgtaggttatgcattaatttttatatctgtactcattttgtgctgcttgtaaactccgtgctttgttatctgtgattctactagttgatagattaatgcgatatgataaaatgctgtttaatatgtcttaaaaatatattttagatagcaagcaaaatcaaagtttagcctagagaaatctttctggattcttctgtgactgactagggatgcctttcataaacttgccttaacttacatattatttaactataaattaacaattttatgacattaattcatgttgattcctttcatatattgttcagttacctcaaggctaggccttagcaagcttgcacaattgtgtagagtagaatagagtaaaatagaatagaataatataatagataccatacttaggactatgtctatattctcactgttatcaaaaagttattctttatagtcatcaatccctgtcatatattataagatatttaaatttcccagatatttgtgtattaccttatctaaaaggtgtccagcctttctcagtatttacatgtggtagcagatgctttgttgttgttattcccttctgagatggtataattttgaccttcacaaataggaagttttattaatttaatataaagtgtttcatctttagggaaattgtcaaggctttaatttttcaacttcaacaattataaaacatgcatctttgtatatgattggcaacagtttgtaaaataatttctaacaggcagagtaaataaaatgggcaagctaaggaagcagtgattatgaatgaaaagtaattttatccatgggaagatcacatctaaatgtgtatattagctctgctttttctctccaggattcaaatcatgaagttcaaaatccattgtatttttacaaatacgacattacctcagttacaagctaatgtttgctgttggggttggaacttttggagatcaacaaaagatatatatatattctggaaaaaaaatctattttttaggctgcttgaaaaagggaagacaattttgtcaccagttcttcttagagttaactacttataaattggaaagctattttaaattacttattagctttataagacatgctgttgtcagcattataatagactattctaaattgtttcaagaaatgggaaatatgaaaactgaaagataatatataattgtagaaaattagctaaatgtcttttttcaagtatacttctttgaaggtaaattgtttgctgtgatttttgagggaaattctcttagtagtagaaaattaattagagaacattaaactctaattttcaaacatcatgttacatatttgaccactgaaagtatgaatcacctttagcattttattagctaattaaaaatgattattgatctgattctcaca

SEQ ID NO: 5732 - DNA, 234 bp, Homo sapiens
  source 1..234: mol_type = unassigned DNA
cgtaattatccacaggttaatgtaatcaacttcaccaccagctggtctgatggcctggctttgaatgctctcatccatagtcataggtattgggagatcgatgggcaaacatctgtagatggacagaagaccgctgggttcttttacaagacatccttctcaaatggcaacgtcttactgaagaacagtgcctttttagtgcatggctttcagaaaaagaagatgcagtgaaca

SEQ ID NO: 5733 - DNA, 375 bp, Homo sapiens
  source 1..375: mol_type = unassigned DNA
gagaacctcttcagtgacctacaggatgggaggcgcctcctagacctcctcgaaggcctgacagggcaaaaactgccaaaagaaaaaggatccacaagagttcatgccctgaacaatgtcaacaaggcactgcgggttttgcagaacaataatgttgatttagtgaatattggaagtactgacatcgtagatggaaatcataaactgactcttggtttgatttggaatataatcctccactggcaggtattgggagatcgatgggcaaacatctgtagatggacagaagaccgctgggttcttttacaagacatccttctcaaatggcaacgtcttactgaagaacagtgcctttttagtgcatggctttcagaa

SEQ ID NO: 5734 - DNA, 371 bp, Homo sapiens
  source 1..371: mol_type = unassigned DNA
gttttttcaagaagcaggattcaaggtttaacttcaaatacaaatttgaatcaacactaaattttaggagtgcataatgaaagagaagatgttcaaaagaaaacattcacaaaatgggtaaatgcacaattttctaaggtctgtgcaggccaaggttatggcctagctgagaagagggctcagaggagcctagctaaagtttggtcaaggggagcgtcttggtggagcctcactcctgttcaagtaaagaagacacattattcatccttctgaacagttttgggaagcagcatattgagaacctcttcagtgacctacaggatgggaggcgcctcctagacctcctcgaaggcctgacagggcaaaaactg

SEQ ID NO: 5735 - DNA, 380 bp, Homo sapiens
  source 1..380: mol_type = unassigned DNA
tgctgtctgtgaagctgaatctgtgagaacacctcactattcacggcaaccggagtggaagaaacaggtgcaaaaagattgtgtgtttgtctgcttttgtgaggctggtcagagattctgtgcctgctttatctgtgcttggctatgactctacctccaggtttaccataccccatagaatgtgtaagagaaaagtaccaacagggaaatcagcaaaaagctttcctatgaaggtgtgtagccagcctccgcagaatttgaaatgtctgaggtctcatctggtgagtaaaagctgcagataaatgcaacagccattcagaagaatgataaattccacaagcattcagaagcaggcttccctaaagatgaaagagaagatg

SEQ ID NO: 5736 - DNA, 554 bp, Homo sapiens
  source 1..554: mol_type = unassigned DNA
tttttttaaagctgctgaagtttgttggtttctcattgtttttaagcctactggagcaataaagtttgaagaacttttaccaggttttttttatcgctgccttgatatacacttttcaaaatgctttggtgggaagaagtagaggactgttgaaaatggatgaagctggaaaccatcattctcatcagactaacacaggaacaggaaaacaaacaccgcatgttctcactcataagtgggagttgaacaatgagaacacatggacacagggaggagaacatcacacactggggcctgttggtgggtgaggggctatgggagggatagcattaggagaaatacctaatgtagatgatgagttgatgggtgcagcaagccaccatggcatgtgtatacctatgtaacaaacctgcatgttctgcacatgtatcccagaatttaaagtataataaaaaaaaaattgaggtctgcaacaggcaaagccactaaagaaactcagatatttttcattgtaatgttgaaaaagttatgaaatttcactaagcccgtgtcta

SEQ ID NO: 5737 - DNA, 7410 bp, Homo sapiens
  source 1..7410: mol_type = unassigned DNA
acactagcaatggcaaagctttgtgcggaggcattgctggctgctctgaactaaaagcatccgtggggaccgaaagaggtttttgcacaccttattaaggaactccaggatggcattgggcagcggcaaactgttgtcagaacattgaatgcaactggggaagaaataattcagcaatcctcaaaaacagatgccagtattctacaggaaaaattgggaagcctgaatctgcggtggcaggaggtctgcaaacagctgtcagacagaaaaaagaggctagaagaacaaaagaatatcttgtcagaatttcaaagagatttaaatgaatttgttttatggttggaggaagcagataacattgctagtatcccacttgaacctggaaaagagcagcaactaaaagaaaagcttgagcaagtcaagttactggtggaagagttgcccctgcgccagggaattctcaaacaattaaatgaaactggaggacccgtgcttgtaagtgctcccataagcccagaagagcaagataaacttgaaaataagctcaagcagacaaatctccagtggataaaggtttccagagctttacctgagaaacaaggagaaattgaagctcaaataaaagaccttgggcagcttgaaaaaaagcttgaagaccttgaagagcagttaaatcatctgctgctgtggttatctcctattaggaatcagttggaaatttataaccaaccaaaccaagaaggaccatttgacgttaaggaaactgaaatagcagttcaagctaaacaaccggatgtggaagagattttgtctaaagggcagcatttgtacaaggaaaaaccagccactcagccagtgaagaggaagttagaagatctgagctctgagtggaaggcggtaaaccgtttacttcaagagctgagggcaaagcagcctgacctagctcctggactgaccactattggagcctctcctactcagactgttactctggtgacacaacctgtggttactaaggaaactgccatctccaaactagaaatgccatcttccttgatgttggaggtacctgctctggcagatttcaaccgggcttggacagaacttaccgactggctttctctgcttgatcaagttataaaatcacagagggtgatggtgggtgaccttgaggatatcaacgagatgatcatcaagcagaaggcaacaatgcaggatttggaacagaggcgtccccagttggaagaactcattaccgctgcccaaaatttgaaaaacaagaccagcaatcaagaggctagaacaatcattacggatcgaattgaaagaattcagaatcagtgggatgaagtacaagaacaccttcagaaccggaggcaacagttgaatgaaatgttaaaggattcaacacaatggctggaagctaaggaagaagctgagcaggtcttaggacaggccagagccaagcttgagtcatggaaggagggtccctatacagtagatgcaatccaaaagaaaatcacagaaaccaagcagttggccaaagacctccgccagtggcagacaaatgtagatgtggcaaatgacttggccctgaaacttctccgggattattctgcagatgataccagaaaagtccacatgataacagagaatatcaatgcctcttggagaagcattcataaaagggtgagtgagcgagaggctgctttggaagaaactcatagattactgcaacagttccccctggacctggaaaagtttcttgcctggcttacagaagctgaaacaactgccaatgtcctacaggatgctacccgtaaggaaaggctcctagaagactccaagggagtaaaagagctgatgaaacaatggcaagacctccaaggtgaaattgaagctcacacagatgtttatcacaacctggatgaaaacagccaaaaaatcctgagatccctggaaggttccgatgatgcagtcctgttacaaagacgtttggataacatgaacttcaagtggagtgaacttcggaaaaagtctctcaacattaggtcccatttggaagccagttctgaccagtggaagcgtctgcacctttctctgcaggaacttctggtgtggctacagctgaaagatgatgaattaagccggcaggcacctattggaggcgactttccagcagttcagaagcagaacgatgtacatagggccttcaagagggaattgaaaactaaagaacctgtaatcatgagtactcttgagactgtacgaatatttctgacagagcagcctttggaaggactagagaaactctaccaggagcccagagagctgcctcctgaggagagagcccagaatgtcactcggcttctacgaaagcaggctgaggaggtcaatactgagtgggaaaaattgaacctgcactccgctgactggcagagaaaaatagatgagacccttgaaagactccgggaacttcaagaggccacggatgagctggacctcaagctgcgccaagctgaggtgatcaagggatcctggcagcccgtgggcgatctcctcattgactctctccaagatcacctcgagaaagtcaaggcacttcgaggagaaattgcgcctctgaaagagaacgtgagccacgtcaatgaccttgctcgccagcttaccactttgggcattcagctctcaccgtataacctcagcactctggaagacctgaacaccagatggaagcttctgcaggtggccgtcgaggaccgagtcaggcagctgcatgaagcccacagggactttggtccagcatctcagcactttctttccacgtctgtccagggtccctgggagagagccatctcgccaaacaaagtgccctactatatcaaccacgagactcaaacaacttgctgggaccatcccaaaatgacagagctctaccagtctttagctgacctgaataatgtcagattctcagcttataggactgccatgaaactccgaagactgcagaaggccctttgcttggatctcttgagcctgtcagctgcatgtgatgccttggaccagcacaacctcaagcaaaatgaccagcccatggatatcctgcagattattaattgtttgaccactatttatgaccgcctggagcaagagcacaacaatttggtcaacgtccctctctgcgtggatatgtgtctgaactggctgctgaatgtttatgatacgggacgaacagggaggatccgtgtcctgtcttttaaaactggcatcatttccctgtgtaaagcacatttggaagacaagtacagataccttttcaagcaagtggcaagttcaacaggattttgtgaccagcgcaggctgggcctccttctgcatgattctatccaaattccaagacagttgggtgaagttgcatcctttgggggcagtaacattgagccaagtgtccggagctgcttccaatttgctaataataagccagagatcgaagcggccctcttcctagactggatgagactggaaccccagtccatggtgtggctgcccgtcctgcacagagtggctgctgcagaaactgccaagcatcaggccaaatgtaacatctgcaaagagtgtccaatcattggattcaggtacaggagtctaaagcactttaattatgacatctgccaaagctgctttttttctggtcgagttgcaaaaggccataaaatgcactatcccatggtggaatattgcactccgactacatcaggagaagatgttcgagactttgccaaggtactaaaaaacaaatttcgaaccaaaaggtattttgcgaagcatccccgaatgggctacctgccagtgcagactgtcttagagggggacaacatggaaactcccgttactctgatcaacttctggccagtagattctgcgcctgcctcgtcccctcagctttcacacgatgatactcattcacgcattgaacattatgctagcaggctagcagaaatggaaaacagcaatggatcttatctaaatgatagcatctctcctaatgagagcatagatgatgaacatttgttaatccagcattactgccaaagtttgaaccaggactcccccctgagccagcctcgtagtcctgcccagatcttgatttccttagagagtgaggaaagaggggagctagagagaatcctagcagatcttgaggaagaaaacaggaatctgcaagcagaatatgaccgtctaaagcagcagcacgaacataaaggcctgtccccactgccgtcccctcctgaaatgatgcccacctctccccagagtccccgggatgctgagctcattgctgaggccaagctactgcgtcaacacaaaggccgcctggaagccaggatgcaaatcctggaagaccacaataaacagctggagtcacagttacacaggctaaggcagctgctggagcaaccccaggcagaggccaaagtgaatggcacaacggtgtcctctccttctacctctctacagaggtccgacagcagtcagcctatgctgctccgagtggttggcagtcaaacttcggactccatgggtgaggaagatcttctcagtcctccccaggacacaagcacagggttagaggaggtgatggagcaactcaacaactccttccctagttcaagaggaagaaatacccctggaaagccaatgagagaggacacaatgtaggaagtcttttccacatggcagatgatttgggcagagcgatggagtccttagtatcagtcatgacagatgaagaaggagcagaataaatgttttacaactcctgattcccgcatggtttttataatattcatacaacaaagaggattagacagtaagagtttacaagaaataaatctatatttttgtgaagggtagtggtattatactgtagatttcagtagtttctaagtctgttattgttttgttaacaatggcaggttttacacgtctatgcaattgtacaaaaaagttataagaaaactacatgtaaaatcttgatagctaaataacttgccatttctttatatggaacgcattttgggttgtttaaaaatttataacagttataaagaaagattgtaaactaaagtgtgctttataaaaaaaagttgtttataaaaacccctaaaaacaaaacaaacacacacacacacacatacacacacacacacaaaactttgaggcagcgcattgttttgcatccttttggcgtgatatccatatgaaattcatggctttttctttttttgcatattaaagataagacttcctctaccaccacaccaaatgactactacacactgctcatttgagaactgtcagctgagtggggcaggcttgagttttcatttcatatatctatatgtctataagtatataaatactatagttatatagataaagagatacgaatttctatagactgactttttccattttttaaatgttcatgtcacatcctaatagaaagaaattacttctagtcagtcatccaggcttacctgcttggtctagaatggatttttcccggagccggaagccaggaggaaactacaccacactaaaacattgtctacagctccagatgtttctcattttaaacaactttccactgacaacgaaagtaaagtaaagtattggatttttttaaagggaacatgtgaatgaatacacaggacttattatatcagagtgagtaatcggttggttggttgattgattgattgattgatacattcagcttcctgctgctagcaatgccacgatttagatttaatgatgcttcagtggaaatcaatcagaaggtattctgaccttgtgaacatcagaaggtattttttaactcccaagcagtagcaggacgatgatagggctggagggctatggattcccagcccatccctgtgaaggagtaggccactctttaagtgaaggattggatgattgttcataatacataaagttctctgtaattacaactaaattattatgccctcttctcacagtcaaaaggaactgggtggtttggtttttgttgcttttttagatttattgtcccatgtgggatgagtttttaaatgccacaagacataatttaaaataaataaactttgggaaaaggtgtaaaacagtagccccatcacatttgtgatactgacaggtatcaacccagaagcccatgaactgtgtttccatcctttgcatttctctgcgagtagttccacacaggtttgtaagtaagtaagaaagaaggcaaattgattcaaatgttacaaaaaaacccttcttggtggattagacaggttaaatatataaacaaacaaacaaaaattgctcaaaaaagaggagaaaagctcaagaggaaaagctaaggactggtaggaaaaagctttactctttcatgccattttatttctttttgatttttaaatcattcattcaatagataccaccgtgtgacctataattttgcaaatctgttacctctgacatcaagtgtaattagcttttggagagtgggctgacatcaagtgtaattagcttttggagagtgggttttgtccattattaataattaattaattaacatcaaacacggcttctcatgctatttctacctcactttggttttggggtgttcctgataattgtgcacacctgagttcacagcttcaccacttgtccattgcgttattttctttttcctttataattctttctttttccttcataattttcaaaagaaaacccaaagctctaaggtaacaaattaccaaattacatgaagatttggtttttgtcttgcatttttttcctttatgtgacgctggaccttttctttacccaaggatttttaaaactcagatttaaaacaaggggttactttacatcctactaagaagtttaagtaagtaagtttcattctaaaatcagaggtaaatagagtgcataaataattttgttttaatctttttgtttttcttttagacacattagctctggagtgagtctgtcataatatttgaacaaaaattgagagctttattgctgcattttaagcataattaatttggacattatttcgtgttgtgttctttataaccaccaagtattaaactgtaaatcataatgtaactgaagcataaacatcacatggcatgttttgtcattgttttcaggtactgagttcttacttgagtatcataatatattgtgttttaacaccaacactgtaacatttacgaattatttttttaaacttcagttttactgcattttcacaacatatcagacttcaccaaatatatgccttactattgtattatagtactgctttactgtgtatctcaataaagcacgcagttatgttac

SEQ ID NO: 5738 - DNA, 5623 bp, Homo sapiens
  source 1..5623: mol_type = unassigned DNA
gggttttctcaggattgctatgcaacaggatcagtgctgtagtgcccggttcaagctgaaaatgttacacaggaagacataccatgtaaaggacctccaaggtgaaattgaagctcacacagatgtttatcacaacctggatgaaaacagccaaaaaatcctgagatccctggaaggttccgatgatgcagtcctgttacaaagacgtttggataacatgaacttcaagtggagtgaacttcggaaaaagtctctcaacattaggtcccatttggaagccagttctgaccagtggaagcgtctgcacctttctctgcaggaacttctggtgtggctacagctgaaagatgatgaattaagccggcaggcacctattggaggcgactttccagcagttcagaagcagaacgatgtacatagggccttcaagagggaattgaaaactaaagaacctgtaatcatgagtactcttgagactgtacgaatatttctgacagagcagcctttggaaggactagagaaactctaccaggagcccagagagctgcctcctgaggagagagcccagaatgtcactcggcttctacgaaagcaggctgaggaggtcaatactgagtgggaaaaattgaacctgcactccgctgactggcagagaaaaatagatgagacccttgaaagactccgggaacttcaagaggccacggatgagctggacctcaagctgcgccaagctgaggtgatcaagggatcctggcagcccgtgggcgatctcctcattgactctctccaagatcacctcgagaaagtcaaggcacttcgaggagaaattgcgcctctgaaagagaacgtgagccacgtcaatgaccttgctcgccagcttaccactttgggcattcagctctcaccgtataacctcagcactctggaagacctgaacaccagatggaagcttctgcaggtggccgtcgaggaccgagtcaggcagctgcatgaagcccacagggactttggtccagcatctcagcactttctttccacgtctgtccagggtccctgggagagagccatctcgccaaacaaagtgccctactatatcaaccacgagactcaaacaacttgctgggaccatcccaaaatgacagagctctaccagtctttagctgacctgaataatgtcagattctcagcttataggactgccatgaaactccgaagactgcagaaggccctttgcttggatctcttgagcctgtcagctgcatgtgatgccttggaccagcacaacctcaagcaaaatgaccagcccatggatatcctgcagattattaattgtttgaccactatttatgaccgcctggagcaagagcacaacaatttggtcaacgtccctctctgcgtggatatgtgtctgaactggctgctgaatgtttatgatacgggacgaacagggaggatccgtgtcctgtcttttaaaactggcatcatttccctgtgtaaagcacatttggaagacaagtacagataccttttcaagcaagtggcaagttcaacaggattttgtgaccagcgcaggctgggcctccttctgcatgattctatccaaattccaagacagttgggtgaagttgcatcctttgggggcagtaacattgagccaagtgtccggagctgcttccaatttgctaataataagccagagatcgaagcggccctcttcctagactggatgagactggaaccccagtccatggtgtggctgcccgtcctgcacagagtggctgctgcagaaactgccaagcatcaggccaaatgtaacatctgcaaagagtgtccaatcattggattcaggtacaggagtctaaagcactttaattatgacatctgccaaagctgctttttttctggtcgagttgcaaaaggccataaaatgcactatcccatggtggaatattgcactccgactacatcaggagaagatgttcgagactttgccaaggtactaaaaaacaaatttcgaaccaaaaggtattttgcgaagcatccccgaatgggctacctgccagtgcagactgtcttagagggggacaacatggaaactcccgttactctgatcaacttctggccagtagattctgcgcctgcctcgtcccctcagctttcacacgatgatactcattcacgcattgaacattatgctagcaggctagcagaaatggaaaacagcaatggatcttatctaaatgatagcatctctcctaatgagagcatagatgatgaacatttgttaatccagcattactgccaaagtttgaaccaggactcccccctgagccagcctcgtagtcctgcccagatcttgatttccttagagagtgaggaaagaggggagctagagagaatcctagcagatcttgaggaagaaaacaggaatctgcaagcagaatatgaccgtctaaagcagcagcacgaacataaaggcctgtccccactgccgtcccctcctgaaatgatgcccacctctccccagagtccccgggatgctgagctcattgctgaggccaagctactgcgtcaacacaaaggccgcctggaagccaggatgcaaatcctggaagaccacaataaacagctggagtcacagttacacaggctaaggcagctgctggagcaaccccaggcagaggccaaagtgaatggcacaacggtgtcctctccttctacctctctacagaggtccgacagcagtcagcctatgctgctccgagtggttggcagtcaaacttcggactccatgggtgaggaagatcttctcagtcctccccaggacacaagcacagggttagaggaggtgatggagcaactcaacaactccttccctagttcaagaggaagaaatacccctggaaagccaatgagagaggacacaatgtaggaagtcttttccacatggcagatgatttgggcagagcgatggagtccttagtatcagtcatgacagatgaagaaggagcagaataaatgttttacaactcctgattcccgcatggtttttataatattcatacaacaaagaggattagacagtaagagtttacaagaaataaatctatatttttgtgaagggtagtggtattatactgtagatttcagtagtttctaagtctgttattgttttgttaacaatggcaggttttacacgtctatgcaattgtacaaaaaagttataagaaaactacatgtaaaatcttgatagctaaataacttgccatttctttatatggaacgcattttgggttgtttaaaaatttataacagttataaagaaagattgtaaactaaagtgtgctttataaaaaaaagttgtttataaaaacccctaaaaacaaaacaaacacacacacacacacatacacacacacacacaaaactttgaggcagcgcattgttttgcatccttttggcgtgatatccatatgaaattcatggctttttctttttttgcatattaaagataagacttcctctaccaccacaccaaatgactactacacactgctcatttgagaactgtcagctgagtggggcaggcttgagttttcatttcatatatctatatgtctataagtatataaatactatagttatatagataaagagatacgaatttctatagactgactttttccattttttaaatgttcatgtcacatcctaatagaaagaaattacttctagtcagtcatccaggcttacctgcttggtctagaatggatttttcccggagccggaagccaggaggaaactacaccacactaaaacattgtctacagctccagatgtttctcattttaaacaactttccactgacaacgaaagtaaagtaaagtattggatttttttaaagggaacatgtgaatgaatacacaggacttattatatcagagtgagtaatcggttggttggttgattgattgattgattgatacattcagcttcctgctgctagcaatgccacgatttagatttaatgatgcttcagtggaaatcaatcagaaggtattctgaccttgtgaacatcagaaggtattttttaactcccaagcagtagcaggacgatgatagggctggagggctatggattcccagcccatccctgtgaaggagtaggccactctttaagtgaaggattggatgattgttcataatacataaagttctctgtaattacaactaaattattatgccctcttctcacagtcaaaaggaactgggtggtttggtttttgttgcttttttagatttattgtcccatgtgggatgagtttttaaatgccacaagacataatttaaaataaataaactttgggaaaaggtgtaaaacagtagccccatcacatttgtgatactgacaggtatcaacccagaagcccatgaactgtgtttccatcctttgcatttctctgcgagtagttccacacaggtttgtaagtaagtaagaaagaaggcaaattgattcaaatgttacaaaaaaacccttcttggtggattagacaggttaaatatataaacaaacaaacaaaaattgctcaaaaaagaggagaaaagctcaagaggaaaagctaaggactggtaggaaaaagctttactctttcatgccattttatttctttttgatttttaaatcattcattcaatagataccaccgtgtgacctataattttgcaaatctgttacctctgacatcaagtgtaattagcttttggagagtgggctgacatcaagtgtaattagcttttggagagtgggttttgtccattattaataattaattaattaacatcaaacacggcttctcatgctatttctacctcactttggttttggggtgttcctgataattgtgcacacctgagttcacagcttcaccacttgtccattgcgttattttctttttcctttataattctttctttttccttcataattttcaaaagaaaacccaaagctctaaggtaacaaattaccaaattacatgaagatttggtttttgtcttgcatttttttcctttatgtgacgctggaccttttctttacccaaggatttttaaaactcagatttaaaacaaggggttactttacatcctactaagaagtttaagtaagtaagtttcattctaaaatcagaggtaaatagagtgcataaataattttgttttaatctttttgtttttcttttagacacattagctctggagtgagtctgtcataatatttgaacaaaaattgagagctttattgctgcattttaagcataattaatttggacattatttcgtgttgtgttctttataaccaccaagtattaaactgtaaatcataatgtaactgaagcataaacatcacatggcatgttttgtcattgttttcaggtactgagttcttacttgagtatcataatatattgtgttttaacaccaacactgtaacatttacgaattatttttttaaacttcagttttactgcattttcacaacatatcagacttcaccaaatatatgccttactattgtattatagtactgctttactgtgtatctcaataaagcacgcagttatgttac

SEQ ID NO: 5739 - DNA, 7080 bp, Homo sapiens
  source 1..7080: mol_type = unassigned DNA
acactagcaatggcaaagctttgtgcggaggcattgctggctgctctgaactaaaagcatccgtggggaccgaaagaggtttttgcacaccttattaaggaactccaggatggcattgggcagcggcaaactgttgtcagaacattgaatgcaactggggaagaaataattcagcaatcctcaaaaacagatgccagtattctacaggaaaaattgggaagcctgaatctgcggtggcaggaggtctgcaaacagctgtcagacagaaaaaagaggctagaagaacaaaagaatatcttgtcagaatttcaaagagatttaaatgaatttgttttatggttggaggaagcagataacattgctagtatcccacttgaacctggaaaagagcagcaactaaaagaaaagcttgagcaagtcaagttactggtggaagagttgcccctgcgccagggaattctcaaacaattaaatgaaactggaggacccgtgcttgtaagtgctcccataagcccagaagagcaagataaacttgaaaataagctcaagcagacaaatctccagtggataaaggtttccagagctttacctgagaaacaaggagaaattgaagctcaaataaaagaccttgggcagcttgaaaaaaagcttgaagaccttgaagagcagttaaatcatctgctgctgtggttatctcctattaggaatcagttggaaatttataaccaaccaaaccaagaaggaccatttgacgttaaggaaactgaaatagcagttcaagctaaacaaccggatgtggaagagattttgtctaaagggcagcatttgtacaaggaaaaaccagccactcagccagtgaagaggaagttagaagatctgagctctgagtggaaggcggtaaaccgtttacttcaagagctgagggcaaagcagcctgacctagctcctggactgaccactattggagcctctcctactcagactgttactctggtgacacaacctgtggttactaaggaaactgccatctccaaactagaaatgccatcttccttgatgttggaggtacctgctctggcagatttcaaccgggcttggacagaacttaccgactggctttctctgcttgatcaagttataaaatcacagagggtgatggtgggtgaccttgaggatatcaacgagatgatcatcaagcagaaggcaacaatgcaggatttggaacagaggcgtccccagttggaagaactcattaccgctgcccaaaatttgaaaaacaagaccagcaatcaagaggctagaacaatcattacggatcgaattgaaagaattcagaatcagtgggatgaagtacaagaacaccttcagaaccggaggcaacagttgaatgaaatgttaaaggattcaacacaatggctggaagctaaggaagaagctgagcaggtcttaggacaggccagagccaagcttgagtcatggaaggagggtccctatacagtagatgcaatccaaaagaaaatcacagaaaccaagcagttggccaaagacctccgccagtggcagacaaatgtagatgtggcaaatgacttggccctgaaacttctccgggattattctgcagatgataccagaaaagtccacatgataacagagaatatcaatgcctcttggagaagcattcataaaagggtgagtgagcgagaggctgctttggaagaaactcatagattactgcaacagttccccctggacctggaaaagtttcttgcctggcttacagaagctgaaacaactgccaatgtcctacaggatgctacccgtaaggaaaggctcctagaagactccaagggagtaaaagagctgatgaaacaatggcaagacctccaaggtgaaattgaagctcacacagatgtttatcacaacctggatgaaaacagccaaaaaatcctgagatccctggaaggttccgatgatgcagtcctgttacaaagacgtttggataacatgaacttcaagtggagtgaacttcggaaaaagtctctcaacattaggtcccatttggaagccagttctgaccagtggaagcgtctgcacctttctctgcaggaacttctggtgtggctacagctgaaagatgatgaattaagccggcaggcacctattggaggcgactttccagcagttcagaagcagaacgatgtacatagggccttcaagagggaattgaaaactaaagaacctgtaatcatgagtactcttgagactgtacgaatatttctgacagagcagcctttggaaggactagagaaactctaccaggagcccagagagctgcctcctgaggagagagcccagaatgtcactcggcttctacgaaagcaggctgaggaggtcaatactgagtgggaaaaattgaacctgcactccgctgactggcagagaaaaatagatgagacccttgaaagactccgggaacttcaagaggccacggatgagctggacctcaagctgcgccaagctgaggtgatcaagggatcctggcagcccgtgggcgatctcctcattgactctctccaagatcacctcgagaaagtcaaggcacttcgaggagaaattgcgcctctgaaagagaacgtgagccacgtcaatgaccttgctcgccagcttaccactttgggcattcagctctcaccgtataacctcagcactctggaagacctgaacaccagatggaagcttctgcaggtggccgtcgaggaccgagtcaggcagctgcatgaagcccacagggactttggtccagcatctcagcactttctttccacgtctgtccagggtccctgggagagagccatctcgccaaacaaagtgccctactatatcaaccacgagactcaaacaacttgctgggaccatcccaaaatgacagagctctaccagtctttagctgacctgaataatgtcagattctcagcttataggactgccatgaaactccgaagactgcagaaggccctttgcttggatctcttgagcctgtcagctgcatgtgatgccttggaccagcacaacctcaagcaaaatgaccagcccatggatatcctgcagattattaattgtttgaccactatttatgaccgcctggagcaagagcacaacaatttggtcaacgtccctctctgcgtggatatgtgtctgaactggctgctgaatgtttatgatacgggacgaacagggaggatccgtgtcctgtcttttaaaactggcatcatttccctgtgtaaagcacatttggaagacaagtacagataccttttcaagcaagtggcaagttcaacaggattttgtgaccagcgcaggctgggcctccttctgcatgattctatccaaattccaagacagttgggtgaagttgcatcctttgggggcagtaacattgagccaagtgtccggagctgcttccaatttgctaataataagccagagatcgaagcggccctcttcctagactggatgagactggaaccccagtccatggtgtggctgcccgtcctgcacagagtggctgctgcagaaactgccaagcatcaggccaaatgtaacatctgcaaagagtgtccaatcattggattcaggtacaggagtctaaagcactttaattatgacatctgccaaagctgctttttttctggtcgagttgcaaaaggccataaaatgcactatcccatggtggaatattgcactccgactacatcaggagaagatgttcgagactttgccaaggtactaaaaaacaaatttcgaaccaaaaggtattttgcgaagcatccccgaatgggctacctgccagtgcagactgtcttagagggggacaacatggaaacgaatctgcaagcagaatatgaccgtctaaagcagcagcacgaacataaaggcctgtccccactgccgtcccctcctgaaatgatgcccacctctccccagagtccccgggatgctgagctcattgctgaggccaagctactgcgtcaacacaaaggccgcctggaagccaggatgcaaatcctggaagaccacaataaacagctggagtcacagttacacaggctaaggcagctgctggagcaaccccaggcagaggccaaagtgaatggcacaacggtgtcctctccttctacctctctacagaggtccgacagcagtcagcctatgctgctccgagtggttggcagtcaaacttcggactccatgggtgaggaagatcttctcagtcctccccaggacacaagcacagggttagaggaggtgatggagcaactcaacaactccttccctagttcaagaggaagaaatacccctggaaagccaatgagagaggacacaatgtaggaagtcttttccacatggcagatgatttgggcagagcgatggagtccttagtatcagtcatgacagatgaagaaggagcagaataaatgttttacaactcctgattcccgcatggtttttataatattcatacaacaaagaggattagacagtaagagtttacaagaaataaatctatatttttgtgaagggtagtggtattatactgtagatttcagtagtttctaagtctgttattgttttgttaacaatggcaggttttacacgtctatgcaattgtacaaaaaagttataagaaaactacatgtaaaatcttgatagctaaataacttgccatttctttatatggaacgcattttgggttgtttaaaaatttataacagttataaagaaagattgtaaactaaagtgtgctttataaaaaaaagttgtttataaaaacccctaaaaacaaaacaaacacacacacacacacatacacacacacacacaaaactttgaggcagcgcattgttttgcatccttttggcgtgatatccatatgaaattcatggctttttctttttttgcatattaaagataagacttcctctaccaccacaccaaatgactactacacactgctcatttgagaactgtcagctgagtggggcaggcttgagttttcatttcatatatctatatgtctataagtatataaatactatagttatatagataaagagatacgaatttctatagactgactttttccattttttaaatgttcatgtcacatcctaatagaaagaaattacttctagtcagtcatccaggcttacctgcttggtctagaatggatttttcccggagccggaagccaggaggaaactacaccacactaaaacattgtctacagctccagatgtttctcattttaaacaactttccactgacaacgaaagtaaagtaaagtattggatttttttaaagggaacatgtgaatgaatacacaggacttattatatcagagtgagtaatcggttggttggttgattgattgattgattgatacattcagcttcctgctgctagcaatgccacgatttagatttaatgatgcttcagtggaaatcaatcagaaggtattctgaccttgtgaacatcagaaggtattttttaactcccaagcagtagcaggacgatgatagggctggagggctatggattcccagcccatccctgtgaaggagtaggccactctttaagtgaaggattggatgattgttcataatacataaagttctctgtaattacaactaaattattatgccctcttctcacagtcaaaaggaactgggtggtttggtttttgttgcttttttagatttattgtcccatgtgggatgagtttttaaatgccacaagacataatttaaaataaataaactttgggaaaaggtgtaaaacagtagccccatcacatttgtgatactgacaggtatcaacccagaagcccatgaactgtgtttccatcctttgcatttctctgcgagtagttccacacaggtttgtaagtaagtaagaaagaaggcaaattgattcaaatgttacaaaaaaacccttcttggtggattagacaggttaaatatataaacaaacaaacaaaaattgctcaaaaaagaggagaaaagctcaagaggaaaagctaaggactggtaggaaaaagctttactctttcatgccattttatttctttttgatttttaaatcattcattcaatagataccaccgtgtgacctataattttgcaaatctgttacctctgacatcaagtgtaattagcttttggagagtgggctgacatcaagtgtaattagcttttggagagtgggttttgtccattattaataattaattaattaacatcaaacacggcttctcatgctatttctacctcactttggttttggggtgttcctgataattgtgcacacctgagttcacagcttcaccacttgtccattgcgttattttctttttcctttataattctttctttttccttcataattttcaaaagaaaacccaaagctctaaggtaacaaattaccaaattacatgaagatttggtttttgtcttgcatttttttcctttatgtgacgctggaccttttctttacccaaggatttttaaaactcagatttaaaacaaggggttactttacatcctactaagaagtttaagtaagtaagtttcattctaaaatcagaggtaaatagagtgcataaataattttgttttaatctttttgtttttcttttagacacattagctctggagtgagtctgtcataatatttgaacaaaaattgagagctttattgctgcattttaagcataattaatttggacattatttcgtgttgtgttctttataaccaccaagtattaaactgtaaatcataatgtaactgaagcataaacatcacatggcatgttttgtcattgttttcaggtactgagttcttacttgagtatcataatatattgtgttttaacaccaacactgtaacatttacgaattatttttttaaacttcagttttactgcattttcacaacatatcagacttcaccaaatatatgccttactattgtattatagtactgctttactgtgtatctcaataaagcacgcagttatgttac

SEQ ID NO: 5740 - DNA, 7339 bp, Homo sapiens
  source 1..7339: mol_type = unassigned DNA
acactagcaatggcaaagctttgtgcggaggcattgctggctgctctgaactaaaagcatccgtggggaccgaaagaggtttttgcacaccttattaaggaactccaggatggcattgggcagcggcaaactgttgtcagaacattgaatgcaactggggaagaaataattcagcaatcctcaaaaacagatgccagtattctacaggaaaaattgggaagcctgaatctgcggtggcaggaggtctgcaaacagctgtcagacagaaaaaagaggctagaagaacaaaagaatatcttgtcagaatttcaaagagatttaaatgaatttgttttatggttggaggaagcagataacattgctagtatcccacttgaacctggaaaagagcagcaactaaaagaaaagcttgagcaagtcaagttactggtggaagagttgcccctgcgccagggaattctcaaacaattaaatgaaactggaggacccgtgcttgtaagtgctcccataagcccagaagagcaagataaacttgaaaataagctcaagcagacaaatctccagtggataaaggtttccagagctttacctgagaaacaaggagaaattgaagctcaaataaaagaccttgggcagcttgaaaaaaagcttgaagaccttgaagagcagttaaatcatctgctgctgtggttatctcctattaggaatcagttggaaatttataaccaaccaaaccaagaaggaccatttgacgttaaggaaactgaaatagcagttcaagctaaacaaccggatgtggaagagattttgtctaaagggcagcatttgtacaaggaaaaaccagccactcagccagtgaagaggaagttagaagatctgagctctgagtggaaggcggtaaaccgtttacttcaagagctgagggcaaagcagcctgacctagctcctggactgaccactattggagcctctcctactcagactgttactctggtgacacaacctgtggttactaaggaaactgccatctccaaactagaaatgccatcttccttgatgttggaggtacctgctctggcagatttcaaccgggcttggacagaacttaccgactggctttctctgcttgatcaagttataaaatcacagagggtgatggtgggtgaccttgaggatatcaacgagatgatcatcaagcagaaggcaacaatgcaggatttggaacagaggcgtccccagttggaagaactcattaccgctgcccaaaatttgaaaaacaagaccagcaatcaagaggctagaacaatcattacggatcgaattgaaagaattcagaatcagtgggatgaagtacaagaacaccttcagaaccggaggcaacagttgaatgaaatgttaaaggattcaacacaatggctggaagctaaggaagaagctgagcaggtcttaggacaggccagagccaagcttgagtcatggaaggagggtccctatacagtagatgcaatccaaaagaaaatcacagaaaccaagcagttggccaaagacctccgccagtggcagacaaatgtagatgtggcaaatgacttggccctgaaacttctccgggattattctgcagatgataccagaaaagtccacatgataacagagaatatcaatgcctcttggagaagcattcataaaagggtgagtgagcgagaggctgctttggaagaaactcatagattactgcaacagttccccctggacctggaaaagtttcttgcctggcttacagaagctgaaacaactgccaatgtcctacaggatgctacccgtaaggaaaggctcctagaagactccaagggagtaaaagagctgatgaaacaatggcaagacctccaaggtgaaattgaagctcacacagatgtttatcacaacctggatgaaaacagccaaaaaatcctgagatccctggaaggttccgatgatgcagtcctgttacaaagacgtttggataacatgaacttcaagtggagtgaacttcggaaaaagtctctcaacattaggtcccatttggaagccagttctgaccagtggaagcgtctgcacctttctctgcaggaacttctggtgtggctacagctgaaagatgatgaattaagccggcaggcacctattggaggcgactttccagcagttcagaagcagaacgatgtacatagggccttcaagagggaattgaaaactaaagaacctgtaatcatgagtactcttgagactgtacgaatatttctgacagagcagcctttggaaggactagagaaactctaccaggagcccagagagctgcctcctgaggagagagcccagaatgtcactcggcttctacgaaagcaggctgaggaggtcaatactgagtgggaaaaattgaacctgcactccgctgactggcagagaaaaatagatgagacccttgaaagactccgggaacttcaagaggccacggatgagctggacctcaagctgcgccaagctgaggtgatcaagggatcctggcagcccgtgggcgatctcctcattgactctctccaagatcacctcgagaaagtcaaggcacttcgaggagaaattgcgcctctgaaagagaacgtgagccacgtcaatgaccttgctcgccagcttaccactttgggcattcagctctcaccgtataacctcagcactctggaagacctgaacaccagatggaagcttctgcaggtggccgtcgaggaccgagtcaggcagctgcatgaagcccacagggactttggtccagcatctcagcactttctttccacgtctgtccagggtccctgggagagagccatctcgccaaacaaagtgccctactatatcaaccacgagactcaaacaacttgctgggaccatcccaaaatgacagagctctaccagtctttagctgacctgaataatgtcagattctcagcttataggactgccatgaaactccgaagactgcagaaggccctttgcttggatctcttgagcctgtcagctgcatgtgatgccttggaccagcacaacctcaagcaaaatgaccagcccatggatatcctgcagattattaattgtttgaccactatttatgaccgcctggagcaagagcacaacaatttggtcaacgtccctctctgcgtggatatgtgtctgaactggctgctgaatgtttatgatacgggacgaacagggaggatccgtgtcctgtcttttaaaactggcatcatttccctgtgtaaagcacatttggaagacaagtacagataccttttcaagcaagtggcaagttcaacaggattttgtgaccagcgcaggctgggcctccttctgcatgattctatccaaattccaagacagttgggtgaagttgcatcctttgggggcagtaacattgagccaagtgtccggagctgcttccaatttgctaataataagccagagatcgaagcggccctcttcctagactggatgagactggaaccccagtccatggtgtggctgcccgtcctgcacagagtggctgctgcagaaactgccaagcatcaggccaaatgtaacatctgcaaagagtgtccaatcattggattcaggtacaggagtctaaagcactttaattatgacatctgccaaagctgctttttttctggtcgagttgcaaaaggccataaaatgcactatcccatggtggaatattgcactccgactacatcaggagaagatgttcgagactttgccaaggtactaaaaaacaaatttcgaaccaaaaggtattttgcgaagcatccccgaatgggctacctgccagtgcagactgtcttagagggggacaacatggaaacgcctgcctcgtcccctcagctttcacacgatgatactcattcacgcattgaacattatgctagcaggctagcagaaatggaaaacagcaatggatcttatctaaatgatagcatctctcctaatgagagcatagatgatgaacatttgttaatccagcattactgccaaagtttgaaccaggactcccccctgagccagcctcgtagtcctgcccagatcttgatttccttagagagtgaggaaagaggggagctagagagaatcctagcagatcttgaggaagaaaacaggaatctgcaagcagaatatgaccgtctaaagcagcagcacgaacataaaggcctgtccccactgccgtcccctcctgaaatgatgcccacctctccccagagtccccgggatgctgagctcattgctgaggccaagctactgcgtcaacacaaaggccgcctggaagccaggatgcaaatcctggaagaccacaataaacagctggagtcacagttacacaggctaaggcagctgctggagcaaccccaggcagaggccaaagtgaatggcacaacggtgtcctctccttctacctctctacagaggtccgacagcagtcagcctatgctgctccgagtggttggcagtcaaacttcggactccatgggtgaggaagatcttctcagtcctccccaggacacaagcacagggttagaggaggtgatggagcaactcaacaactccttccctagttcaagaggacacaatgtaggaagtcttttccacatggcagatgatttgggcagagcgatggagtccttagtatcagtcatgacagatgaagaaggagcagaataaatgttttacaactcctgattcccgcatggtttttataatattcatacaacaaagaggattagacagtaagagtttacaagaaataaatctatatttttgtgaagggtagtggtattatactgtagatttcagtagtttctaagtctgttattgttttgttaacaatggcaggttttacacgtctatgcaattgtacaaaaaagttataagaaaactacatgtaaaatcttgatagctaaataacttgccatttctttatatggaacgcattttgggttgtttaaaaatttataacagttataaagaaagattgtaaactaaagtgtgctttataaaaaaaagttgtttataaaaacccctaaaaacaaaacaaacacacacacacacacatacacacacacacacaaaactttgaggcagcgcattgttttgcatccttttggcgtgatatccatatgaaattcatggctttttctttttttgcatattaaagataagacttcctctaccaccacaccaaatgactactacacactgctcatttgagaactgtcagctgagtggggcaggcttgagttttcatttcatatatctatatgtctataagtatataaatactatagttatatagataaagagatacgaatttctatagactgactttttccattttttaaatgttcatgtcacatcctaatagaaagaaattacttctagtcagtcatccaggcttacctgcttggtctagaatggatttttcccggagccggaagccaggaggaaactacaccacactaaaacattgtctacagctccagatgtttctcattttaaacaactttccactgacaacgaaagtaaagtaaagtattggatttttttaaagggaacatgtgaatgaatacacaggacttattatatcagagtgagtaatcggttggttggttgattgattgattgattgatacattcagcttcctgctgctagcaatgccacgatttagatttaatgatgcttcagtggaaatcaatcagaaggtattctgaccttgtgaacatcagaaggtattttttaactcccaagcagtagcaggacgatgatagggctggagggctatggattcccagcccatccctgtgaaggagtaggccactctttaagtgaaggattggatgattgttcataatacataaagttctctgtaattacaactaaattattatgccctcttctcacagtcaaaaggaactgggtggtttggtttttgttgcttttttagatttattgtcccatgtgggatgagtttttaaatgccacaagacataatttaaaataaataaactttgggaaaaggtgtaaaacagtagccccatcacatttgtgatactgacaggtatcaacccagaagcccatgaactgtgtttccatcctttgcatttctctgcgagtagttccacacaggtttgtaagtaagtaagaaagaaggcaaattgattcaaatgttacaaaaaaacccttcttggtggattagacaggttaaatatataaacaaacaaacaaaaattgctcaaaaaagaggagaaaagctcaagaggaaaagctaaggactggtaggaaaaagctttactctttcatgccattttatttctttttgatttttaaatcattcattcaatagataccaccgtgtgacctataattttgcaaatctgttacctctgacatcaagtgtaattagcttttggagagtgggctgacatcaagtgtaattagcttttggagagtgggttttgtccattattaataattaattaattaacatcaaacacggcttctcatgctatttctacctcactttggttttggggtgttcctgataattgtgcacacctgagttcacagcttcaccacttgtccattgcgttattttctttttcctttataattctttctttttccttcataattttcaaaagaaaacccaaagctctaaggtaacaaattaccaaattacatgaagatttggtttttgtcttgcatttttttcctttatgtgacgctggaccttttctttacccaaggatttttaaaactcagatttaaaacaaggggttactttacatcctactaagaagtttaagtaagtaagtttcattctaaaatcagaggtaaatagagtgcataaataattttgttttaatctttttgtttttcttttagacacattagctctggagtgagtctgtcataatatttgaacaaaaattgagagctttattgctgcattttaagcataattaatttggacattatttcgtgttgtgttctttataaccaccaagtattaaactgtaaatcataatgtaactgaagcataaacatcacatggcatgttttgtcattgttttcaggtactgagttcttacttgagtatcataatatattgtgttttaacaccaacactgtaacatttacgaattatttttttaaacttcagttttactgcattttcacaacatatcagacttcaccaaatatatgccttactattgtattatagtactgctttactgtgtatctcaataaagcacgcagttatgttac

SEQ ID NO: 5741 - DNA, 13734 bp, Homo sapiens
  source 1..13734: mol_type = unassigned DNA
atgtctgaggtctcatctgatgaaagagaagatgttcaaaagaaaacattcacaaaatgggtaaatgcacaattttctaagtttgggaagcagcatattgagaacctcttcagtgacctacaggatgggaggcgcctcctagacctcctcgaaggcctgacagggcaaaaactgccaaaagaaaaaggatccacaagagttcatgccctgaacaatgtcaacaaggcactgcgggttttgcagaacaataatgttgatttagtgaatattggaagtactgacatcgtagatggaaatcataaactgactcttggtttgatttggaatataatcctccactggcaggtcaaaaatgtaatgaaaaatatcatggctggattgcaacaaaccaacagtgaaaagattctcctgagctgggtccgacaatcaactcgtaattatccacaggttaatgtaatcaacttcaccaccagctggtctgatggcctggctttgaatgctctcatccatagtcataggccagacctatttgactggaatagtgtggtttgccagcagtcagccacacaacgactggaacatgcattcaacatcgccagatatcaattaggcatagagaaactactcgatcctgaagatgttgataccacctatccagataagaagtccatcttaatgtacatcacatcactcttccaagttttgcctcaacaagtgagcattgaagccatccaggaagtggaaatgttgccaaggccacctaaagtgactaaagaagaacattttcagttacatcatcaaatgcactattctcaacagatcacggtcagtctagcacagggatatgagagaacttcttcccctaagcctcgattcaagagctatgcctacacacaggctgcttatgtcaccacctctgaccctacacggagcccatttccttcacagcatttggaagctcctgaagacaagtcatttggcagttcattgatggagagtgaagtaaacctggaccgttatcaaacagctttagaagaagtattatcgtggcttctttctgctgaggacacattgcaagcacaaggagagatttctaatgatgtggaagtggtgaaagaccagtttcatactcatgaggggtacatgatggatttgacagcccatcagggccgggttggtaatattctacaattgggaagtaagctgattggaacaggaaaattatcagaagatgaagaaactgaagtacaagagcagatgaatctcctaaattcaagatgggaatgcctcagggtagctagcatggaaaaacaaagcaatttacatagagttttaatggatctccagaatcagaaactgaaagagttgaatgactggctaacaaaaacagaagaaagaacaaggaaaatggaggaagagcctcttggacctgatcttgaagacctaaaacgccaagtacaacaacataaggtgcttcaagaagatctagaacaagaacaagtcagggtcaattctctcactcacatggtggtggtagttgatgaatctagtggagatcacgcaactgctgctttggaagaacaacttaaggtattgggagatcgatgggcaaacatctgtagatggacagaagaccgctgggttcttttacaagacatccttctcaaatggcaacgtcttactgaagaacagtgcctttttagtgcatggctttcagaaaaagaagatgcagtgaacaagattcacacaactggctttaaagatcaaaatgaaatgttatcaagtcttcaaaaactggccgttttaaaagcggatctagaaaagaaaaagcaatccatgggcaaactgtattcactcaaacaagatcttctttcaacactgaagaataagtcagtgacccagaagacggaagcatggctggataactttgcccggtgttgggataatttagtccaaaaacttgaaaagagtacagcacagatttcacaggctgtcaccaccactcagccatcactaacacagacaactgtaatggaaacagtaactacggtgaccacaagggaacagatcctggtaaagcatgctcaagaggaacttccaccaccacctccccaaaagaagaggcagattactgtggattctgaaattaggaaaaggttggatgttgatataactgaacttcacagctggattactcgctcagaagctgtgttgcagagtcctgaatttgcaatctttcggaaggaaggcaacttctcagacttaaaagaaaaagtcaatgccatagagcgagaaaaagctgagaagttcagaaaactgcaagatgccagcagatcagctcaggccctggtggaacagatggtgaatgagggtgttaatgcagatagcatcaaacaagcctcagaacaactgaacagccggtggatcgaattctgccagttgctaagtgagagacttaactggctggagtatcagaacaacatcatcgctttctataatcagctacaacaattggagcagatgacaactactgctgaaaactggttgaaaatccaacccaccaccccatcagagccaacagcaattaaaagtcagttaaaaatttgtaaggatgaagtcaaccggctatcagatcttcaacctcaaattgaacgattaaaaattcaaagcatagccctgaaagagaaaggacaaggacccatgttcctggatgcagactttgtggcctttacaaatcattttaagcaagtcttttctgatgtgcaggccagagagaaagagctacagacaatttttgacactttgccaccaatgcgctatcaggagaccatgagtgccatcaggacatgggtccagcagtcagaaaccaaactctccatacctcaacttagtgtcaccgactatgaaatcatggagcagagactcggggaattgcaggctttacaaagttctctgcaagagcaacaaagtggcctatactatctcagcaccactgtgaaagagatgtcgaagaaagcgccctctgaaattagccggaaatatcaatcagaatttgaagaaattgagggacgctggaagaagctctcctcccagctggttgagcattgtcaaaagctagaggagcaaatgaataaactccgaaaaattcagaatcacatacaaaccctgaagaaatggatggctgaagttgatgtttttctgaaggaggaatggcctgcccttggggattcagaaattctaaaaaagcagctgaaacagtgcagacttttagtcagtgatattcagacaattcagcccagtctaaacagtgtcaatgaaggtgggcagaagataaagaatgaagcagagccagagtttgcttcgagacttgagacagaactcaaagaacttaacactcagtgggatcacatgtgccaacaggtctatgccagaaaggaggccttgaagggaggtttggagaaaactgtaagcctccagaaagatctatcagagatgcacgaatggatgacacaagctgaagaagagtatcttgagagagattttgaatataaaactccagatgaattacagaaagcagttgaagagatgaagagagctaaagaagaggcccaacaaaaagaagcgaaagtgaaactccttactgagtctgtaaatagtgtcatagctcaagctccacctgtagcacaagaggccttaaaaaaggaacttgaaactctaaccaccaactaccagtggctctgcactaggctgaatgggaaatgcaagactttggaagaagtttgggcatgttggcatgagttattgtcatacttggagaaagcaaacaagtggctaaatgaagtagaatttaaacttaaaaccactgaaaacattcctggcggagctgaggaaatctctgaggtgctagattcacttgaaaatttgatgcgacattcagaggataacccaaatcagattcgcatattggcacagaccctaacagatggcggagtcatggatgagctaatcaatgaggaacttgagacatttaattctcgttggagggaactacatgaagaggctgtaaggaggcaaaagttgcttgaacagagcatccagtctgcccaggagactgaaaaatccttacacttaatccaggagtccctcacattcattgacaagcagttggcagcttatattgcagacaaggtggacgcagctcaaatgcctcaggaagcccagaaaatccaatctgatttgacaagtcatgagatcagtttagaagaaatgaagaaacataatcaggggaaggaggctgcccaaagagtcctgtctcagattgatgttgcacagaaaaaattacaagatgtctccatgaagtttcgattattccagaaaccagccaattttgagcagcgtctacaagaaagtaagatgattttagatgaagtgaagatgcacttgcctgcattggaaacaaagagtgtggaacaggaagtagtacagtcacagctaaatcattgtgtgaacttgtataaaagtctgagtgaagtgaagtctgaagtggaaatggtgataaagactggacgtcagattgtacagaaaaagcagacggaaaatcccaaagaacttgatgaaagagtaacagctttgaaattgcattataatgagctgggagcaaaggtaacagaaagaaagcaacagttggagaaatgcttgaaattgtcccgtaagatgcgaaaggaaatgaatgtcttgacagaatggctggcagctacagatatggaattgacaaagagatcagcagttgaaggaatgcctagtaatttggattctgaagttgcctggggaaaggctactcaaaaagagattgagaaacagaaggtgcacctgaagagtatcacagaggtaggagaggccttgaaaacagttttgggcaagaaggagacgttggtggaagataaactcagtcttctgaatagtaactggatagctgtcacctcccgagcagaagagtggttaaatcttttgttggaataccagaaacacatggaaacttttgaccagaatgtggaccacatcacaaagtggatcattcaggctgacacacttttggatgaatcagagaaaaagaaaccccagcaaaaagaagacgtgcttaagcgtttaaaggcagaactgaatgacatacgcccaaaggtggactctacacgtgaccaagcagcaaacttgatggcaaaccgcggtgaccactgcaggaaattagtagagccccaaatctcagagctcaaccatcgatttgcagccatttcacacagaattaagactggaaaggcctccattcctttgaaggaattggagcagtttaactcagatatacaaaaattgcttgaaccactggaggctgaaattcagcagggggtgaatctgaaagaggaagacttcaataaagatatgaatgaagacaatgagggtactgtaaaagaattgttgcaaagaggagacaacttacaacaaagaatcacagatgagagaaagcgagaggaaataaagataaaacagcagctgttacagacaaaacataatgctctcaaggatttgaggtctcaaagaagaaaaaaggctctagaaatttctcatcagtggtatcagtacaagaggcaggctgatgatctcctgaaatgcttggatgacattgaaaaaaaattagccagcctacctgagcccagagatgaaaggaaaataaaggaaattgatcgggaattgcagaagaagaaagaggagctgaatgcagtgcgtaggcaagctgagggcttgtctgaggatggggccgcaatggcagtggagccaactcagatccagctcagcaagcgctggcgggaaattgagagcaaatttgctcagtttcgaagactcaactttgcacaaattcacactgtccgtgaagaaacgatgatggtgatgactgaagacatgcctttggaaatttcttatgtgccttctacttatttgactgaaatcactcatgtctcacaagccctattagaagtggaacaacttctcaatgctcctgacctctgtgctaaggactttgaagatctctttaagcaagaggagtctctgaagaatataaaagatagtctacaacaaagctcaggtcggattgacattattcatagcaagaagacagcagcattgcaaagtgcaacgcctgtggaaagggtgaagctacaggaagctctctcccagcttgatttccaatgggaaaaagttaacaaaatgtacaaggaccgacaagggcgatttgacagatctgttgagaaatggcggcgttttcattatgatataaagatatttaatcagtggctaacagaagctgaacagtttctcagaaagacacaaattcctgagaattgggaacatgctaaatacaaatggtatcttaaggtaagtctttttgttttttcgaaacataccttttgcctccagaggcaaaagacgggtgaggaaataattcagcaatcctcaaaaacagatgccagtattctacaggaaaaattgggaagcctgaatctgcggtggcaggaggtctgcaaacagctgtcagacagaaaaaagaggctagaagaacaaaagaatatcttgtcagaatttcaaagagatttaaatgaatttgttttatggttggaggaagcagataacattgctagtatcccacttgaacctggaaaagagcagcaactaaaagaaaagcttgagcaagtcaagttactggtggaagagttgcccctgcgccagggaattctcaaacaattaaatgaaactggaggacccgtgcttgtaagtgctcccataagcccagaagagcaagataaacttgaaaataagctcaagcagacaaatctccagtggataaaggtttccagagctttacctgagaaacaaggagaaattgaagctcaaataaaagaccttgggcagcttgaaaaaaagcttgaagaccttgaagagcagttaaatcatctgctgctgtggttatctcctattaggaatcagttggaaatttataaccaaccaaaccaagaaggaccatttgacgttaaggaaactgaaatagcagttcaagctaaacaaccggatgtggaagagattttgtctaaagggcagcatttgtacaaggaaaaaccagccactcagccagtgaagaggaagttagaagatctgagctctgagtggaaggcggtaaaccgtttacttcaagagctgagggcaaagcagcctgacctagctcctggactgaccactattggagcctctcctactcagactgttactctggtgacacaacctgtggttactaaggaaactgccatctccaaactagaaatgccatcttccttgatgttggaggtacctgctctggcagatttcaaccgggcttggacagaacttaccgactggctttctctgcttgatcaagttataaaatcacagagggtgatggtgggtgaccttgaggatatcaacgagatgatcatcaagcagaaggcaacaatgcaggatttggaacagaggcgtccccagttggaagaactcattaccgctgcccaaaatttgaaaaacaagaccagcaatcaagaggctagaacaatcattacggatcgaattgaaagaattcagaatcagtgggatgaagtacaagaacaccttcagaaccggaggcaacagttgaatgaaatgttaaaggattcaacacaatggctggaagctaaggaagaagctgagcaggtcttaggacaggccagagccaagcttgagtcatggaaggagggtccctatacagtagatgcaatccaaaagaaaatcacagaaaccaagcagttggccaaagacctccgccagtggcagacaaatgtagatgtggcaaatgacttggccctgaaacttctccgggattattctgcagatgataccagaaaagtccacatgataacagagaatatcaatgcctcttggagaagcattcataaaagggtgagtgagcgagaggctgctttggaagaaactcatagattactgcaacagttccccctggacctggaaaagtttcttgcctggcttacagaagctgaaacaactgccaatgtcctacaggatgctacccgtaaggaaaggctcctagaagactccaagggagtaaaagagctgatgaaacaatggcaagacctccaaggtgaaattgaagctcacacagatgtttatcacaacctggatgaaaacagccaaaaaatcctgagatccctggaaggttccgatgatgcagtcctgttacaaagacgtttggataacatgaacttcaagtggagtgaacttcggaaaaagtctctcaacattaggtcccatttggaagccagttctgaccagtggaagcgtctgcacctttctctgcaggaacttctggtgtggctacagctgaaagatgatgaattaagccggcaggcacctattggaggcgactttccagcagttcagaagcagaacgatgtacatagggccttcaagagggaattgaaaactaaagaacctgtaatcatgagtactcttgagactgtacgaatatttctgacagagcagcctttggaaggactagagaaactctaccaggagcccagagagctgcctcctgaggagagagcccagaatgtcactcggcttctacgaaagcaggctgaggaggtcaatactgagtgggaaaaattgaacctgcactccgctgactggcagagaaaaatagatgagacccttgaaagactccgggaacttcaagaggccacggatgagctggacctcaagctgcgccaagctgaggtgatcaagggatcctggcagcccgtgggcgatctcctcattgactctctccaagatcacctcgagaaagtcaaggcacttcgaggagaaattgcgcctctgaaagagaacgtgagccacgtcaatgaccttgctcgccagcttaccactttgggcattcagctctcaccgtataacctcagcactctggaagacctgaacaccagatggaagcttctgcaggtggccgtcgaggaccgagtcaggcagctgcatgaagcccacagggactttggtccagcatctcagcactttctttccacgtctgtccagggtccctgggagagagccatctcgccaaacaaagtgccctactatatcaaccacgagactcaaacaacttgctgggaccatcccaaaatgacagagctctaccagtctttagctgacctgaataatgtcagattctcagcttataggactgccatgaaactccgaagactgcagaaggccctttgcttggatctcttgagcctgtcagctgcatgtgatgccttggaccagcacaacctcaagcaaaatgaccagcccatggatatcctgcagattattaattgtttgaccactatttatgaccgcctggagcaagagcacaacaatttggtcaacgtccctctctgcgtggatatgtgtctgaactggctgctgaatgtttatgatacgggacgaacagggaggatccgtgtcctgtcttttaaaactggcatcatttccctgtgtaaagcacatttggaagacaagtacagataccttttcaagcaagtggcaagttcaacaggattttgtgaccagcgcaggctgggcctccttctgcatgattctatccaaattccaagacagttgggtgaagttgcatcctttgggggcagtaacattgagccaagtgtccggagctgcttccaatttgctaataataagccagagatcgaagcggccctcttcctagactggatgagactggaaccccagtccatggtgtggctgcccgtcctgcacagagtggctgctgcagaaactgccaagcatcaggccaaatgtaacatctgcaaagagtgtccaatcattggattcaggtacaggagtctaaagcactttaattatgacatctgccaaagctgctttttttctggtcgagttgcaaaaggccataaaatgcactatcccatggtggaatattgcactccgactacatcaggagaagatgttcgagactttgccaaggtactaaaaaacaaatttcgaaccaaaaggtattttgcgaagcatccccgaatgggctacctgccagtgcagactgtcttagagggggacaacatggaaactcccgttactctgatcaacttctggccagtagattctgcgcctgcctcgtcccctcagctttcacacgatgatactcattcacgcattgaacattatgctagcaggctagcagaaatggaaaacagcaatggatcttatctaaatgatagcatctctcctaatgagagcatagatgatgaacatttgttaatccagcattactgccaaagtttgaaccaggactcccccctgagccagcctcgtagtcctgcccagatcttgatttccttagagagtgaggaaagaggggagctagagagaatcctagcagatcttgaggaagaaaacaggaatctgcaagcagaatatgaccgtctaaagcagcagcacgaacataaaggcctgtccccactgccgtcccctcctgaaatgatgcccacctctccccagagtccccgggatgctgagctcattgctgaggccaagctactgcgtcaacacaaaggccgcctggaagccaggatgcaaatcctggaagaccacaataaacagctggagtcacagttacacaggctaaggcagctgctggagcaaccccaggcagaggccaaagtgaatggcacaacggtgtcctctccttctacctctctacagaggtccgacagcagtcagcctatgctgctccgagtggttggcagtcaaacttcggactccatgggtgaggaagatcttctcagtcctccccaggacacaagcacagggttagaggaggtgatggagcaactcaacaactccttccctagttcaagaggaagaaatacccctggaaagccaatgagagaggacacaatgtaggaagtcttttccacatggcagatgatttgggcagagcgatggagtccttagtatcagtcatgacagatgaagaaggagcagaataaatgttttacaactcctgattcccgcatggtttttataatattcatacaacaaagaggattagacagtaagagtttacaagaaataaatctatatttttgtgaagggtagtggtattatactgtagatttcagtagtttctaagtctgttattgttttgttaacaatggcaggttttacacgtctatgcaattgtacaaaaaagttataagaaaactacatgtaaaatcttgatagctaaataacttgccatttctttatatggaacgcattttgggttgtttaaaaatttataacagttataaagaaagattgtaaactaaagtgtgctttataaaaaaaagttgtttataaaaacccctaaaaacaaaacaaacacacacacacacacatacacacacacacacaaaactttgaggcagcgcattgttttgcatccttttggcgtgatatccatatgaaattcatggctttttctttttttgcatattaaagataagacttcctctaccaccacaccaaatgactactacacactgctcatttgagaactgtcagctgagtggggcaggcttgagttttcatttcatatatctatatgtctataagtatataaatactatagttatatagataaagagatacgaatttctatagactgactttttccattttttaaatgttcatgtcacatcctaatagaaagaaattacttctagtcagtcatccaggcttacctgcttggtctagaatggatttttcccggagccggaagccaggaggaaactacaccacactaaaacattgtctacagctccagatgtttctcattttaaacaactttccactgacaacgaaagtaaagtaaagtattggatttttttaaagggaacatgtgaatgaatacacaggacttattatatcagagtgagtaatcggttggttggttgattgattgattgattgatacattcagcttcctgctgctagcaatgccacgatttagatttaatgatgcttcagtggaaatcaatcagaaggtattctgaccttgtgaacatcagaaggtattttttaactcccaagcagtagcaggacgatgatagggctggagggctatggattcccagcccatccctgtgaaggagtaggccactctttaagtgaaggattggatgattgttcataatacataaagttctctgtaattacaactaaattattatgccctcttctcacagtcaaaaggaactgggtggtttggtttttgttgcttttttagatttattgtcccatgtgggatgagtttttaaatgccacaagacataatttaaaataaataaactttgggaaaaggtgtaaaacagtagccccatcacatttgtgatactgacaggtatcaacccagaagcccatgaactgtgtttccatcctttgcatttctctgcgagtagttccacacaggtttgtaagtaagtaagaaagaaggcaaattgattcaaatgttacaaaaaaacccttcttggtggattagacaggttaaatatataaacaaacaaacaaaaattgctcaaaaaagaggagaaaagctcaagaggaaaagctaaggactggtaggaaaaagctttactctttcatgccattttatttctttttgatttttaaatcattcattcaatagataccaccgtgtgacctataattttgcaaatctgttacctctgacatcaagtgtaattagcttttggagagtgggctgacatcaagtgtaattagcttttggagagtgggttttgtccattattaataattaattaattaacatcaaacacggcttctcatgctatttctacctcactttggttttggggtgttcctgataattgtgcacacctgagttcacagcttcaccacttgtccattgcgttattttctttttcctttataattctttctttttccttcataattttcaaaagaaaacccaaagctctaaggtaacaaattaccaaattacatgaagatttggtttttgtcttgcatttttttcctttatgtgacgctggaccttttctttacccaaggatttttaaaactcagatttaaaacaaggggttactttacatcctactaagaagtttaagtaagtaagtttcattctaaaatcagaggtaaatagagtgcataaataattttgttttaatctttttgtttttcttttagacacattagctctggagtgagtctgtcataatatttgaacaaaaattgagagctttattgctgcattttaagcataattaatttggacattatttcgtgttgtgttctttataaccaccaagtattaaactgtaaatcataatgtaactgaagcataaacatcacatggcatgttttgtcattgttttcaggtactgagttcttacttgagtatcataatatattgtgttttaacaccaacactgtaacatttacgaattatttttttaaacttcagttttactgcattttcacaacatatcagacttcaccaaatatatgccttactattgtattatagtactgctttactgtgtatctcaataaagcacgcagttatgttac

SEQ ID NO: 5742 - DNA, 13746 bp, Homo sapiens
  source 1..13746: mol_type = unassigned DNA
atgctttggtgggaagaagtagaggactgttatgaaagagaagatgttcaaaagaaaacattcacaaaatgggtaaatgcacaattttctaagtttgggaagcagcatattgagaacctcttcagtgacctacaggatgggaggcgcctcctagacctcctcgaaggcctgacagggcaaaaactgccaaaagaaaaaggatccacaagagttcatgccctgaacaatgtcaacaaggcactgcgggttttgcagaacaataatgttgatttagtgaatattggaagtactgacatcgtagatggaaatcataaactgactcttggtttgatttggaatataatcctccactggcaggtcaaaaatgtaatgaaaaatatcatggctggattgcaacaaaccaacagtgaaaagattctcctgagctgggtccgacaatcaactcgtaattatccacaggttaatgtaatcaacttcaccaccagctggtctgatggcctggctttgaatgctctcatccatagtcataggccagacctatttgactggaatagtgtggtttgccagcagtcagccacacaacgactggaacatgcattcaacatcgccagatatcaattaggcatagagaaactactcgatcctgaagatgttgataccacctatccagataagaagtccatcttaatgtacatcacatcactcttccaagttttgcctcaacaagtgagcattgaagccatccaggaagtggaaatgttgccaaggccacctaaagtgactaaagaagaacattttcagttacatcatcaaatgcactattctcaacagatcacggtcagtctagcacagggatatgagagaacttcttcccctaagcctcgattcaagagctatgcctacacacaggctgcttatgtcaccacctctgaccctacacggagcccatttccttcacagcatttggaagctcctgaagacaagtcatttggcagttcattgatggagagtgaagtaaacctggaccgttatcaaacagctttagaagaagtattatcgtggcttctttctgctgaggacacattgcaagcacaaggagagatttctaatgatgtggaagtggtgaaagaccagtttcatactcatgaggggtacatgatggatttgacagcccatcagggccgggttggtaatattctacaattgggaagtaagctgattggaacaggaaaattatcagaagatgaagaaactgaagtacaagagcagatgaatctcctaaattcaagatgggaatgcctcagggtagctagcatggaaaaacaaagcaatttacatagagttttaatggatctccagaatcagaaactgaaagagttgaatgactggctaacaaaaacagaagaaagaacaaggaaaatggaggaagagcctcttggacctgatcttgaagacctaaaacgccaagtacaacaacataaggtgcttcaagaagatctagaacaagaacaagtcagggtcaattctctcactcacatggtggtggtagttgatgaatctagtggagatcacgcaactgctgctttggaagaacaacttaaggtattgggagatcgatgggcaaacatctgtagatggacagaagaccgctgggttcttttacaagacatccttctcaaatggcaacgtcttactgaagaacagtgcctttttagtgcatggctttcagaaaaagaagatgcagtgaacaagattcacacaactggctttaaagatcaaaatgaaatgttatcaagtcttcaaaaactggccgttttaaaagcggatctagaaaagaaaaagcaatccatgggcaaactgtattcactcaaacaagatcttctttcaacactgaagaataagtcagtgacccagaagacggaagcatggctggataactttgcccggtgttgggataatttagtccaaaaacttgaaaagagtacagcacagatttcacaggctgtcaccaccactcagccatcactaacacagacaactgtaatggaaacagtaactacggtgaccacaagggaacagatcctggtaaagcatgctcaagaggaacttccaccaccacctccccaaaagaagaggcagattactgtggattctgaaattaggaaaaggttggatgttgatataactgaacttcacagctggattactcgctcagaagctgtgttgcagagtcctgaatttgcaatctttcggaaggaaggcaacttctcagacttaaaagaaaaagtcaatgccatagagcgagaaaaagctgagaagttcagaaaactgcaagatgccagcagatcagctcaggccctggtggaacagatggtgaatgagggtgttaatgcagatagcatcaaacaagcctcagaacaactgaacagccggtggatcgaattctgccagttgctaagtgagagacttaactggctggagtatcagaacaacatcatcgctttctataatcagctacaacaattggagcagatgacaactactgctgaaaactggttgaaaatccaacccaccaccccatcagagccaacagcaattaaaagtcagttaaaaatttgtaaggatgaagtcaaccggctatcagatcttcaacctcaaattgaacgattaaaaattcaaagcatagccctgaaagagaaaggacaaggacccatgttcctggatgcagactttgtggcctttacaaatcattttaagcaagtcttttctgatgtgcaggccagagagaaagagctacagacaatttttgacactttgccaccaatgcgctatcaggagaccatgagtgccatcaggacatgggtccagcagtcagaaaccaaactctccatacctcaacttagtgtcaccgactatgaaatcatggagcagagactcggggaattgcaggctttacaaagttctctgcaagagcaacaaagtggcctatactatctcagcaccactgtgaaagagatgtcgaagaaagcgccctctgaaattagccggaaatatcaatcagaatttgaagaaattgagggacgctggaagaagctctcctcccagctggttgagcattgtcaaaagctagaggagcaaatgaataaactccgaaaaattcagaatcacatacaaaccctgaagaaatggatggctgaagttgatgtttttctgaaggaggaatggcctgcccttggggattcagaaattctaaaaaagcagctgaaacagtgcagacttttagtcagtgatattcagacaattcagcccagtctaaacagtgtcaatgaaggtgggcagaagataaagaatgaagcagagccagagtttgcttcgagacttgagacagaactcaaagaacttaacactcagtgggatcacatgtgccaacaggtctatgccagaaaggaggccttgaagggaggtttggagaaaactgtaagcctccagaaagatctatcagagatgcacgaatggatgacacaagctgaagaagagtatcttgagagagattttgaatataaaactccagatgaattacagaaagcagttgaagagatgaagagagctaaagaagaggcccaacaaaaagaagcgaaagtgaaactccttactgagtctgtaaatagtgtcatagctcaagctccacctgtagcacaagaggccttaaaaaaggaacttgaaactctaaccaccaactaccagtggctctgcactaggctgaatgggaaatgcaagactttggaagaagtttgggcatgttggcatgagttattgtcatacttggagaaagcaaacaagtggctaaatgaagtagaatttaaacttaaaaccactgaaaacattcctggcggagctgaggaaatctctgaggtgctagattcacttgaaaatttgatgcgacattcagaggataacccaaatcagattcgcatattggcacagaccctaacagatggcggagtcatggatgagctaatcaatgaggaacttgagacatttaattctcgttggagggaactacatgaagaggctgtaaggaggcaaaagttgcttgaacagagcatccagtctgcccaggagactgaaaaatccttacacttaatccaggagtccctcacattcattgacaagcagttggcagcttatattgcagacaaggtggacgcagctcaaatgcctcaggaagcccagaaaatccaatctgatttgacaagtcatgagatcagtttagaagaaatgaagaaacataatcaggggaaggaggctgcccaaagagtcctgtctcagattgatgttgcacagaaaaaattacaagatgtctccatgaagtttcgattattccagaaaccagccaattttgagcagcgtctacaagaaagtaagatgattttagatgaagtgaagatgcacttgcctgcattggaaacaaagagtgtggaacaggaagtagtacagtcacagctaaatcattgtgtgaacttgtataaaagtctgagtgaagtgaagtctgaagtggaaatggtgataaagactggacgtcagattgtacagaaaaagcagacggaaaatcccaaagaacttgatgaaagagtaacagctttgaaattgcattataatgagctgggagcaaaggtaacagaaagaaagcaacagttggagaaatgcttgaaattgtcccgtaagatgcgaaaggaaatgaatgtcttgacagaatggctggcagctacagatatggaattgacaaagagatcagcagttgaaggaatgcctagtaatttggattctgaagttgcctggggaaaggctactcaaaaagagattgagaaacagaaggtgcacctgaagagtatcacagaggtaggagaggccttgaaaacagttttgggcaagaaggagacgttggtggaagataaactcagtcttctgaatagtaactggatagctgtcacctcccgagcagaagagtggttaaatcttttgttggaataccagaaacacatggaaacttttgaccagaatgtggaccacatcacaaagtggatcattcaggctgacacacttttggatgaatcagagaaaaagaaaccccagcaaaaagaagacgtgcttaagcgtttaaaggcagaactgaatgacatacgcccaaaggtggactctacacgtgaccaagcagcaaacttgatggcaaaccgcggtgaccactgcaggaaattagtagagccccaaatctcagagctcaaccatcgatttgcagccatttcacacagaattaagactggaaaggcctccattcctttgaaggaattggagcagtttaactcagatatacaaaaattgcttgaaccactggaggctgaaattcagcagggggtgaatctgaaagaggaagacttcaataaagatatgaatgaagacaatgagggtactgtaaaagaattgttgcaaagaggagacaacttacaacaaagaatcacagatgagagaaagcgagaggaaataaagataaaacagcagctgttacagacaaaacataatgctctcaaggatttgaggtctcaaagaagaaaaaaggctctagaaatttctcatcagtggtatcagtacaagaggcaggctgatgatctcctgaaatgcttggatgacattgaaaaaaaattagccagcctacctgagcccagagatgaaaggaaaataaaggaaattgatcgggaattgcagaagaagaaagaggagctgaatgcagtgcgtaggcaagctgagggcttgtctgaggatggggccgcaatggcagtggagccaactcagatccagctcagcaagcgctggcgggaaattgagagcaaatttgctcagtttcgaagactcaactttgcacaaattcacactgtccgtgaagaaacgatgatggtgatgactgaagacatgcctttggaaatttcttatgtgccttctacttatttgactgaaatcactcatgtctcacaagccctattagaagtggaacaacttctcaatgctcctgacctctgtgctaaggactttgaagatctctttaagcaagaggagtctctgaagaatataaaagatagtctacaacaaagctcaggtcggattgacattattcatagcaagaagacagcagcattgcaaagtgcaacgcctgtggaaagggtgaagctacaggaagctctctcccagcttgatttccaatgggaaaaagttaacaaaatgtacaaggaccgacaagggcgatttgacagatctgttgagaaatggcggcgttttcattatgatataaagatatttaatcagtggctaacagaagctgaacagtttctcagaaagacacaaattcctgagaattgggaacatgctaaatacaaatggtatcttaaggtaagtctttttgttttttcgaaacataccttttgcctccagaggcaaaagacgggtgaggaaataattcagcaatcctcaaaaacagatgccagtattctacaggaaaaattgggaagcctgaatctgcggtggcaggaggtctgcaaacagctgtcagacagaaaaaagaggctagaagaacaaaagaatatcttgtcagaatttcaaagagatttaaatgaatttgttttatggttggaggaagcagataacattgctagtatcccacttgaacctggaaaagagcagcaactaaaagaaaagcttgagcaagtcaagttactggtggaagagttgcccctgcgccagggaattctcaaacaattaaatgaaactggaggacccgtgcttgtaagtgctcccataagcccagaagagcaagataaacttgaaaataagctcaagcagacaaatctccagtggataaaggtttccagagctttacctgagaaacaaggagaaattgaagctcaaataaaagaccttgggcagcttgaaaaaaagcttgaagaccttgaagagcagttaaatcatctgctgctgtggttatctcctattaggaatcagttggaaatttataaccaaccaaaccaagaaggaccatttgacgttaaggaaactgaaatagcagttcaagctaaacaaccggatgtggaagagattttgtctaaagggcagcatttgtacaaggaaaaaccagccactcagccagtgaagaggaagttagaagatctgagctctgagtggaaggcggtaaaccgtttacttcaagagctgagggcaaagcagcctgacctagctcctggactgaccactattggagcctctcctactcagactgttactctggtgacacaacctgtggttactaaggaaactgccatctccaaactagaaatgccatcttccttgatgttggaggtacctgctctggcagatttcaaccgggcttggacagaacttaccgactggctttctctgcttgatcaagttataaaatcacagagggtgatggtgggtgaccttgaggatatcaacgagatgatcatcaagcagaaggcaacaatgcaggatttggaacagaggcgtccccagttggaagaactcattaccgctgcccaaaatttgaaaaacaagaccagcaatcaagaggctagaacaatcattacggatcgaattgaaagaattcagaatcagtgggatgaagtacaagaacaccttcagaaccggaggcaacagttgaatgaaatgttaaaggattcaacacaatggctggaagctaaggaagaagctgagcaggtcttaggacaggccagagccaagcttgagtcatggaaggagggtccctatacagtagatgcaatccaaaagaaaatcacagaaaccaagcagttggccaaagacctccgccagtggcagacaaatgtagatgtggcaaatgacttggccctgaaacttctccgggattattctgcagatgataccagaaaagtccacatgataacagagaatatcaatgcctcttggagaagcattcataaaagggtgagtgagcgagaggctgctttggaagaaactcatagattactgcaacagttccccctggacctggaaaagtttcttgcctggcttacagaagctgaaacaactgccaatgtcctacaggatgctacccgtaaggaaaggctcctagaagactccaagggagtaaaagagctgatgaaacaatggcaagacctccaaggtgaaattgaagctcacacagatgtttatcacaacctggatgaaaacagccaaaaaatcctgagatccctggaaggttccgatgatgcagtcctgttacaaagacgtttggataacatgaacttcaagtggagtgaacttcggaaaaagtctctcaacattaggtcccatttggaagccagttctgaccagtggaagcgtctgcacctttctctgcaggaacttctggtgtggctacagctgaaagatgatgaattaagccggcaggcacctattggaggcgactttccagcagttcagaagcagaacgatgtacatagggccttcaagagggaattgaaaactaaagaacctgtaatcatgagtactcttgagactgtacgaatatttctgacagagcagcctttggaaggactagagaaactctaccaggagcccagagagctgcctcctgaggagagagcccagaatgtcactcggcttctacgaaagcaggctgaggaggtcaatactgagtgggaaaaattgaacctgcactccgctgactggcagagaaaaatagatgagacccttgaaagactccgggaacttcaagaggccacggatgagctggacctcaagctgcgccaagctgaggtgatcaagggatcctggcagcccgtgggcgatctcctcattgactctctccaagatcacctcgagaaagtcaaggcacttcgaggagaaattgcgcctctgaaagagaacgtgagccacgtcaatgaccttgctcgccagcttaccactttgggcattcagctctcaccgtataacctcagcactctggaagacctgaacaccagatggaagcttctgcaggtggccgtcgaggaccgagtcaggcagctgcatgaagcccacagggactttggtccagcatctcagcactttctttccacgtctgtccagggtccctgggagagagccatctcgccaaacaaagtgccctactatatcaaccacgagactcaaacaacttgctgggaccatcccaaaatgacagagctctaccagtctttagctgacctgaataatgtcagattctcagcttataggactgccatgaaactccgaagactgcagaaggccctttgcttggatctcttgagcctgtcagctgcatgtgatgccttggaccagcacaacctcaagcaaaatgaccagcccatggatatcctgcagattattaattgtttgaccactatttatgaccgcctggagcaagagcacaacaatttggtcaacgtccctctctgcgtggatatgtgtctgaactggctgctgaatgtttatgatacgggacgaacagggaggatccgtgtcctgtcttttaaaactggcatcatttccctgtgtaaagcacatttggaagacaagtacagataccttttcaagcaagtggcaagttcaacaggattttgtgaccagcgcaggctgggcctccttctgcatgattctatccaaattccaagacagttgggtgaagttgcatcctttgggggcagtaacattgagccaagtgtccggagctgcttccaatttgctaataataagccagagatcgaagcggccctcttcctagactggatgagactggaaccccagtccatggtgtggctgcccgtcctgcacagagtggctgctgcagaaactgccaagcatcaggccaaatgtaacatctgcaaagagtgtccaatcattggattcaggtacaggagtctaaagcactttaattatgacatctgccaaagctgctttttttctggtcgagttgcaaaaggccataaaatgcactatcccatggtggaatattgcactccgactacatcaggagaagatgttcgagactttgccaaggtactaaaaaacaaatttcgaaccaaaaggtattttgcgaagcatccccgaatgggctacctgccagtgcagactgtcttagagggggacaacatggaaactcccgttactctgatcaacttctggccagtagattctgcgcctgcctcgtcccctcagctttcacacgatgatactcattcacgcattgaacattatgctagcaggctagcagaaatggaaaacagcaatggatcttatctaaatgatagcatctctcctaatgagagcatagatgatgaacatttgttaatccagcattactgccaaagtttgaaccaggactcccccctgagccagcctcgtagtcctgcccagatcttgatttccttagagagtgaggaaagaggggagctagagagaatcctagcagatcttgaggaagaaaacaggaatctgcaagcagaatatgaccgtctaaagcagcagcacgaacataaaggcctgtccccactgccgtcccctcctgaaatgatgcccacctctccccagagtccccgggatgctgagctcattgctgaggccaagctactgcgtcaacacaaaggccgcctggaagccaggatgcaaatcctggaagaccacaataaacagctggagtcacagttacacaggctaaggcagctgctggagcaaccccaggcagaggccaaagtgaatggcacaacggtgtcctctccttctacctctctacagaggtccgacagcagtcagcctatgctgctccgagtggttggcagtcaaacttcggactccatgggtgaggaagatcttctcagtcctccccaggacacaagcacagggttagaggaggtgatggagcaactcaacaactccttccctagttcaagaggaagaaatacccctggaaagccaatgagagaggacacaatgtaggaagtcttttccacatggcagatgatttgggcagagcgatggagtccttagtatcagtcatgacagatgaagaaggagcagaataaatgttttacaactcctgattcccgcatggtttttataatattcatacaacaaagaggattagacagtaagagtttacaagaaataaatctatatttttgtgaagggtagtggtattatactgtagatttcagtagtttctaagtctgttattgttttgttaacaatggcaggttttacacgtctatgcaattgtacaaaaaagttataagaaaactacatgtaaaatcttgatagctaaataacttgccatttctttatatggaacgcattttgggttgtttaaaaatttataacagttataaagaaagattgtaaactaaagtgtgctttataaaaaaaagttgtttataaaaacccctaaaaacaaaacaaacacacacacacacacatacacacacacacacaaaactttgaggcagcgcattgttttgcatccttttggcgtgatatccatatgaaattcatggctttttctttttttgcatattaaagataagacttcctctaccaccacaccaaatgactactacacactgctcatttgagaactgtcagctgagtggggcaggcttgagttttcatttcatatatctatatgtctataagtatataaatactatagttatatagataaagagatacgaatttctatagactgactttttccattttttaaatgttcatgtcacatcctaatagaaagaaattacttctagtcagtcatccaggcttacctgcttggtctagaatggatttttcccggagccggaagccaggaggaaactacaccacactaaaacattgtctacagctccagatgtttctcattttaaacaactttccactgacaacgaaagtaaagtaaagtattggatttttttaaagggaacatgtgaatgaatacacaggacttattatatcagagtgagtaatcggttggttggttgattgattgattgattgatacattcagcttcctgctgctagcaatgccacgatttagatttaatgatgcttcagtggaaatcaatcagaaggtattctgaccttgtgaacatcagaaggtattttttaactcccaagcagtagcaggacgatgatagggctggagggctatggattcccagcccatccctgtgaaggagtaggccactctttaagtgaaggattggatgattgttcataatacataaagttctctgtaattacaactaaattattatgccctcttctcacagtcaaaaggaactgggtggtttggtttttgttgcttttttagatttattgtcccatgtgggatgagtttttaaatgccacaagacataatttaaaataaataaactttgggaaaaggtgtaaaacagtagccccatcacatttgtgatactgacaggtatcaacccagaagcccatgaactgtgtttccatcctttgcatttctctgcgagtagttccacacaggtttgtaagtaagtaagaaagaaggcaaattgattcaaatgttacaaaaaaacccttcttggtggattagacaggttaaatatataaacaaacaaacaaaaattgctcaaaaaagaggagaaaagctcaagaggaaaagctaaggactggtaggaaaaagctttactctttcatgccattttatttctttttgatttttaaatcattcattcaatagataccaccgtgtgacctataattttgcaaatctgttacctctgacatcaagtgtaattagcttttggagagtgggctgacatcaagtgtaattagcttttggagagtgggttttgtccattattaataattaattaattaacatcaaacacggcttctcatgctatttctacctcactttggttttggggtgttcctgataattgtgcacacctgagttcacagcttcaccacttgtccattgcgttattttctttttcctttataattctttctttttccttcataattttcaaaagaaaacccaaagctctaaggtaacaaattaccaaattacatgaagatttggtttttgtcttgcatttttttcctttatgtgacgctggaccttttctttacccaaggatttttaaaactcagatttaaaacaaggggttactttacatcctactaagaagtttaagtaagtaagtttcattctaaaatcagaggtaaatagagtgcataaataattttgttttaatctttttgtttttcttttagacacattagctctggagtgagtctgtcataatatttgaacaaaaattgagagctttattgctgcattttaagcataattaatttggacattatttcgtgttgtgttctttataaccaccaagtattaaactgtaaatcataatgtaactgaagcataaacatcacatggcatgttttgtcattgttttcaggtactgagttcttacttgagtatcataatatattgtgttttaacaccaacactgtaacatttacgaattatttttttaaacttcagttttactgcattttcacaacatatcagacttcaccaaatatatgccttactattgtattatagtactgctttactgtgtatctcaataaagcacgcagttatgttac

SEQ ID NO: 5743 - DNA, 3106 bp, Homo sapiens
  source 1..3106: mol_type = unassigned DNA
gcgcctgcgccctcggcctcggcctagtcatgctccgtcccggcgcgcagctgctgcggggcctcctgctgcggagctgcccgctgcagggctcccccgggcgcccgcgctctgtctgcggccgggaaggagaggaaaaaccacccttatctgcagaaacacaatggaaagacagagcagaaacagtgataattggaggtggctgtgttggtgtgagtctggcttatcacctggccaaagcagggatgaaagatgtggtcctgctggagaaatcagagctcacggctggatctacctggcacgcagcaggtttaacaacttactttcatcctggaataaacttgaagaaaatacattatgatagcatcaaactttatgagaaactggaagaagaaactggtcaggtggtgggattccatcagccaggtagtatcagacttgctaccacccctgtaagggtagatgaatttaaatatcaaatgactcggactggctggcatgcaacagaacagtatctcattgaacctgaaaaaattcaagagatgttccctttactcaacatgaataaggttttagctggattgtataatcctggagatggtcacattgatccttattctctaactatggcactggctgctggggctaggaaatgtggtgcccttttaaaatatcctgcaccagtaacttctctgaaagccaggtcagatggaacatgggacgttgaaacaccacaggggtctatgagagcaaatagaattgtgaatgctgcaggattttgggctcgtgaagtaggtaaaatgattggactagaacatcctctcattccggttcaacatcaatatgttgttacatcgactatatctgaagtgaaagctttgaaacgagaactgcctgtgctccgtgacctggaaggatcatattatctccgacaggaaagggatgggcttttgtttggtccatatgaaagtcaagagaaaatgaaagttcaggactcctgggtcaccaatggagttcctccaggttttggaaaggaactctttgagtctgatctagatcgaatcatggaacacatcaaagctgccatggaaatggttcctgtcttgaaaaaggctgacatcatcaatgttgtcaatggtcctatcacgtattctcctgacattctgcctatggtggggccccatcagggggtcagaaactactgggtggctataggctttggatatggcataatccacgctggtggggtagggaaatatctcagtgactggatcctgcatggagaacctccttttgatctgatagaattggatcctaatcgctatggcaaatggacaacaacccagtacactgaggccaaagcaagagaatcatatggattcaacaatattgttggttatcctaaagaagaacggtttgctgggaggccgactcaacgagtcagtgggctctatcaaaggctggagtctaagtgttccatggggttccatgctggctgggagcagccgcactggttctacaaaccaggccaggacactcagtacaggccaagttttcgccgcacaaactggtttgagcctgtgggctcggagtataaacaggttatgcaaagagtagcggtaactgacctatcaccatttggcaagtttaacatcaaaggccaagattccattagactactggaccatctctttgcaaatgtcattccaaaggtgggttttacaaatataagtcacatgttaacacccaagggtcgagtgtatgctgagctgactgtttctcaccaatctcctggggagtttcttttaattactggctctggatcagaacttcatgatcttagatggattgaagaagaagcagtcaaaggtggatatgatgttgaaattaaaaacataactgatgagcttggagttcttggagttgctgggccacaggcaagaaaggtccttcagaaactgacctctgaagatcttagtgatgatgttttcaagtttcttcaaaccaagtccttaaaggtttccaacattcctgtcactgctattaggatatcttatactggtgagctgggttgggagctgtatcacagaagagaagattctgtggcgctgtatgacgctatcatgaatgcaggccaggaggagggaatcgacaattttggaacctatgccatgaatgccttacgcctggagaaagccttcagagcctgggggttagagatgaactgtgatacaaatcctttggaagctggactggaatattttgtgaagttaaataagccagcagacttcataggaaagcaagcactgaaacagattaaagccaaggggctgaaacgaagactggtctgcctcaccttggcaacggatgatgttgatccagagggaaatgaaagcatctggtacaatggcaaggtggttggcaacacgacatctggaagctatagctacagcatccagaagagtctggctttcgcatatgtccctgtacaactaagtgaagtgggacagcaagtggaagttgaactattaggcaaaaattacccagcagtcatcatacaagaacctttggtattgaccgaaccaaccagaaaccggcttcagaaaaaaggtggaaaggacaaaacttgaaaaaagaccttcagcagtcaactgaattagagttgctaatgactgtccttgaaattattataactggctcccaggggaatagaggaaaccaggaattcatttcaaaatcatcaaagtctaaatttagaatcttaatgaaacctttctgttaagtgttttctaagcaagacagaataatagataaatgatttacattgttcttttaaatgaagaaatttgaaatgaatgtttttttatttaccccacattacccaatcagtaaaacatttaggtgtttgctaatatacacaatcattactataacctaattaagggacattttataattttagtaacaaatgcattcggttcttgacagctgaaaacaaattaataaattatcttttacataaaaacatgtacaatattgtttatggatttacttctttgagaaatctttccttagatgaataaatgaaagttttaatttttcatga

SEQ ID NO: 5744 - DNA, 2777 bp, Homo sapiens
  source 1..2777: mol_type = unassigned DNA
tatctcattgaacctgaaaaaattcaagagatgttccctttactcaacatgaataaggttttagctggattgtataatcctggagatggtcacattgatccttattctctaactatggcactggctgctggggctaggaaatgtggtgcccttttaaaatatcctgcaccagtaacttctctgaaagccaggtcagatggaacatgggacgttgaaacaccacaggggtctatgagagcaaatagaattgtgaatgctgcaggattttgggctcgtgaagtaggtaaaatgattggactagaacatcctctcattccggttcaacatcaatatgttgttacatcgactatatctgaagtgaaagctttgaaacgagaactgcctgtgctccgtgacctggaaggatcatattatctccgacaggaaagggatgggcttttgtttggtccatatgaaagtcaagagaaaatgaaagttcaggactcctgggtcaccaatggagttcctccaggttttggaaaggaactctttgagtctgatctagatcgaatcatggaacacatcaaagctgccatggaaatggttcctgtcttgaaaaaggctgacatcatcaatgttgtcaatggtcctatcacgtattctcctgacattctgcctatggtggggccccatcagggggtcagaaactactgggtggctataggctttggatatggcataatccacgctggtggggtagggaaatatctcagtgactggatcctgcatggagaacctccttttgatctgatagaattggatcctaatcgctatggcaaatggacaacaacccagtacactgaggccaaagcaagagaatcatatggattcaacaatattgttggttatcctaaagaagaacggtttgctgggaggccgactcaacgagtcagtgggctctatcaaaggctggagtctaagtgttccatggggttccatgctggctgggagcagccgcactggttctacaaaccaggccaggacactcagtacaggccaagttttcgccgcacaaactggtttgagcctgtgggctcggagtataaacaggttatgcaaagagtagcggtaactgacctatcaccatttggcaagtttaacatcaaaggccaagattccattagactactggaccatctctttgcaaatgtcattccaaaggtgggttttacaaatataagtcacatgttaacacccaagggtcgagtgtatgctgagctgactgtttctcaccaatctcctggggagtttcttttaattactggctctggatcagaacttcatgatcttagatggattgaagaagaagcagtcaaaggtggatatgatgttgaaattaaaaacataactgatgagcttggagttcttggagttgctgggccacaggcaagaaaggtccttcagaaactgacctctgaagatcttagtgatgatgttttcaagtttcttcaaaccaagtccttaaaggtttccaacattcctgtcactgctattaggatatcttatactggtgagctgggttgggagctgtatcacagaagagaagattctgtggcgctgtatgacgctatcatgaatgcaggccaggaggagggaatcgacaattttggaacctatgccatgaatgccttacgcctggagaaagccttcagagcctgggggttagagatgaactgtgatacaaatcctttggaagctggactggaatattttgtgaagttaaataaggatcagaatagctgctttgcccattttaaggaggaaaatggctgggtgagcagatgggccatcaggccttattagggtgaatcgtgttcttgtcaaaacctgtcagcaagtagggaaaagaacaatggagtactgaagaactctttcatcacaaagggagacggcgcagtggcccttgcttccttccgtcttggagttgttccagcctccttcccctgctgttggcttatgtgaagttgatacacatgtatcattcattcatccgttcatctagtagacatttattaagtaccgctgattagacaccttgctaacccatagatctaaatgttaaagatatactcctgatggctctcagatctcatgaacctggaaacaaataatatttcaggaactaaagctgtagggatacgttcttagccgtaattgtgaagataacccttccgcaagtggagggctctccagccgcatacaacactgccatcttgtgggaagtgctccgtagagccacttcaggaagccttgaccaaagctgcggtaaaaataattgaatctgtacttttaaaatcttcttaactaaaaacgcttcacctgaaacgactcatatcattgttctcaatggtatttttggtatgttccaaaggaagtaacttttgggaggaaaatcagtagcctttgtttagttggagatggaagaaatgcattaatcaagagcaaaaggaaaatcagctgcctttggatggagtcataggcattcctggaattttcatggtggaaatattgaatttttgtccatttctggagaacctccacgaagattcacagagactcaagtattaaacgtaatgtgttgaagcacatcagaagaatttgttttctataatatgtttctccctctttttctcactctctccttctccctctctttccctttttctctctccttcccctctctccccgtgtagagcttctaactagtagaaacagaataaaatgtaatctctattaaa

SEQ ID NO: 5745 - DNA, 1966 bp, Homo sapiens
  source 1..1966: mol_type = unassigned DNA
ggcctagtcatgctccgtcccggcgcgcagctgctgcggggcctcctgctgcggagctgcccgctgcagggctcccccgggcgcccgcgctctgtctgcggccgggaaggagaggaaaaaccacccttatctgcagaaacacaatggaaagacagagcagaaacagtgataattggaggtggctgtgttggtgtgagtctggcttatcacctggccaaagcagggatgaaagatgtggtcctgctggagaaatcagagctcacggctggatctacctggcacgcagattttgggctcgtgaagtaggtaaaatgattggactagaacatcctctcattccggttcaacatcaatatgttgttacatcgactatatctgaagtgaaagctttgaaacgagaactgcctgtgctccgtgacctggaaggatcatattatctccgacaggaaagggatgggcttttgtttggtccatatgaaagtcaagagaaaatgaaagttcaggactcctgggtcaccaatggagttcctccaggttttggaaaggaactctttgagtctgatctagatcgaatcatggaacacatcaaagctgccatggaaatggttcctgtcttgaaaaaggctgacatcatcaatgttgtcaatggtcctatcacgtattctcctgacattctgcctatggtggggccccatcagggggtcagaaactactgggtggctataggctttggatatggcataatccacgctggtggggtagggaaatatctcagtgactggatcctgcatggagaacctccttttgatctgatagaattggatcctaatcgctatggcaaatggacaacaacccagtacactgaggccaaagcaagagaatcatatggattcaacaatattgttggttatcctaaagaagaacggtttgctgggaggccgactcaacgagtcagtgggctctatcaaaggctggagtctaagtgttccatggggttccatgctggctgggagcagccgcactggttctacaaaccaggccaggacactcagtacaggccaagttttcgccgcacaaactggtttgagcctgtgggctcggagtataaacaggttatgcaaagagtagcggtaactgacctatcaccatttggcaagtttaacatcaaaggccaagattccattagactactggaccatctctttgcaaatgtcattccaaaggtgggttttacaaatataagtcacatgttaacacccaagggtcgagtgtatgctgagctgactgtttctcaccaatctcctggggagtttcttttaattactggctctggatcagaacttcatgatcttagatggattgaagaagaagcagtcaaaggtggatatgatgttgaaattaaaaacataactgatgagcttggagttcttggagttgctgggccacaggcaagaaaggtccttcagaaactgacctctgaagatcttagtgatgatgttttcaagtttcttcaaaccaagtccttaaaggtttccaacattcctgtcactgctattaggatatcttatactggtgagctgggttgggagctgtatcacagaagagaagattctgtggcgctgtatgacgctatcatgaatgcaggccaggaggagggaatcgacaattttggaacctatgccatgaatgccttacgcctggagaaagccttcagagcctgggggttagagatgaactgtgatacaaatcctttggaagctggactggaatattttgtgaagttaaataaggatcagaatagctgctttgcccattttaaggaggaaaatggctgggtgagcagatgggccatcaggccttattagggtgaatcgtgttcttgtcaaaacctgtcagcaagtagggaaaagaacaatggagtactgaagaactctttcatcacaaagggagacggcgcagtggccct

SEQ ID NO: 5746 - DNA, 1517 bp, Homo sapiens
  source 1..1517: mol_type = unassigned DNA
ggcctagtcatgctccgtcccggcgcgcagctgctgcggggcctcctgctgcggagctgcccgctgcagggctcccccgggcgcccgcgctctgtctgcggccgggaaggagaggaaaaaccacccttatctgcagaaacacaatggaaagacagagcagaaacagtgataattggaggtggctgtgttggtgtgagtctggcttatcacctggccaaagcagggatgaaagatgtggtcctgctggagaaatcagagctcacggctggatctacctggcacgcaatatggcataatccacgctggtggggtagggaaatatctcagtgactggatcctgcatggagaacctccttttgatctgatagaattggatcctaatcgctatggcaaatggacaacaacccagtacactgaggccaaagcaagagaatcatatggattcaacaatattgttggttatcctaaagaagaacggtttgctgggaggccgactcaacgagtcagtgggctctatcaaaggctggagtctaagtgttccatggggttccatgctggctgggagcagccgcactggttctacaaaccaggccaggacactcagtacaggccaagttttcgccgcacaaactggtttgagcctgtgggctcggagtataaacaggttatgcaaagagtagcggtaactgacctatcaccatttggcaagtttaacatcaaaggccaagattccattagactactggaccatctctttgcaaatgtcattccaaaggtgggttttacaaatataagtcacatgttaacacccaagggtcgagtgtatgctgagctgactgtttctcaccaatctcctggggagtttcttttaattactggctctggatcagaacttcatgatcttagatggattgaagaagaagcagtcaaaggtggatatgatgttgaaattaaaaacataactgatgagcttggagttcttggagttgctgggccacaggcaagaaaggtccttcagaaactgacctctgaagatcttagtgatgatgttttcaagtttcttcaaaccaagtccttaaaggtttccaacattcctgtcactgctattaggatatcttatactggtgagctgggttgggagctgtatcacagaagagaagattctgtggcgctgtatgacgctatcatgaatgcaggccaggaggagggaatcgacaattttggaacctatgccatgaatgccttacgcctggagaaagccttcagagcctgggggttagagatgaactgtgatacaaatcctttggaagctggactggaatattttgtgaagttaaataaggatcagaatagctgctttgcccattttaaggaggaaaatggctgggtgagcagatgggccatcaggccttattagggtgaatcgtgttcttgtcaaaacctgtcagcaagtagggaaaagaacaatggagtactgaagaactctttcatcacaaagggagacggcgcagtggccc

SEQ ID NO: 5747 - DNA, 583 bp, Homo sapiens
  source 1..583: mol_type = unassigned DNA
agtggtgtgatctcggctcactgcaaccttcgcctcccaggttcaagcaattctcctgcctcagtttcccaagtagctgggactacaggtgggttttacaaatataagtcacatgttaacacccaagggtcgagtgtatgctgagctgactgtttctcaccaatctcctggggagtttcttttaattactggctctggatcagaacttcatgatcttagatggattgaagaagaagcagtcaaaggtggatatgatgttgaaattaaaaacataactgatgagcttggagttcttggagttgctgggccacaggcaagaaaggtccttcagaaactgacctctgaagatcttagtgatgatgttttcaagtttcttcaaaccaagtccttaaaggtttccaacattcctgtcactgctattaggatatcttatactggtgagctgggttgggagctgtatcacagaagagaagattctgtggcgctgtatgacgctatcatgaatgcaggccaggaggagggaatcgacaattttggaacctatgccatgaatgccttacgcctggagaaagccttcagagcc

SEQ ID NO: 5748 - DNA, 554 bp, Homo sapiens
  source 1..554: mol_type = unassigned DNA
aggctgcccgctggcctcggagcaggcgcctgcgccctcggcctcggcctagtcatgctccgtcccggcgcgcagctgctgcggggcctcctgctgcggagctgcccgctgcagggctcccccgggcgcccgcgctctgtctgcggccgggaagggtttaacaacttactttcatcctggaataaacttgaagaaaatacattatgatagcatcaaactttatgagaaactggaagaagaaactggtcaggattttgggctcgtgaagtaggtaaaatgattggactagaacatcctctcattccggttcaacatcaatatgttgttacatcgactatatctgaagtgaaagctttgaaacgagaactgcctgtgctccgtgacctggaaggatcatattatctccgacaggaaagggatgggcttttgtttggtccatatgaaagtcaagagaaaatgaaagttcaggactcctgggtcaccaatggagttcctccaggttttggaaaggaactctttgagtctgatctagatcgaatcatggaacacatcaa

SEQ ID NO: 5749 - DNA, 572 bp, Homo sapiens
  source 1..572: mol_type = unassigned DNA
ctagtcatgctccgtcccggcgcgcagctgctgcggggcctcctgctgcggagctgcccgctgcagggctcccccgggcgcccgcgctctgtctgcggccgggaagggtttaacaacttactttcatcctggaataaacttgaagaaaatacattatgatagcatcaaactttatgagaaactggaagaagaaactggtcaggtggtgggattccatcagccaggtagtatcagacttgctaccacccctgtaagggtagatgaatttaaatatcaaatgactcggactggctggcatgcaacagaacagtatctcattgaacctgaaaaaattcaagagatgttccctttactcaacatgaataaggttttagctggattgtataatcctggagatggtcacattgatccttattctctaactatggcactggctgctggggctaggaaatgtggtgcccttttaaaatatcctgcaccagtaacttctctgaaagccaggtcagatggaacatgggacgttgaaacaccacaggggtctatgagagcaaatagaattgtgaatgctgcag

SEQ ID NO: 5750 - DNA, 661 bp, Homo sapiens
  source 1..661: mol_type = unassigned DNA
gcgccggcgcctcctctcggcgtcccctgagccagcccgcgagcggccgcgctcccgactctccttccttccgcgcagcctccagttccccggggctggagccggctgtcggctggttgccggctccgagggcgatgagagtggcaggtgtgccctgctgcacaggtggcctccgaacccgggaaaagaggaactaaggcggaggaactgagacgtttcgaattccaggcgcactgcacactcgccggggggcacgccatgcaaatctccttctgggccaatgcacatggttgctgccacaggtttaccggatgctatcaaggtttcaactgcccacacagcttcttcaacgtgttcaaaatactggaatcagttaagctaaggtatgaaggtgtctgactcactcctcctgctaccaaagcatctccttcatcagccacttgtcgggcgatgtcgcaagcagcttcattgacttcctgcccctaaaatggagacggggtctccctgcattgcccaggatggactggaattcctggcctgatacgatcctcctgccttggccactcaaagtacatccttaacacccctctatggctgtacattcaggcaggtttaacaacttactttcatcctggaataaacttgaagaaaatacattatg

SEQ ID NO: 5751 - DNA, 455 bp, Homo sapiens
  source 1..455: mol_type = unassigned DNA
gccggctgtcggctggttgccggctccgagggcgatgagagtggcaggtgtgccctgctgcacaggtggcctccgaacccgggaaaagaggaactaaggcggaggaactgagacgtttcgaattccaggcgcactgcacactcgccggggggcacgccatgcaaatctccttctgggccaatgcacatggttgctgccacaggtttaccggatgctatcaaggtttcaactgcccacacagcttcttcaacgtgttcaaaatactggaatcagttaagctaaggtatgaaggtgtctgactcactcctcctgctaccaaagcatctccttcatcagccacttgtcgggcgatgtcgcaagcagcttcattgacttcctgcccctaaaatgggtgagtatatgagacatctaaattttcatgtgaaattgaaataaaattattattcaaacattca

SEQ ID NO: 5752 - DNA, 550 bp, Homo sapiens
  source 1..550: mol_type = unassigned DNA
agcccgcgagcggccgcgctcccgactctccttccttccgcgcagcctccagttccccggggctggagccggctgtcggctggttgccggctccgagggcgatgagagtggcaggtgtgccctgctgcacaggtggcctccgaacccgggaaaagaggaactaaggcggaggaactgagacgtttcgaattccagatggagtctggctctgccgcccaggctgaagtgtggtgcaatcccagctcactgcaatctccgcctcccgggttcaaatggttctcctgcctcagcttcccaagtagctgggattacaggctggagtgcaatggcatgagcacagcccactgaagcctcaacctcccgggtcaagcaatcctcccacctcagccttcctagtagctgggactgtaggtgtgcaccaccacgcctggctaatctttgtattttttgtagagatggggttttgccataggctgttttcttctattctatggttctcataatactactttgtaacaagccattctaagatttaaagtgatgcaaaaac

SEQ ID NO: 5753 - DNA, 2682 bp, Homo sapiens
  source 1..2682: mol_type = unassigned DNA
tgggcatagatttcctctttgagaacatcaacctgatttttgagactttttgaaaaaattctttgtgaactacggagggtagaggtatcacacccaactatgaagatcagcatcctgctcatgttcctttggggattatcctgtgctctcccagtaaccaggtatcaaaataatgaatctgaggattctgaagaatggaagggtcatttggctcaggcaccaacaccacccttggagagcagtgagtcatcagaaggcagtaaagttagctcagaggaacaggcaaatgaagaccccagtgacagcactcagtcagaggagggcctgggctctgatgatcatcaatacatttataggctagctggtggcttctccaggagcacaggaaaaggaggagatgataaagatgacgatgaagatgacagtggagatgacacctttggtgacgatgacagtggcccagggcccaaagacagacaagaaggaggaaactccagactgggaagtgatgaggactctgatgacaccatacaagccagtgaagagagtgccccacaagggcaagacagtgcccaagataccaccagtgagagcagggaacttgacaatgaggaccgggtggacagcaagcctgagggaggtgactccactcaagagagtgagagtgaagagcactgggtgggaggtggcagtgatggggagagcagccatggagacggctccgagttggacgatgagggaatgcagagtgatgacccagagagcatcaggagtgaaaggggaaactccagaatgaacagtgcaggcatgaaatcaaaagaatctggagaaaacagtgagcaagcaaacactcaagattcaggtggcagccaattgctggagcatcccagtaggaaaatttttaggaagtctcgcatctcagaggaagatgacagaagcgagcttgatgacaacaacacaatggaagaagtcaagagtgactctacagaaaacagcaactccagagacactggcctcagccaacccaggagagacagcaagggtgactctcaagaagacagcaaggagaatctgtcccaggaagagagccaaaacgtagatggtcccagcagtgagtccagccaagaggccaacctgtcatctcaagagaacagcagtgagtctcaggaagaggtggtgagtgagtccaggggagataaccccgaccccacaactagttatgtagaagaccaggaagacagtgactccagcgaggaggacagctcgcacacactctcccactcaaaaagtgaatccagagaggagcaagcagacagcgaatccagtgagagcctcaacttctcagaggaaagcccggagtcccctgaggatgagaacagctccagccaggagggcctccagtctcacagcagctcagcagagagtcagagcgaggaaagccattctgaggaagacgacagtgactctcaagacagcagcagatccaaagaagatagcaactccacggagagcaaatcaagcagtgaggaagatggccagttgaaaaacattgagatagagagccggaaattaacagttgatgcctatcacaacaaacccattggggaccaagatgacaatgactgccaagacggctattagcatcagctgtcctaagaagcagttgtcacataaaggagtcttagggacttgaaaatgtatcatgataactataatttattgatgttttgatcaaaagaataaccagatgccatatttttcctgaaaggaattgctggacattacacttgtttttagggtgtcatcatttcacagaggtttaaatactgtggagtgacaccagaacacagccaaagaggctagaagcaagaaaggatctgcatgataactttgcagctgagatagttcctaattcatcaacgtaacaaacaaagctattgggtgtccatgatataccaggcactatgctaggtgttgagaatgtaaagcaggttaagacttgtttcttgctcctgaggagcgtatagaaggacccacaaagctacagagttaaagagggatatgtataagagaaacaagaattgttacaacccagtatggtgagtgccaagacagagagctatgaacacgatatctatctgggaacactgagaagggtgaccaatgcgttggagaacgagggagggcttcatagcagaagacattggagttggaaggttgcatagggtttcctcattggagaccgggaaattctattcttgggataaataatagtaaattctataggattcaatacttagtttgcaaaagcactttgaaattatggcacagtgagttgttttggataagaaaatctttttctcccaattaatttaccaattcatcatttttttttttttgtagaactcccataaacatcaccttactaatcactggtgatgataagaaggattgggtcaggaagagtgggagaaagaaattcctctttacgtagatactttttagctttattttttctaaaatcagtttgcgtgcaatgctagaaaaaaactgttctctgagtcctttacagagcaaaattctgtatgtaagattcaattgatttttgacaaataccatttgaaatattacctcaacataaaatacttgttttgtaataaagattataatacccagaagaaa

SEQ ID NO: 5754 - DNA, 2634 bp, Homo sapiens
  source 1..2634: mol_type = unassigned DNA
tgggcatagatttcctctttgagaacatcaacctgatttttgagactttttgaaaaaattctttgtgaactacggagggtagaggtatcacacccaactatgaagatcagcatcctgctcatgttcctttggggattatcctgtgctctcccagtaaccaggtatcaaaataatgaatctgaggattctgaagaatggaagggtcatttggctcaggcaccaacaccacccttggcaaatgaagaccccagtgacagcactcagtcagaggagggcctgggctctgatgatcatcaatacatttataggctagctggtggcttctccaggagcacaggaaaaggaggagatgataaagatgacgatgaagatgacagtggagatgacacctttggtgacgatgacagtggcccagggcccaaagacagacaagaaggaggaaactccagactgggaagtgatgaggactctgatgacaccatacaagccagtgaagagagtgccccacaagggcaagacagtgcccaagataccaccagtgagagcagggaacttgacaatgaggaccgggtggacagcaagcctgagggaggtgactccactcaagagagtgagagtgaagagcactgggtgggaggtggcagtgatggggagagcagccatggagacggctccgagttggacgatgagggaatgcagagtgatgacccagagagcatcaggagtgaaaggggaaactccagaatgaacagtgcaggcatgaaatcaaaagaatctggagaaaacagtgagcaagcaaacactcaagattcaggtggcagccaattgctggagcatcccagtaggaaaatttttaggaagtctcgcatctcagaggaagatgacagaagcgagcttgatgacaacaacacaatggaagaagtcaagagtgactctacagaaaacagcaactccagagacactggcctcagccaacccaggagagacagcaagggtgactctcaagaagacagcaaggagaatctgtcccaggaagagagccaaaacgtagatggtcccagcagtgagtccagccaagaggccaacctgtcatctcaagagaacagcagtgagtctcaggaagaggtggtgagtgagtccaggggagataaccccgaccccacaactagttatgtagaagaccaggaagacagtgactccagcgaggaggacagctcgcacacactctcccactcaaaaagtgaatccagagaggagcaagcagacagcgaatccagtgagagcctcaacttctcagaggaaagcccggagtcccctgaggatgagaacagctccagccaggagggcctccagtctcacagcagctcagcagagagtcagagcgaggaaagccattctgaggaagacgacagtgactctcaagacagcagcagatccaaagaagatagcaactccacggagagcaaatcaagcagtgaggaagatggccagttgaaaaacattgagatagagagccggaaattaacagttgatgcctatcacaacaaacccattggggaccaagatgacaatgactgccaagacggctattagcatcagctgtcctaagaagcagttgtcacataaaggagtcttagggacttgaaaatgtatcatgataactataatttattgatgttttgatcaaaagaataaccagatgccatatttttcctgaaaggaattgctggacattacacttgtttttagggtgtcatcatttcacagaggtttaaatactgtggagtgacaccagaacacagccaaagaggctagaagcaagaaaggatctgcatgataactttgcagctgagatagttcctaattcatcaacgtaacaaacaaagctattgggtgtccatgatataccaggcactatgctaggtgttgagaatgtaaagcaggttaagacttgtttcttgctcctgaggagcgtatagaaggacccacaaagctacagagttaaagagggatatgtataagagaaacaagaattgttacaacccagtatggtgagtgccaagacagagagctatgaacacgatatctatctgggaacactgagaagggtgaccaatgcgttggagaacgagggagggcttcatagcagaagacattggagttggaaggttgcatagggtttcctcattggagaccgggaaattctattcttgggataaataatagtaaattctataggattcaatacttagtttgcaaaagcactttgaaattatggcacagtgagttgttttggataagaaaatctttttctcccaattaatttaccaattcatcatttttttttttttgtagaactcccataaacatcaccttactaatcactggtgatgataagaaggattgggtcaggaagagtgggagaaagaaattcctctttacgtagatactttttagctttattttttctaaaatcagtttgcgtgcaatgctagaaaaaaactgttctctgagtcctttacagagcaaaattctgtatgtaagattcaattgatttttgacaaataccatttgaaatattacctcaacataaaatacttgttttgtaataaagattataatacccagaagaaa

SEQ ID NO: 5755 - DNA, 15633 bp, Homo sapiens
  source 1..15633: mol_type = unassigned DNA
agtaaaactttccatttggaagcctgttggatgttgagcaggtctgccaggagttagaagaccattccggaagagctgactccagcctgtccatgcacggctacaatgtttaggattgggaggagacagctctggaagcatagcgtcactcgagttttaacgcaaagactgaagggagagaaggaagccaagcgggctcttttggatgcgaggcataactacttatttgcaattgtggcttcctgtttggacctgaacaaaaccgaagtggaggatgccattcttgaagggaatcagattgaaagaattgatcaactttttgctgttggaggtctccgacacctcatgttttactatcaagatgtggaggaagcagaaacaggacaacttggctctctaggaggggtaaatcttgtttctggaaagattaaaaaacctaaggtgttcgtgaccgagggaaacgatgtggctcttactggggtatgtgtgttcttcatcaggactgacccttccaaagccatcacccctgacaacatccaccaggaggtgagttttaacatgttagatgcggcagatggaggcctgctcaacagtgtgagacgtttgctgtcggacatcttcattcctgctctcagagccacgagccatggctggggcgagctcgagggccttcaggacgcagctaacattcgccaggagttcttgagctccctggaaggctttgtgaacgtcctgtcgggtgcacaggagagtctgaaggagaaggtgaaccttcgaaagtgtgacatacttgaactgaaaaccctaaaggaacctacggactacttgactctagcaaataaccctgagactttgggaaaaatagaggattgcatgaaagtatggatcaaacagacagaacaggttcttgctgaaaacaatcagctgctgaaggaagcggatgacgttgggccacgagcggagctggagcactggaaaaaaagactctccaagtttaactaccttttggaacaattgaaaagcccggatgtgaaggctgtgctggcagtgcttgcggcggccaagtcgaaactgctgaagacttggcgggagatggatattcgaatcactgatgcaactaatgaagcaaaggacaatgtgaaatacttgtatacacttgaaaaatgttgtgaccctttgtacagcagtgatcccctatccatgatggatgctattcctacacttataaatgcaattaaaatgatctatagtatctctcattactataatacctctgagaagatcacatctctgtttgtaaaggtgacaaatcagattatatctgcatgtaaagcctatattaccaataatggaaccgcttccatctggaaccagccacaggatgttgttgaagaaaaaatactatctgcgattaaactgaaacaggaataccagctctgctttcacaagacaaaacaaaagcttaaacaaaatccaaatgcaaaacaatttgattttagcgagatgtatatttttggaaaattcgaaacttttcaccgacgccttgccaagataatagacatctttacaaccctcaagacgtattcagtcctgcaagattccacaattgaagggctggaagacatggccactaaataccagggcattgtggcaaccataaagaaaaaggaatacaatttcctagaccagcggaaaatggattttgaccaagattacgaagagttttgcaagcagactaatgaccttcataacgagttgcggaagttcatggatgttacatttgcaaagattcaaaacacaaatcaagctctaagaatgttgaagaaatttgaaagattgaatatacctaatcttggtattgatgacaaatatcaacttatccttgagaactatggggctgacattgatatgatttcaaagctgtatacaaagcagaaatacgatcctcctctggctcgaaaccagcctcccatcgctggaaagattttgtgggcccgccagctcttccataggattcagcagcccatgcagcttttccagcagcacccagctgtgctaagcacggcagaagccaaacctataattcgcagttacaacaggatggccaaggtcctcctggagtttgaggtcctcttccacagggcgtggcttcggcaaattgaagaaattcatgtaggtcttgaggcttcattattggtgaaggctccaggcacaggggaattgtttgtaaactttgaccctcagatattaatcttatttagagaaacagagtgcatggcccagatgggtctggaagtctctccactggcaacttccctcttccagaaacgagatagatacaaaaggaacttcagtaacatgaagatgatgctagctgaatatcagagagtgaagtcaaaaatacctgctgccattgagcaattgattgtccctcacttggccaaagtggatgaagctctccaacctggcttggctgcactgacctggacatcactgaatattgaggcttatttagaaaacacttttgcaaagatcaaggacctggagttgctgcttgacagggtcaatgatttgattgagttccgcattgatgccattctagaagaaatgagcagcacgcctctttgtcagcttccccaggaggagccactaacctgtgaagagtttctccaaatgacaaaggatctttgtgtaaatggtgcacaaatactacattttaaaagctcattagtggaggaggcagtcaatgagcttgtaaatatgttgctggatgtggaagttttatctgaagaagaaagtgaaaaaatatccaatgagaatagtgttaattacaaaaatgaaagttcagcaaaaagagaagaaggaaattttgacaccttgacatcatctattaatgccagggccaatgccctgcttttgacgacagtcacgaggaaaaagaaagaaactgagatgttaggggaagaagcccgcgagttactctctcatttcaaccatcagaacatggatgctcttctgaaagttacaaggaatacactagaggccattcgcaaacgtattcattcctctcacacaattaacttccgggacagtaacagtgcctctaacatgaagcagaacagtttgcccattttccgggcaagcgtcactctggccattcccaacatcgtcatggcccctgccctggaagatgtacagcagaccctgaacaaagccgtggagtgcatcatcagtgtccctaagggggtcagacagtggagcagtgaactgttgtccaagaaaaagatacaagaaagaaaaatggctgctttgcagagtaatgaagacagtgattctgatgttgaaatgggagaaaatgaacttcaagataccttggagatagcatctgtaaatttacccattcccgtgcaaaccaagaactattataagaatgtttctgaaaacaaagagattgtaaaattagtttctgtgcttagcacaattatcaactccaccaaaaaggaagttattacatccatggattgcttcaaacgctacaatcacatttggcaaaagggaaaagaagaagccattaagacatttattacacagagccccttgctttctgaatttgagtcccagattctctatttccaaaacctagagcaggaaattaatgctgagcctgaatatgtctgtgtgggttccattgctctgtacacagctgacttgaagttcgccctgactgctgagacaaaggcctggatggttgtcattggacgccactgtaacaaaaaataccggagtgagatggaaaacatttttatgcttattgaagaattcaataagaaactaaatcgtccaattaaggacctagatgatattcggattgcaatggcagcgctgaaagaaataagggaggagcaaatctccattgactttcaagtaggacctattgaggaatcttatgccctgcttaacagatatggacttctgatagcaagggaagagatagacaaagttgatacactgcactatgcttgggagaagctgctggcacgtgctggcgaagtccagaataaattagtctcactgcagcccagtttcaagaaagagcttattagtgctgtggaggtattcctccaagattgtcaccagttttatctggactatgatttgaatggtccaatggctagcggcttgaagccccaggaagccagtgacaggcttatcatgtttcagaatcaatttgataatatctatcggaaatacatcacatatactggaggagaggagctttttggcctgccagctacacagtatcctcagcttcttgaaataaagaagcaactaaatcttctacagaaaatatatactctgtacaacagtgtcatagaaactgtaaatagctattatgatattctttggtcagaggtgaatattgaaaaaattaacaatgaactcttagaattccagaacagatgtcgaaagcttccccgggccttgaaggactggcaggcttttttggacctgaagaagatcattgatgatttcagcgagtgttgcccgctgctggaatacatggccagtaaagccatgatggagcggcactgggaaaggataaccaccctcaccgggcacagtctggatgtggggaatgaaagctttaagttaagaaatatcatggaggcacctcttctgaaatataaagaggaaatagaggacatctgtatcagtgcggtgaaagagagagacattgagcaaaagctgaagcaagtgattaatgaatgggacaataaaacattcaccttcggcagctttaaaacccgtggagagctcctcttgagaggagacagtacctcggaaatcatcgccaacatggaggacagcttgatgttgctgggatccctactgagcaacaggtacaatatgccattcaaagcccagattcaaaaatgggtgcagtacctttccaactcaacagacatcatcgagagctggatgacggtgcaaaacctgtggatttatttagaagctgtctttgtgggaggagacattgccaagcagctgcccaaggaagccaagcggttttctaacatagataaatcttgggtgaagatcatgactcgggcacatgaagtgcccagtgtagtccagtgctgtgttggagatgagaccctggggcagctgttaccacacttgctggaccagttggaaatatgccagaaatcccttactgggtacttggagaaaaaacgactgtgctttcctcggtttttcttcgtctcagatcctgcccttctagagattctggggcaggcgtcggactcccacactatacaggcccatttgctgaatgtgtttgacaacattaaatctgtcaagttccacgaaaagatctatgatcgaattctgtcaatttcctctcaagagggtgagacgattgaattggataaacctgtcatggcagagggcaatgtggaagtttggcttaattctcttttggaagaatctcagtcctcattgcatcttgtgattcgccaggcagccgcaaatattcaagaaacaggtttccaactaactgaatttctttcatccttccctgctcaggttggattattaggaattcagatgatatggacacgggattcagaagaagcccttagaaatgccaagtttgataaaaaaatcatgcagaaaactaatcaggctttcctggagctactcaatacattgatagacgtcaccacgagggatctgagttccacggaacgagtgaaatacgagactctgattactattcatgtgcaccaaagggatatctttgatgacctgtgtcatatgcatatcaagagtcccatggactttgagtggctgaaacagtgcagattttactttaacgaagattctgacaagatgatgattcacatcacagatgtggcgttcatataccagaatgaatttttaggctgcactgacaggcttgtaataactccacttacagacagatgttacatcacgctggctcaagctctgggaatgagcatggggggagcccctgctggacctgcaggcacaggcaaaacagaaaccactaaagacatgggacgatgcctcgggaaatacgtcgtggttttcaattgttcagaccagatggatttccgaggacttggacggatttttaagggactggcacagtctggatcctggggttgttttgatgaatttaaccgtattgatctaccagttctctcggttgcagcccagcaaatttccattattctgacatgtaaaaaggagcacaaaaagtcttttatctttactgatggagataatgtgactatgaaccctgaatttgggcttttcttaaccatgaatcctggctatgccggacggcaggaactccctgaaaacttgaagattaatttccgctcagtggccatgatggtgcctgaccgtcagattatcataagggtgaagttggctagttgtggcttcattgacaacgttgttttggccaggaagtttttcacgctctacaaactgtgtgaggagcagctttctaagcaggttcattatgactttggcctgcgtaacattctgtcagttcttcggaccttgggagcagcaaaaagagccaatccaatggatacggagtccacgattgtcatgcgtgtactacgggacatgaatctttctaaactgattgatgaggatgaacccttgtttttgagtttgattgaagatctctttccaaatattcttctggacaaggcaggttaccctgaactggaagcagcaattagtagacaggttgaagaagctggtttaatcaaccatcctccttggaaactgaaggtcatccagctattcgaaacgcagagagtgcgacatgggatgatgactctggggcccagtggggctgggaagaccacctgcatccacaccttgatgagagccatgacagattgtggaaaaccacatcgggaaatgaggatgaatcccaaagcgattactgccccacagatgtttggtcggctggacgttgccacaaatgactggactgatgggatattttctacgctttggaggaaaacattaagagcaaagaaaggggaacatatctggataattcttgatggtccagtagatgccatctggattgaaaatctgaattctgttttggatgataacaaaactctaacccttgccaatggtgatcggattcccatggctccaaactgcaagatcattttcgagcctcataacattgacaatgcttctcctgccaccgtctcaagaaatggaatggttttcatgagctcttctatccttgattggagtcctattcttgagggttttcttaagaaacgctcacctcaagaagcagaaattcttcgtcagctgtacaccgagtctttcccagacttgtatcgcttctgtatccagaacttagaatacaagatggaggtgctggaggcctttgtcatcacacagagcattaacatgcttcaaggcctgattcctctgaaggagcaaggcggggaggtgagccaggctcacctggggcggctgttcgtgttcgcgctgctgtggagcgcgggggcggcgctggagctggacggacggcgccgcctggagctctggctgcgctctcggcccacagggacgctggagctgccgccgccagcggggcccggggacaccgccttcgactactatgtggcgcccgatggtacatggacgcactggaacacgcgtacccaggaatacctgtatccgtctgataccaccccagagtatggttctattctggtgccaaatgttgacaatgtgaggactgactttctaattcaaaccattgctaaacagggcaaggctgtgctattaattggtgaacaaggaacagccaaaacagtaataattaaaggatttatgtcaaaatatgatcctgaatgtcacatgatcaagagtctgaatttttcttctgcaaccaccccactgatgttccagaggacgatagagagctatgtggataaacgaatgggtacaacatatggccctcctgcgggaaagaagatgactgtttttattgatgatgtgaatatgccaataatcaatgagtggggagatcaggttacgaatgagatagtgcgacagctgatggaacaaaatggattctataatctagagaagcctggggagttcaccagcatcgtggacatccagtttttggcagccatgatccatcctggtggtggacgcaatgacataccccaaagactcaagaggcagttctctatatttaattgcacgttgccctctgaagcttctgtggacaagatctttggtgtgattggggtaggccactactgtactcagaggggtttctcagaagaagtgagagattctgtgacaaaattggtgcctctgacacgccgactatggcagatgaccaagattaaaatgcttcctacccctgcaaaattccattatgtgtttaacctacgagatctttctcgggtctggcagggaatgctgaacactacttcagaggtcatcaaggaaccaaatgatctgttaaagctgtggaagcatgagtgtaaacgtgttatagctgaccgtttcacagtgtccagtgatgtgacctggtttgataaggctttagtaagtttggtagaggaggagtttggtgaagagaaaaaactcttggtggattgtggaattgacacatattttgtggatttcttgagagatgcacctgaagctgcaggtgaaacatctgaagaggctgatgctgaaacacctaaaatttatgagccaattgaatcttttagtcacctaaaagagcgtctgaatatgttcctgcagctctataatgagagcatccgtggcgccggcatggacatggtgttctttgcagatgccatggttcacttagtcaagatctctcgtgtcattcgtactcctcagggaaatgccctcctggtcggggtgggcggatcaggaaagcagagcctgacgaggttggcttcattcattgctggctacgtttccttccagatcactctgacgagatcctacaacacatcaaatctgatggaagatctgaaggttttgtatcgaacagctggtcagcaaggcaaaggaatcacttttattttcacagacaatgagattaaagatgagtcatttttggaatatatgaacaatgttttatcatcaggtgaggtctctaacctatttgctcgagatgaaattgatgaaattaatagcgacctggcatcagtcatgaaaaaagaattccccaggtgccttcctaccaatgagaacctgcacgactacttcatgagtcgggtccgacagaaccttcatattgtgctctgcttctcgccagtgggggagaaatttcgaaacagagctttgaagttccctgccctaatttcaggatgcacaattgactggttcagccgatggcccaaagatgctttagttgctgtgtctgaacacttcctcacttcctatgatattgactgcagtttggaaatcaagaaggaggtggtccaatgcatgggctccttccaggatggggtggctgagaagtgtgttgattattttcagagattccgacgttctacccacgtgacgcccaaatcatacctctcctttattcagggctataagttcatatatggagaaaagcatgtggaggtgcggaccctggccaacagaatgaatactggattggaaaagctcaaagaagcttcagagtctgttgcagccttgagtaaagaactggaagcgaaagaaaaggagctacaagtggccaacgataaagccgacatggtcttaaaagaagtgacaatgaaagcacaggctgctgaaaaggtcaaggctgaggtacagaaggtgaaggacagggcccaggccattgtggacagcatctctaaagacaaagccattgctgaagaaaaactggaagcagcaaaaccagctttagaagaggcagaagctgcattgcagaccatcaggccttcggacatcgccactgttcgcacgttgggccgcccccctcacctcatcatgcggatcatggattgcgtactgctgctgtttcaaaggaaagtcagtgctgtgaaaattgacctggaaaaaagctgtaccatgccctcctggcaggaatccttaaaattgatgactgcagggaactttttacagaacttacagcaattcccaaaagacacaatcaatgaagaggtgatagaatttttgagtccttactttgaaatgcctgactataacatcgaaactgctaaacgcgtatgtggaaatgtagctggtctttgttcctggacgaaagctatggcttccttcttttctataaacaaagaagtactgcctctgaaggccaacttggtggtgcaagagaatcgccatctcctggccatgcaggatctgcagaaagcccaggccgagttggatgacaagcaggcggaacttgacgtggtgcaggctgagtatgaacaggccatgactgaaaagcagaccttgcttgaagatgcagagcgatgcagacacaagatgcagacagcttccacgctcatcagtggcttggcaggtgaaaaagaaagatggacagagcaaagccaagagtttgctgcacaaactaaaagacttgtaggggatgtactgttggctacagcttttctatcttattctggtccatttaaccaagagtttcgtgatcttctgttaaatgactggcggaaggaaatgaaagcccggaaaattccatttggaaagaacctaaatctcagtgagatgttgattgatgctcctactattagtgaatggaacctccaaggtctgccaaatgatgacttgtccattcaaaatggaattattgtcacgaaggcatctcgttaccctttgttaattgatccacagactcaaggcaagatctggattaaaaataaagaaagccgaaatgaactccagatcacgtctttaaatcacaagtacttcagaaaccacctggaagacagcctttctcttggaaggcctttgcttattgaagatgttggagaggaactagatccagcactagataatgttttggaaagaaacttcattaaaactgggtctacctttaaggtgaaagttggtgacaaggaagtagatgtgttggatggctttagactctacattaccaccaaattgcctaacccagcctacacccctgagataagtgcccgtacctccatcattgacttcactgtcaccatgaaaggtctagaagatcagttactggggagggtcattctcacagagaagcaggaattggagaaagaaagaactcatctgatggaagatgtaactgcaaacaaaagaaggatgaaggaactagaagataacttgctttaccgcctgacaagtacccaggggtccctggtagaagatgaaagtctcattgtcgtgctgagtaacacaaaaaggacagccgaggaggtgacacagaagctagaaatttctgctgagacagaagttcaaattaactcagcccgggaggaatacagacctgtggctacgcggggcagcatcctctacttcctcattactgagatgcgcttggttaatgagatgtatcagacttcgcttcgccagtttctgggcttatttgacctttccttagccaggtctgtcaagagcccgattacaagcaagaggattgctaatatcatcgagcacatgacctacgaggtttataagtatgctgcccgagggctgtacgaggagcacaaattcctgttcaccttgttgcttaccctaaagattgacatccagaggaaccgagtcaagcatgaagagtttctcactcttattaaaggaggtgcctcattagaccttaaagcttgtcctccaaaaccatcaaaatggatcctggacataacatggctgaatttggtggaacttagcaaactcagacagttttcagatgtccttgaccagatatcgagaaatgagaaaatgtggaaaatttggtttgataaggaaaacccggaggaggaacctcttccaaatgcctatgataaatctcttgactgcttcagacgtcttctccttattagatcctggtgtcctgacagaaccatcgcccaggcccgcaagtacatcgtggactccatgggagaaaaatatgccgaaggtgttattttagacttggagaagacgtgggaggaatctgatccacggacgccactcatctgtctcctgtctatgggctcagaccccacagattccatcattgccttggggaagagattaaaaatagaaacccgttatgtgtccatgggccagggccaggaagtccatgctcggaagctcttgcagcagaccatggcgaacggaggatgggcacttctgcagaactgccatctgggacttgatttcatggatgagctgatggacataatcatagaaactgagcttgtacatgatgcgttccgcctctggatgaccaccgaggctcataagcagtttcccattacactccttcagatgtccattaaatttgccaacgatcctccacaaggactccgggcaggactgaaaagaacatatagtggtgtcagccaagacctgctggacgtgagctctgggtcccagtggaagcccatgctgtacgcagtggctttcctgcactccactgtccaggagaggcgcaagttcggtgccctggggtggaatatcccctacgaatttaaccaagcggactttaatgccactgtgcagttcatccaaaaccacttggatgacatggatgtcaaaaagggtgtctcctggaccaccatccgctacatgataggagagattcaatatggaggcagagtcactgacgactatgataagagattgttgaacacatttgctaaggtttggttcagtgaaaatatgtttggaccagatttcagtttttaccaaggatacaatattccaaaatgcagcacagtggataactatcttcagtatatccagagtttgcctgcctatgacagccctgaggtgtttgggctgcaccccaatgctgacatcacctaccagagcaagctggccaaggacgtgctggacaccatcctaggcatccaacccaaggacacctctggtggaggggatgagacccgggaggcggtggtggcccggctggctgatgatatgctggagaagctgcccccagactatgtcccctttgaagtaaaagagaggctgcagaagatggggccattccagcctatgaacattttcctcaggcaggaaatagacagaatgcaaagggtactcagccttgtccgcagcaccctcactgagctgaaacttgctattgatggcaccatcatcatgagcgaaaatctgcgagatgcattggattgcatgtttgatgctagaatccctgcttggtggaaaaaagcttcttggatttctagtacactgggtttctggtttactgaacttatagaaagaaacagccagtttacctcgtgggttttcaatggccgacctcactgcttttggatgacgggtttttttaacccccagggatttttaactgcaatgcgacaggaaataactcgggccaacaaaggctgggctctggacaatatggtgctttgcaatgaagtcaccaaatggatgaaggacgacatttctgcccctcccacagagggtgtctatgtctatggcttatatcttgaaggtgctggctgggacaagaggaacatgaaactcattgaatcaaagccaaaagtgctctttgagttgatgcctgtcataaggatttatgcagaaaacaatactttacgagatcctcggttttactcctgtcccatctataagaagccagttcgaacggacttgaactacattgccgctgtggatctcaggacagcccagacccctgaacactgggtgctccgtggggttgcccttctgtgtgatgtcaagtaacatgtggggagtgtccccacccaatgctttggaaaatgcaagatctaaattattgtaacctttatttctgtatgactgctggacagtgtatgttaggtcgtttatgcaattaatgagctgcataggttttccccactccttaattggatgcttatattttacttgtttcatcattagtgaccaatgtctgagtttgttgaaaatgttatttagtgatataaaagtaaatttacagcatcctaatgaagtgtggccctcaaatccacagtagtatattttcttcttacttcgctccgaagactgactagggtaagcagacagtatttctctgggaggaattattcttctgttaacgtggcctggtaacagccaagttcttgaaggtaacagggcaagtctgtgctgattttgcttctattgcctttcgtatttaggtcaagttaagagacttattttcagggtttcaagcagccaattaaaaataccttttaaaaaatagaaggaaatagaagaatggattaagaatgtaaatagaaaatttatgtaaacatagagaataaacgtagaacaatgcttaagcctacttataattaataatgaaatactaattgataattcttataataaaaattaaagctaaaagtaaatgatagcatgctctcagtaaaactgatccactcacaaattgctggagcaatgtaaatcaacccaacctttttgtaaaatgattaaatacagaaagagccataaaaatattcacacccttggatctttgttttctctacatcaaggaaacaatttaaaagactgaaaacagtctatataaaattgcatttaataacagaaaaaaatggaaaaatcataaatattcaatagtcaggctatggttaaggaaattaagagatatttggcaaccataaaaaacaattttgaagattccataatatgaaatggtagacccagactgttaagtgaaagatttagtttacaaaatattgagcacactgtgattataacagcaaatatatttgcatgtggacaaagattagatggcaagatagaaaaataagaacagatgtgatagcaagaattatagttggcttgaaaaaatgtgatgatcaggagaaaaaataaaaaaagggtagaaatattagacggtgcgtagggactttctatggacttttattaattaggaaacattatcaaaggaacttttcacgtatttttctttaaattctggttagatgttattaataattcttcatctaacctactgactagaaaatatagtcagtactaaattagaattgtggtttataaacttttggttagctctggatctgtataactgcatttttttggataaacagtttttggtaggtggataccgggagacaagtgtgggtccctctcactgggcttcattctgtggaccaggatcattatttcatgctcatgatcatgagagttaggactgagtggctcctgtgactcccaccatcttagatgatactgttttcttgtgagttctttcttttggtgtggattagtatatcagttgatttgtgtgaattgtggtgaaacaatcatttcattttgaaaagcaagtaatgaaaatgtcaacatcataggaattaataaaatgtttttact

SEQ ID NO: 5756 - DNA, 760 bp, Homo sapiens
  source 1..760: mol_type = unassigned DNA
aaacaggttggctgctgaccagaacctgcagctgtgtagaagagatgtctctgcacaagcaccaggcaacaaagagtgttgatagtgtctgaacacttcctcacttcctatgatattgactgcagtttggaaatcaagaaggaggtggtccaatgcatgggctccttccaggatggggtggctgagaagtgtgttgattattttcagagattccgacgttctacccacgtgacgcccaaatcatacctctcctttattcagggctataagttcatatatggagaaaagcatgtggaggtgcggaccctggccaacagaatgaatactggattggaaaagctcaaagaagcttcagagtctgttgcagccttgagtaaagaactggaagcgaaagaaaaggagctacaagtggccaacgataaagccgacatggtcttaaaagaagtgacaatgaaagcacaggctgctgaaaaggtcaaggctgaggtacagaaggtgaaggacagggcccaggccattgtggacagcatctctaaagacaaagccattgctgaagaaaaactggaagcagcaaaaccagctttagaagaggcagaagctgcattgcagcaattcccaaaagacacaatcaatgaagaggtgatagaatttttgagtccttactttgaaatgcctgactataacatcgaaactgctaaacgcgtatgtggaaatgtagctggtctttgttcctggacgaaagctatggcttccttctttt

SEQ ID NO: 5757 - DNA, 676 bp, Homo sapiens
  source 1..676: mol_type = unassigned DNA
catgatccgcccgcctcggcctcccaaagtggtgggagtacaggcatgagccaccgtgcccggccaaccctattatgtttaaaggcagcttgctattctcagagatcagttcttcatttgttctccagttgtattcatcctttcccttgttcttggagggcaactagtgtcttgtttctatgtttactgttcccattgaaaccctagagcaacgtttgggtttcagaatcaagttattaaaaaaaagtgtctttccttctcaggagcaaggcggggaggtgagccaggctcacctggggcggctgttcgtgttcgcgctgctgtggagcgcgggggcggcgctggagctggacggacggcgccgcctggagctctggctgcgctctcggcccacagggacgctggagctgccgccgccagcggggcccggggacaccgccttcgactactatgtggcgcccgatggtacatggacgcactggaacacgcgtacccaggaatacctgtatccgtctgataccaccccagagtatggttctattctggtgccaaatgttgacaatgtgaggactgactttctaattcaaaccattgctaaacagggcaaggctgtgctattaattggtgaacaaggaacagccaaaacagtaataattaaaggatttatgtcaaaata

SEQ ID NO: 5758 - DNA, 2081 bp, Homo sapiens
  source 1..2081: mol_type = unassigned DNA
gtgtatgcagaaaggcgactgtcctaggagtatgaccaaccctccttcaatgctaggcttcagccacctcctcctgaaagctgtcctgtcatccccacccctaccccttatcaactccaggctagagtgggagacccttctttttgctccttctctgtagacccataaatgcccctgcatttggagacccataaatctgatgcctctgtggcaactgccatgccatctgtcatatttaaattttcagctcacatcctgccagccaggccatgagcttttttgaggttaccaggtagtgttagtctcttcagtgctgacacatattaggggtttaacaaatgtttgttgattaaaagaagggatccagaggggccacttttcctcttcccagtgggagctactggttggcattaaagcaaagactgaagggagagaaggaagccaagcgggctcttttggatgcgaggcataactacttatttgcaattgtggcttcctgtttggacctgaacaaaaccgaagtggaggatgccattcttgaagggaatcagattgaaagaattgatcaactttttgctgttggaggtctccgacacctcatgttttactatcaagatgtggaggaagcagaaacaggacaacttggctctctaggaggggtaaatcttgtttctggaaagattaaaaaacctaaggtgttcgtgaccgagggaaacgatgtggctcttactggggtatgtgtgttcttcatcaggactgacccttccaaagccatcacccctgacaacatccaccaggaggtgagttttaacatgttagatgcggcagatggaggcctgctcaacagtgtgagacgtttgctgtcggacatcttcattcctgctctcagagccacgagccatggctggggcgagctcgagggccttcaggacgcagctaacattcgccaggagttcttgagctccctggaaggctttgtgaacgtcctgtcgggtgcacaggagagtctgaaggagaaggtgaaccttcgaaagtgtgacatacttgaactgaaaaccctaaaggaacctacggactacttgactctagcaaataaccctgagactttgggaaaaatagaggattgcatgaaagtatggatcaaacagacagaacagcgtctccagccccgtgcaatggctcgtgtttttccccgcgcatttgcaggttcttgctgaaaacaatcagctgctgaaggaagcggatgacgttgggccacgagcggagctggagcactggaaaaaaagactctccaagtttaactaccttttggaacaattgaaaagcccggatgtgaaggctgtgctggcagtgcttgcggcggccaagtcgaaactgctgaagacttggcgggagatggatattcgaatcactgatgcaactaatgaagcaaaggacaatgtgaaatacttgtatacacttgaaaaatgttgtgaccctttgtacagcagtgatcccctatccatgatggatgctattcctacacttataaatgcaattaaaatgatctatagtatctctcattactataatacctctgagaagatcacatctctgtttgtaaaggtgacaaatcagattatatctgcatgtaaagcctatattaccaataatggaaccgcttccatctggaaccagccacaggatgttgttgaagaaaaaatactatctgcgattaaactgaaacaggaataccagctctgctttcacaagacaaaacaaaagcttaaacaaaatccaaatgcaaaacaatttgattttagcgagatgtatatttttggaaaattcgaaacttttcaccgacgccttgccaagataatagacatctttacaaccctcaagacgtattcagtcctgcaagattccacaattgaagggctggaagacatggccactaaataccagggcattgtggcaaccataaagaaaaaggaatacaatttcctagaccagcggaaaatggattttgaccaagattacgaagagttttgcaagcagactaatgaccttcatgtaggttgtataataaaattcctgttgac

SEQ ID NO: 5759 - DNA, 2435 bp, Homo sapiens
  source 1..2435: mol_type = unassigned DNA
gcttccgtagaggccagctggttgctacgcagcaacaggaaacattccgcgctaccgagtactttctactcccgaccaggcattgctctctctggagaccctcggcggtggttgctgtattttgacttggagtaaggatgacttttcgggccacagatagtgaatttgacctgacaaatattgaagagtatgccgaaaattctgcactttcaagactgaataatataaaagccaaacaaagagtgagttatgtgacatccacagaaaatgaatctgatacacaaatcctaacgtttaggcacattacaaaagctcaggagaagacaagaaaacgacagcagcctataaaactagagcctttgccagtgctaaaagtctaccaagatcataagcagccagaatacatacatgaacagaaccgatttcagttaatgactgcaggaatcattaaacgtccagtaagcatagcaaaaaaaagttttgccacatcatctactcagtttcttgagcatcaagatgctgtgaaaaaaatgcagattatcataaagtgcagagcagtggaagtttcattaatacaccacatgagttgcccacttatggagactctgagaaaatgacatatacagaacaggccagcaaaaggcattattgcatgaggctgacgtgctttattcgtctaaacgactatctaattgagaacacaatgcacatcttaacggtaaatgctgttaattcgcttttgaaccatctcactgacaagctaaaacgaacaccttcagcagatgtcattcagaaatggattactgaagagaagcctgaagtccctgataaaaaggggacccttatggtggaaaagcaagaagaagatgaatctctcatccccatgtttctcacagaactaatgttgacagtccagtcactgctctttgagccttctctggaagactttctggatggtattttgggtgcagttaatcactgtcaaaacactgtgttatcagttcctaatctcgtgcctgattcgtattttgatgctttcaccagcccttatattaacaacaaacttgaaggaaaaacctgtggaactgggccaagtttagcagcagtatttgaggatgataagaattttcacacaattatttctcaaataaaggaaaccattcaggccgcatttgaatcagcccgcatctatgcagctacctttgaaaagttccagatattcttcaaggaaaatgaaagtcttgatttacaagctcttaaacttcaggaacctgatattaacttttttagtgaacaactggaaaaatatcacaaacagcacaaggacgcagtagcgctcagacccaccagaaatgtaggattgctgctcattgatactaggcttctaagagaaaaattaattccatcacctttgcgatgcttagaggtgctaaattttatgcttcctcgtcaaagcaagaaaaaagtggatgccattatctttgaggcacaagatgcagagtataaacttgagtttgttccaactactaccacagaatatgttcatagcttattatttcttgatgaaattcaggaacggattgaaagccttgaagatgaggggaatatagtgactcaaatgtacaagcttatggaacaatatcaggtgcccacacctcctgaagactttgctgtttttgcaactatgaagccatccattgttgctgttcggaatgccattgataaatcagtgggtgatagagaatcaagcattaagcaattttgtgtgcatttgggtagtgatcttgaagaattaaacaacgaagtgaatgaagtaaaactgcaagcacaggtaagctaaatcattattttgtaaaaataatctatgcaaagttttactattacatttgtttattaaagtataatcaacagataaaaattgtatatatttacaatatataatgtgatgttttgatatacgtatacattgtgaaattgttaatcaagctaattaatgtgtccatcacgtcacatacatcattttttgtggtgagaataattaagactactcttcaaaccatttagagaacacatttaactgatgtagctttagttttttatagtatcattctaaccaatcaacaatgtctttgagctgctacttaaaaattaatgtttcaaaatctctgtttaagtagtgaatacatttcagactatcacaaagcatatatgtaatattaaaattgaatttagccaattaaattctagtcctaacttgtatttattattttgaagagtgttttaatgacttgctagcacattttacagctattgtcacaattttaaagtttgcttaatacctgggtgatgaaataattcatacaacaaacccccatgacacaagtttacctgtataacaaacctgcacatgtatccctgaacttaaaataaaagct

SEQ ID NO: 5760 - DNA, 551 bp, Homo sapiens
  source 1..551: mol_type = unassigned DNA
ttgctctctctggagaccctcggcggtggttgctgtattttgacttggagtaaggatgacttttcgggccacagatagtgaatttgacctgacaaatattgaagagtatgccgaaaattctgcactttcaagactgaataatataaaagccaaacaaagagtgagttatgtgacatccacagaaaatgaatctgatacacaaatcctaacgtttaggcacattacaaaagctcaggagaagacaagaaaacgacagcagcctataaaactagagcctttgccagtgctaaaagtctaccaagatcataagcagccagaatacatacatgaacagaaccgatttcagttaatgactgcaggaatcattaaacgtccagtaagcatagcaaaaaaaagttttgccacatcatctactcagtttcttgagcatcaagatgctgtgaaaaaaatgcagagttgtaagttatgagaacatcaataaaaatgactactatactattagccaaagggcagtaacacacatttataatgaagacattgaatttatcgaa

SEQ ID NO: 5761 - DNA, 12666 bp, Homo sapiens
  source 1..12666: mol_type = unassigned DNA
gagtaaggatgacttttcgggccacagatagtgaatttgacctgacaaatattgaagagtatgccgaaaattctgcactttcaagactgaataatataaaagccaaacaaagagtgagttatgtgacatccacagaaaatgaatctgatacacaaatcctaacgtttaggcacattacaaaagctcaggagaagacaagaaaacgacagcagcctataaaactagagcctttgccagtgctaaaagtctaccaagatcataagcagccagaatacatacatgaacagaaccgatttcagttaatgactgcaggaatcattaaacgtccagtaagcatagcaaaaaaaagttttgccacatcatctactcagtttcttgagcatcaagatgctgtgaaaaaaatgcagattcatcggccctatgttgaggtgttctctccctctcctcctaaactgccacatactggtattggaaaaagaggtctctttgggactagatcttcagcttaccctaagtacacttttcacgaccgagaagaagttgttaaagccaacattcgtgatcccttgcaaatcattaaaataatacgtgaaaatgaacatcttggatttctttatatgatccctgcagtgccaagatcatccattgaatatgatacatataatctaaaagttgtaagttatgagaacatcaataaaaatgactactatactattagccaaagggcagtaacacacatttataatgaagacattgaatttatcgaaattgatcgatgggaacaggaatatctgtatcacagagaactcactaagattcccatattttcactgttccggaaatggaaggcttttagtgtatggaggaagaatgtccgctccaagaaaatcactggatgtcaaaaatctctacaaaaaaatttgttcattgttaatcctcatttgcgaccagctcttcttaaaataaatgaattgtgttatcatttgagttttatgggactttgttatattgaaaagtgtcacacctacaccctgcaggaatttaaggccgcacaagtcatacggctagcagaggtgacagaacgcctaggagaatttcgaaatgaggcaaaatatgtagtcaggagggcttgtcgatttgctttgcgtgctgcaggatttgttcctgatgactgtgcatttggaccttttgaggattatcataaagtgcagagcagtggaagtttcattaatacaccacatgagttgcccacttatggagactctgagaaaatgacatatacagaacaggccagcaaaaggcattattgcatgaggctgacgtgctttattcgtctaaacgactatctaattgagaacacaatgcacatcttaacggtaaatgctgttaattcgcttttgaaccatctcactgacaagctaaaacgaacaccttcagcagatgtcattcagaaatggattactgaagagaagcctgaagtccctgataaaaaggggacccttatggtggaaaagcaagaagaagatgaatctctcatccccatgtttctcacagaactaatgttgacagtccagtcactgctctttgagccttctctggaagactttctggatggtattttgggtgcagttaatcactgtcaaaacactgtgttatcagttcctaatctcgtgcctgattcgtattttgatgctttcaccagcccttatattaacaacaaacttgaaggaaaaacctgtggaactgggccaagtttagcagcagtatttgaggatgataagaattttcacacaattatttctcaaataaaggaaaccattcaggccgcatttgaatcagcccgcatctatgcagctacctttgaaaagttccagatattcttcaaggaaaatgaaagtcttgatttacaagctcttaaacttcaggaacctgatattaacttttttagtgaacaactggaaaaatatcacaaacagcacaaggacgcagtagcgctcagacccaccagaaatgtaggattgctgctcattgatactaggcttctaagagaaaaattaattccatcacctttgcgatgcttagaggtgctaaattttatgcttcctcgtcaaagcaagaaaaaagtggatgccattatctttgaggcacaagatgcagagtataaacttgagtttgttccaactactaccacagaatatgttcatagcttattatttcttgatgaaattcaggaacggattgaaagccttgaagatgaggggaatatagtgactcaaatgtacaagcttatggaacaatatcaggtgcccacacctcctgaagactttgctgtttttgcaactatgaagccatccattgttgctgttcggaatgccattgataaatcagtgggtgatagagaatcaagcattaagcaattttgtgtgcatttgggtagtgatcttgaagaattaaacaacgaagtgaatgaagtaaaactgcaagcacaggatccacagattttagatatctctgctgaccaagacaaaataaggctcatattgaataatctgcaatctgttctggctgatcttcagaaacgtgcatttcagtataagtcctatcagaagaattttaaggtagaagtgtccaagtttgaagctttggaagaagtcagtgctgaactgaagctcaaacaattgctctgggattctttctctgaatgggataaactccaacaagaatggttaaagtccaaatttgattgcctggatccagaagtcctaaacggtcaagtttctaaatatgctaaatttgtgactcaactggaaaaaggcttgccacccaacagtgtagtgccccagctcaaatacaaggtggaaaaaatgaaagaaaagcttccagttatcattgacttgaggaacccgactttgaaggcaagacattgggcagctattgaacaaacagttgatgccactctagtggatgctgaaattccattaaccttggagaggctctcccagttgcatgtttttgactttggtcaagaaatccaggacatatctggacaggcttctggagaagctgccttagaagcaattcttaaaaaggtggaggactcttggaaaacaactgaatttgtcattctgcctcaccgtgactccaaagatgtgtttatactgggcggcacagatgacatacaggtccttcttgatgatagcaccatcaatgttgcaactcttgcctcatcacgttaccttggtccactgaaaactcgagtggatgaatggcaaaaacaacttgctttatttaatcaaacactggaagagtggctgacctgccagagaaactggctctacctagaaagtattttcaatgctccagacattcagaggcaattgcctgcagaggccaagatgttccttcaggtggataagtcatggaaagaaatcatgagaaaggtgaatcggctgcctaatgctcttcgagccgctactcagccaggacttctggaaacttttcaaaacaataatgcattacttgaccaaattcagaagtgcctagaggcatacttagaatcaaaaagagttatctttccaaggttttacttcttgtcaaatgatgaacttctggagattttggcccagacacgaaatccacaggccgtgcagccacacttaaggaaatgcttcgactccatttcaaagctcgaatttgctctcatgcctcctgccgaaggaaagattcctggtattgatggagaaccagaaaaggtttatactaatgatattttagcaatgctgtcaccagagggagaaagggttagcttggggaaaggcctcaaggcccgaggcaatgtagaggaatggcttggtaaagtggaagaagccatgttcacatctctgcgtcgcctgtgcaaagctgccatcgctgactatcaggggaaactgaggacagactgggtggttgctggccacccttctcaagttatcctgactgtttctcaaattatgtggtgccgtgatttgactgaatgtctggaaacagaacacagtaatcatatacaggccctgaagaattttgaaaaagtaaattttgagagattaaatgccctagctgcaatagttcaaggcagtcttcctaaattacacagaaacatcctaactgcattgattactattgatgtgcatgcaagagatatagtcactgaacttgttcaatccaaggtggagacagttgaatcttttgactggcagagacaactgcgctattactgggatatagacctggataattgtgtggctagaatggcgctctctcagtacacttatggctatgaatatttgggtgcatgcccaagattggttattactccactcacagatcgctgctatctttgcctcatgggagctttgcagcttgaccttgggggtgcaccagctggtcctgctggcactgggaaaacagagactaccaaagatctggcaaaagctcttgccatccagtgtgtggtctttaactgttcagatggtttggactacaagatgatggggcgcttcttcagtggcttggcacagtcaggggcctggtgctgctttgatgaatttaatcgaattgacatagaagttctgtccgtcatcgcgcagcaactcattaccattaggaacgccaaagcggcaaagctctctagattcatgtttgaggggcgggaaataaagttggtgatgacttgtgcagccttcatcacaatgaatcctggctatgcagggagaactgaattgccagataatttgaaagccctgtttagaccatttgcgatgatggttccaaattatgccttgattgcagaggtaattctatattctgaaggatttgaatccagtaaaatattagcaagaaaaatgactcagatgtataagctttgcagtgagcagctgtctcagcaggatcactacgactttggcatgagagctgtgaagtctgtcctggtcatggctggatctttaaaaagagaaaacccagacctaaatgaagatgtggtgttgataagagctttacaagactccaatttgccaaaatttctaacagatgatgctcttctgttcagtggaatcatatctgacctttttcctggagtccaaattccagaacatgattatggtattttacaatcaacaattgtggatgtcatgaatagacaaaatcttcagcctgagatgtgtatggttagaaaggtgatacagttttatgaaactatgctagtaaggcatggtgttatgttagtcgggccaacaggaggcggcaagaccacagtttaccgaatactagcagaaactttagggaatttacaaaaacttgggatagaaaattccttttaccaagcagttaaaacatatgttctcaaccctaaatcaattaccatgggtgaattatatggagaggttaataacttaaccttggaatggaaagatggtttgatggcactaagtgtccgagcagctgtgaatgatacttcagaagaccataaatggatcatcagtgatgggccagtagatgctctttggattgaaaacatgaatacagtgctggatgataacaagatgctttgcctggctaacagtgagaggattaaactcacacctcaaattcacatgctttttgaggtgcaagatctgcgggttgcctcccctgcaacagtcagtcgatgtggaatggtgtttgtggatcctgaagaactgaaatggatgccttatgttaaaacttggatgaagggtatttctaaaaaactgactgaggaaacccaagaatatatattgaatcttttccaacgttatgttgatgaaggtttacattttatcaataaaaagtgcagccaagcaattccacaagtggacatcagcaaagttactacactctgttgcttattggagtccttgatacttgggaaagatggagttaacttggcaatggaacaaacaaaattgaacactatactatgtcagacttttgtattctgttatttgtggtctttgggtggaaacctaactgaaaactactatgattcttttgatacatttattagaacacaatttgatgataatcctgatgccaggcttcccaattctggtgatctgtggagcattcatatggactttgacaccaaacggctggatccctgggaacgaatcatacctactttcaaatacaaccgagatgttccattttttgaaatgcttgtccccacaactgacacagtgcgctatgggtatctaatggaaaaactactggcagtcaagcattccgtgttgtttactggaataactggagtgggcaagtctgtgattgcaaaaggattgctaaataaaattcaagaatcagctggctatgtccctgtttatctaaatttttctgctcaaacttcatctgcaaggacacaagagatcattgagtcaaaactggagagaaaaagaaaaaatattctaggagcaccgggaaacaaacgaattgtgatttttgttgatgatttaaacatgcccagactggatcgctatggctctcagcctccgattgaattacttcggcagtatcaagattttgggggattttatgacagaaacaaactgttttggaaagaaatacaggatgtaacaatcatatcggcatgtgcacctccaggcggtggccgcaaccctgtgactccccgcttcatcagacacttcagcatgctgtgcctcccaatgccctcagagcacagtctgaaacagatttttcaggccatcttaaatggtttcctgagtgactttccaccagctgtaaagcaaactgcatcaagcattgtagaagcctcagttgagatttataacaaaatgagtgttgacctcctgccaacacccgccaagtcccattatgtctttaacttgagggacttatccaaatgtgtgcaaggtatcctccaatgtgatccaggaacaataagagaagaaattcagatatttagactcttttgccatgagtgccaaagggtcttccatgatcgcttgattaataatgaagataagcactatttccatgttattctgacagaaatggccaacaaacattttggaattgcaattgacctggaatattttttgaataagcccatcatatttggagatttcattaagtttggagcagataaagctgatcggatttatgatgacatgcctgatatagagaaaactgcaaatgttctacaggactatcttgatgattataatctcacaaatcccaaagaagtaaagttggtgttcttccaggatgctatagaacatgtttcaaggattgctcggatgatacgtcaagaaagaggcaatgccctgcttgttggagtaggaggcacaggaaagcagtcactcacgagacttgcagctcatatatgcggttacaaatgtttgcagattgaactcagccggggatataattatgatagttttcatgaagacctgaggaagttgtacaaaatggctggtgtagaagacaagaatatggttttccttttcactgacacccagattgtagtggaggagttcctagaagatataaataacatcctgaactcaggtgaagtgcctaatttatttgaaaaggatgaactggagcaggttttagcggccaccagaccaagagcaaaagaagtaggaatttctgaggggaacagagacgaggtgtttcaatactttatcagcaaagtgcgtcagaagctgcacattgttctctgcatgagcccagttggggaggcctttcggtcccgatgcaggatgtttccatcccttgtgaattgctgcaccattgactggtttgtgcagtggcccagagaagcacttctttctgtgtcaaagacatttttctcacaagtcgatgctggaaatgaagaactgaaagaaaagcttcccttgatgtgcgtgaacgttcacttgagtgtctccagcatggcagagcgctattacaatgagctgcgcaggcggtactacacgacacccacctcctacctggagcttatcaatctttacctgtctatgctgtctgaaaaaaggaagcagattatttcagcacgagatcgggtgaagaatggtctcaccaagctactagaaacaaacatactagtagataaaatgaaactagatctttcagctttagagcctgtacttttagcaaaatcagaagatgttgaagccctgatggaaaaattggcagtggatcaagaaagtgccgatcaggtccgtaacactgtgcaggaggatgaagcaacagcaaaagtcaaagctgaagaaacccaagcaatagctgatgatgctcaaagagatcttgacgaggcactacctgcactagatgctgccaataaagcactggattccttagataaggcagatatatctgaaatcagagtttttacaaagcccccagatttggtcatgacagtaatggaagcaatctccattcttttgaatgccaagcctgattggccatcagcaaagcaacttcttggtgactctaactttctaaaaaggcttttagaatatgataaggagaacataaagcctcagatattggcaaagcttcaaaagtatattaataatcctgattttgtgcctgaaaaagtggagaaagtgtccaaagcatgtaaatctatgtgcatgtgggtaagagctatggatttgtactctcgagtggtcaaggtcgtcgaaccaaaaagacaaaagctccgcgccgcacaggctgaacttgacattaccatggctaccctgagagaaaagcaagcattactaagacaagtagaagatcaaatacaggccttacaagatgaatatgacaaaggtgtaaatgaaaaagaaagcctggcaaagaccatggccctgacaaaagcacgtctagtacgtgctggaaagctgacagcagcattagaagatgagcaggttcgatgggaagaaagcatacagaagtttgaggaagaaatatcaaatatcactgggaacgtgttcatagcagcagcttgtgtggcctactatggggctttcacagcccagtacaggcagtcacttatagagtgttggatccaggactgtcagtctctggagatcccaatcgatccttccttcagtctcattaacattcttggagatccctacgagatacggcagtggaacactgatgggctgccccgtgacttgatatcaacagaaaatggcattttggttactcaaggcagaagatggcctttgatgattgatccccaagatcaggcaaaccgttggataaggaacaaggaaagcaaaagtggtttaaagatcattaagcttacagatagtaatttcttacgaatactcgagaattcaatccgacttggtttacctgtcttactggaagagcttaaggaaaccttggatccagctctagaacccattcttttgaaacaaatttttatcagtggtggccgactactcatccgtcttggagactcagacattgattatgacaaaaactttaggttctatatgacaaccaaaatgccaaatccccactatctgcctgaggtatgcattaaagttaccattatcaatttcactgtaacaaaatcaggcctggaggatcagttgttaagtgatgtggtgcgacttgaaaaacccaggttggaagaacaaagaattaagctcatcgtgaggatcaacactgataaaaaccagttgaaaactatcgaagagaaaatcctgagaatgctctttacctctgaaggaaatattctggacaatgaagaacttattgacacactccaggattcaaagatcacttctggtgccattaaaaccaggctggaagaagcagagtccactgagcagatgatcaatgtggctcgtgagaagtatcgtccagtggccactcaaggctctgtaatgtactttgtcattgcaagcctctcagaaatagatcctatgtaccagtactcattaaaatactttaaacagttgttcaataccaccattgaaacttctgtaaagacagaaaatctacaacagcgcctggacgtactactagaacaaactctcctaactgcttatgtcaatgtttcaagaggactttttgagcaacataaactcatctacagctttatgctttgtgttgagatgatgcgtcagcaaggaaccctatctgatgctgaatggaatttctttctccgaggttctgcaggattggaaaaggaacgcccacctaagcctgaagctccctggctacctactgctacatggttcgcatgctgtgacttggaagaatcatttccagtttttcacggacttacccaaaatatattgtcacatcctatttccatacgcttaggatcttttgagacttatattaacccacagaaatgggaaggctattctaaaatgaaacacgaagataaacacatgagacaggaaaaggaggcagcacaccaagatccatggagtgcaggattgagttctttccataagctaattcttattaaatgttgtaaagaagaaaaggtggtttttgctcttacagactttgtgatagaaaatcttggaaaacagtttatagagacaccacctgtggacctgcctaccctgtatcaagacatgtcatgcaacactcccctggtattcatcctaagcacaggctcagatcccatgggtgcatttcagaggtttgccagggaaagtggatattcagaacgggtgcagtcaatttcactggggcaaggacaaggacctattgctgaaaaaatggtcaaggatgcaatgaaatcaggaaactgggtatttttgcaaaattgccatcttgctgtttcttggatgttggcaatggaagagctcattaaaaccttcacagatccagatagtgctatcaaggacacttttcgactttttttaagctccatgcctagtaatacatttcctgttacagttcttcaaaattctgtcaaggtgaccaatgagcctccaaaaggcttacgtgcaaatatcagacgagcatttactgaaatgacaccttcgttttttgaagaaaatatacttggaaaaaaatggagacaaataatatttggcatttgtttcttccatgcaattattcaggagagaaagaagtttggcccccttggttggaatatctgctatgaatttaatgacagtgacagggaatgtgctttactgaatctcaaactctattgtaaagaaggaaagattccctgggatgcactaatttacattactggtgaaattacttatggtggtagagtcacagacagctgggaccaaagatgccttcgtactatcttgaaaagatttttttctcctgaaacattagaagaagattataaatactctgaatcaggcatctattttgcacccatggctgacagcctacaagagtttaaggactacattgaaaatctgcctttgatcgatgacccagaaatttttggaatgcatgaaaatgctaatctagtcttccagtacaaagagaccagcactttaatcaacaccatacttgaggttcagccaaggtcatctactggtggagagggaaaaagcaatgacgaaattgttcaagaacttgttgcttctgtccagaccagagttccagaaaaactggaaatggagggtgcttctgagagcctttttgtcaaggatcttcaaggacgtctgaactccttgaccaccgttcttggacaggaagtggaccggtttaacaacctgctgaagttaattcatacttctctggaaacactcaacaaagccatcgctggatttgtggtgatgtctgaagaaatggaaaaagtgtataacagtttcctcaacaaccaggttcccgctctgtggtccaacacagcctacccatccctgaagccactaggatcatgggtcaaagaccttatcctgaggacctcatttgtggatctgtggctcaaaagaggacagcctaagtcctactggatctctggtttcttctttcctcaaggatttctaacaggaactcttcaaaatcatgctcgaaaatacaatttgcctatagatgagctgagtttcaaatacagcgtaattcccacctatcgggatcaagctgcagtgatagaagctgccaagacagtgcaatttggacaagaactgcccatggacatggagttgccctctcctgaggatggtgttcttgttcatgggatgttcatggatgcttctcgatgggatgataaggagatggtgatagaagatgcattgcccggacagatgaatccagtgctgcctgtggtgcattttgaaccacaacaaaactataagccaagcccaacactttaccactgcccactttataaaacaggagcccgggcaggaacactctcaaccacaggacattcaaccaattttgtggtaaccgtcctgttaccctccaagcggtccaaagactactggattgccaagggatcagctttgctctgccagctgagcgaatgaaaaggtgccacctcagccctgaaaaagaaccaggccagagatctttcctaatgggagcaaaaggtttgaataatttatatgtgagcaaaacggtgttaattctgatttgacttaaacgtattgtgacttttatttctcttatgaccttaaaataaagtgtttgagttctttctgttggcaa

SEQ ID NO: 5762 - DNA, 2065 bp, Homo sapiens
  source 1..2065: mol_type = unassigned DNA
aaggatgacttttcgggccacagatagtgaatttgacctgacaaatattgaagagtatgccgaaaattctgcactttcaagactgaataatataaaagccaaacaaagagtgagttatgtgacatccacagaaaatgaatctgatacacaaatcctaacgtttaggcacattacaaaagctcaggagaagacaagaaaacgacagcagcctataaaactagagcctttgattatcataaagtgcagagcagtggaagtttcattaatacaccacatgagttgcccacttatggagactctgagaaaatgacatatacagaacaggccagcaaaaggcattattgcatgaggctgacgtgctttattcgtctaaacgactatctaattgagaacacaatgcacatcttaacggtaaatgctgttaattcgcttttgaaccatctcactgacaagctaaaacgaacaccttcagcagatgtcattcagaaatggattactgaagagaagcctgaagtccctgataaaaaggggacccttatggtggaaaagcaagaagaagatgaatctctcatccccatgtttctcacagaactaatgttgacagtccagtcactgctctttgagccttctctggaagactttctggatggtattttgggtgcagttaatcactgtcaaaacactgtgttatcagttcctaatctcgtgcctgattcgtattttgatgctttcaccagcccttatattaacaacaaacttgaaggaaaaacctgtggaactgggccaagtttagcagcagtatttgaggatgataagaattttcacacaattatttctcaaataaaggaaaccattcaggccgcatttgaatcagcccgcatctatgcagctacctttgaaaagttccagatattcttcaaggaaaatgaaagtcttgatttacaagctcttaaacttcaggaacctgatattaacttttttagtgaacaactggaaaaatatcacaaacagcacaaggacgcagtagcgctcagacccaccagaaatgtaggattgctgctcattgatactaggcttctaagagaaaaattaattccatcacctttgcgatgcttagaggtgctaaattttatgcttcctcgtcaaagcaagaaaaaagtggatgccattatctttgaggcacaagatgcagagtataaacttgagtttgttccaactactaccacagaatatgttcatagcttattatttcttgatgaaattcaggaacggattgaaagccttgaagatgaggggaatatagtgactcaaatgtacaagcttatggaacaatatcaggtgcccacacctcctgaagactttgctgtttttgcaactatgaagccatccattgttgctgttcggaatgccattgataaatcagtgggtgatagagaatcaagcattaagcaattttgtgtgcatttgggtagtgatcttgaagaattaaacaacgaagtgaatgaagtaaaactgcaagcacaggtaagctaaatcattattttgtaaaaataatctatgcaaagttttactattacatttgtttattaaagtataatcaacagataaaaattgtatatatttacaatatataatgtgatgttttgatatacgtatacattgtgaaattgttaatcaagctaattaatgtgtccatcacgtcacatacatcattttttgtggtgagaataattaagactactcttcaaaccatttagagaacacatttaactgatgtagctttagttttttatagtatcattctaaccaatcaacaatgtctttgagctgctacttaaaaattaatgtttcaaaatctctgtttaagtagtgaatacatttcagactatcacaaagcatatatgtaatattaaaattgaatttagccaattaaattctagtcctaacttgtatttattattttgaagagtgttttaatgacttgctagcacattttacagctattgtcacaattttaaagtttgcttaatacctgggtgatgaaataattcatacaacaaacccc

SEQ ID NO: 5763 - DNA, 1873 bp, Homo sapiens
  source 1..1873: mol_type = unassigned DNA
caagaatatatattgaatcttttccaacgttatgttgatgaaggtttacattttatcaataaaaagtgcagccaagcaattccacaagtggacatcagcaaagttactacactctgttgcttattggagtccttgatacttgggaaagatggagttaacttggcaatggaacaaacaaaattgaacactatactatgtcagacttttgtattctgttatttgtggtctttgggtggaaacctaactgaaaactactatgattcttttgatacatttattagaacacaatttgatgataatcctgatgccaggcttcccaattctggtgatctgtggagcattcatatggactttgacaccaaacggctggatccctgggaacgaatcatacctactttcaaatacaaccgagatgttccattttttgaaatgcttgtccccacaactgacacagtgcgctatgggtatctaatggaaaaactactggcagtcaagcattccgtgttgtttactggaataactggagtgggcaagtctgtgattgcaaaaggattgctaaataaaattcaagaatcagctggctatgtccctgtttatctaaatttttctgctcaaacttcatctgcaaggacacaagagatcattgagtcaaaactggagagaaaaagaaaaaatattctaggagcaccgggaaacaaacgaattgtgatttttgttgatgatttaaacatgcccagactggatcgctatggctctcagcctccgattgaattacttcggcagtatcaagattttgggggattttatgacagaaacaaactgttttggaaagaaatacaggatgtaacaatcatatcggcatgtgcacctccaggcggtggccgcaaccctgtgactccccgcttcatcagacacttcagcatgctgtgcctcccaatgccctcagagcacagtctgaaacagatttttcaggccatcttaaatggtttcctgagtgactttccaccagctgtaaagcaaactgcatcaagcattgtagaagcctcagttgagatttataacaaaatgagtgttgacctcctgccaacacccgccaagtcccattatgtctttaacttgagggacttatccaaatgtgtgcaagacaaacattttggaattgcaattgacctggaatattttttgaataagcccatcatatttggagatttcattaagtttggagcagataaagctgatcggatttatgatgacatgcctgatatagagaaaactgcaaatgttctacaggactatcttgatgattataatctcacaaatcccaaagaagtaaagttggtgttcttccaggatgctatagaacatgtttcaaggattgctcggatgatacgtcaagaaagaggcaatgccctgcttgttggagtaggaggcacaggaaagcagtcactcacgagacttgcagctcatatatgcggttacaaatgtttgcagattgaactcagccggggatataattatgatagttttcatgaagacctgaggaagttgtacaaaatggctggtgtagaagacaagaatatggttttccttttcactgacacccagattgtagtggaggagttcctagaagatataaataacatcctgaactcaggtgaagtgcctaatttatttgaaaaggatgaactggagcaggttttagcggccaccagaccaagagcaaaagaagtaggaatttctgaggggaacagagacgaggtaggatgtgccagagtagttatgtggctttatcacaaaaacgtttcttcaccttttatttaaccattcattgattgcctgaaggggtccatgaataaaatttttttcaatataa

SEQ ID NO: 5764 - DNA, 12795 bp, Homo sapiens
  source 1..12795: mol_type = unassigned DNA
gcttccgtagaggccagctggttgctacgcagcaacaggaaacattccgcgctaccgagtactttctactcccgaccaggcattgctctctctggagaccctcggcggtggttgctgtattttgacttggagtaaggatgacttttcgggccacagatagtgaatttgacctgacaaatattgaagagtatgccgaaaattctgcactttcaagactgaataatataaaagccaaacaaagagtgagttatgtgacatccacagaaaatgaatctgatacacaaatcctaacgtttaggcacattacaaaagctcaggagaagacaagaaaacgacagcagcctataaaactagagcctttgccagtgctaaaagtctaccaagatcataagcagccagaatacatacatgaacagaaccgatttcagttaatgactgcaggaatcattaaacgtccagtaagcatagcaaaaaaaagttttgccacatcatctactcagtttcttgagcatcaagatgctgtgaaaaaaatgcagattcatcggccctatgttgaggtgttctctccctctcctcctaaactgccacatactggtattggaaaaagaggtctctttgggactagatcttcagcttaccctaagtacacttttcacgaccgagaagaagttgttaaagccaacattcgtgatcccttgcaaatcattaaaataatacgtgaaaatgaacatcttggatttctttatatgatccctgcagtgccaagatcatccattgaatatgatacatataatctaaaagttgtaagttatgagaacatcaataaaaatgactactatactattagccaaagggcagtaacacacatttataatgaagacattgaatttatcgaaattgatcgatgggaacaggaatatctgtatcacagagaactcactaagattcccatattttcactgttccggaaatggaaggcttttagtgtatggaggaagaatgtccgctccaagaaaatcactggatgtcaaaaatctctacaaaaaaatttgttcattgttaatcctcatttgcgaccagctcttcttaaaataaatgaattgtgttatcatttgagttttatgggactttgttatattgaaaagtgtcacacctacaccctgcaggaatttaaggccgcacaagtcatacggctagcagaggtgacagaacgcctaggagaatttcgaaatgaggcaaaatatgtagtcaggagggcttgtcgatttgctttgcgtgctgcaggatttgttcctgatgactgtgcatttggaccttttgaggattatcataaagtgcagagcagtggaagtttcattaatacaccacatgagttgcccacttatggagactctgagaaaatgacatatacagaacaggccagcaaaaggcattattgcatgaggctgacgtgctttattcgtctaaacgactatctaattgagaacacaatgcacatcttaacggtaaatgctgttaattcgcttttgaaccatctcactgacaagctaaaacgaacaccttcagcagatgtcattcagaaatggattactgaagagaagcctgaagtccctgataaaaaggggacccttatggtggaaaagcaagaagaagatgaatctctcatccccatgtttctcacagaactaatgttgacagtccagtcactgctctttgagccttctctggaagactttctggatggtattttgggtgcagttaatcactgtcaaaacactgtgttatcagttcctaatctcgtgcctgattcgtattttgatgctttcaccagcccttatattaacaacaaacttgaaggaaaaacctgtggaactgggccaagtttagcagcagtatttgaggatgataagaattttcacacaattatttctcaaataaaggaaaccattcaggccgcatttgaatcagcccgcatctatgcagctacctttgaaaagttccagatattcttcaaggaaaatgaaagtcttgatttacaagctcttaaacttcaggaacctgatattaacttttttagtgaacaactggaaaaatatcacaaacagcacaaggacgcagtagcgctcagacccaccagaaatgtaggattgctgctcattgatactaggcttctaagagaaaaattaattccatcacctttgcgatgcttagaggtgctaaattttatgcttcctcgtcaaagcaagaaaaaagtggatgccattatctttgaggcacaagatgcagagtataaacttgagtttgttccaactactaccacagaatatgttcatagcttattatttcttgatgaaattcaggaacggattgaaagccttgaagatgaggggaatatagtgactcaaatgtacaagcttatggaacaatatcaggtgcccacacctcctgaagactttgctgtttttgcaactatgaagccatccattgttgctgttcggaatgccattgataaatcagtgggtgatagagaatcaagcattaagcaattttgtgtgcatttgggtagtgatcttgaagaattaaacaacgaagtgaatgaagtaaaactgcaagcacaggatccacagattttagatatctctgctgaccaagacaaaataaggctcatattgaataatctgcaatctgttctggctgatcttcagaaacgtgcatttcagtataagtcctatcagaagaattttaaggtagaagtgtccaagtttgaagctttggaagaagtcagtgctgaactgaagctcaaacaattgctctgggattctttctctgaatgggataaactccaacaagaatggttaaagtccaaatttgattgcctggatccagaagtcctaaacggtcaagtttctaaatatgctaaatttgtgactcaactggaaaaaggcttgccacccaacagtgtagtgccccagctcaaatacaaggtggaaaaaatgaaagaaaagcttccagttatcattgacttgaggaacccgactttgaaggcaagacattgggcagctattgaacaaacagttgatgccactctagtggatgctgaaattccattaaccttggagaggctctcccagttgcatgtttttgactttggtcaagaaatccaggacatatctggacaggcttctggagaagctgccttagaagcaattcttaaaaaggtggaggactcttggaaaacaactgaatttgtcattctgcctcaccgtgactccaaagatgtgtttatactgggcggcacagatgacatacaggtccttcttgatgatagcaccatcaatgttgcaactcttgcctcatcacgttaccttggtccactgaaaactcgagtggatgaatggcaaaaacaacttgctttatttaatcaaacactggaagagtggctgacctgccagagaaactggctctacctagaaagtattttcaatgctccagacattcagaggcaattgcctgcagaggccaagatgttccttcaggtggataagtcatggaaagaaatcatgagaaaggtgaatcggctgcctaatgctcttcgagccgctactcagccaggacttctggaaacttttcaaaacaataatgcattacttgaccaaattcagaagtgcctagaggcatacttagaatcaaaaagagttatctttccaaggttttacttcttgtcaaatgatgaacttctggagattttggcccagacacgaaatccacaggccgtgcagccacacttaaggaaatgcttcgactccatttcaaagctcgaatttgctctcatgcctcctgccgaaggaaagattcctggtattgatggagaaccagaaaaggtttatactaatgatattttagcaatgctgtcaccagagggagaaagggttagcttggggaaaggcctcaaggcccgaggcaatgtagaggaatggcttggtaaagtggaagaagccatgttcacatctctgcgtcgcctgtgcaaagctgccatcgctgactatcaggggaaactgaggacagactgggtggttgctggccacccttctcaagttatcctgactgtttctcaaattatgtggtgccgtgatttgactgaatgtctggaaacagaacacagtaatcatatacaggccctgaagaattttgaaaaagtaaattttgagagattaaatgccctagctgcaatagttcaaggcagtcttcctaaattacacagaaacatcctaactgcattgattactattgatgtgcatgcaagagatatagtcactgaacttgttcaatccaaggtggagacagttgaatcttttgactggcagagacaactgcgctattactgggatatagacctggataattgtgtggctagaatggcgctctctcagtacacttatggctatgaatatttgggtgcatgcccaagattggttattactccactcacagatcgctgctatctttgcctcatgggagctttgcagcttgaccttgggggtgcaccagctggtcctgctggcactgggaaaacagagactaccaaagatctggcaaaagctcttgccatccagtgtgtggtctttaactgttcagatggtttggactacaagatgatggggcgcttcttcagtggcttggcacagtcaggggcctggtgctgctttgatgaatttaatcgaattgacatagaagttctgtccgtcatcgcgcagcaactcattaccattaggaacgccaaagcggcaaagctctctagattcatgtttgaggggcgggaaataaagttggtgatgacttgtgcagccttcatcacaatgaatcctggctatgcagggagaactgaattgccagataatttgaaagccctgtttagaccatttgcgatgatggttccaaattatgccttgattgcagaggtaattctatattctgaaggatttgaatccagtaaaatattagcaagaaaaatgactcagatgtataagctttgcagtgagcagctgtctcagcaggatcactacgactttggcatgagagctgtgaagtctgtcctggtcatggctggatctttaaaaagagaaaacccagacctaaatgaagatgtggtgttgataagagctttacaagactccaatttgccaaaatttctaacagatgatgctcttctgttcagtggaatcatatctgacctttttcctggagtccaaattccagaacatgattatggtattttacaatcaacaattgtggatgtcatgaatagacaaaatcttcagcctgagatgtgtatggttagaaaggtgatacagttttatgaaactatgctagtaaggcatggtgttatgttagtcgggccaacaggaggcggcaagaccacagtttaccgaatactagcagaaactttagggaatttacaaaaacttgggatagaaaattccttttaccaagcagttaaaacatatgttctcaaccctaaatcaattaccatgggtgaattatatggagaggttaataacttaaccttggaatggaaagatggtttgatggcactaagtgtccgagcagctgtgaatgatacttcagaagaccataaatggatcatcagtgatgggccagtagatgctctttggattgaaaacatgaatacagtgctggatgataacaagatgctttgcctggctaacagtgagaggattaaactcacacctcaaattcacatgctttttgaggtgcaagatctgcgggttgcctcccctgcaacagtcagtcgatgtggaatggtgtttgtggatcctgaagaactgaaatggatgccttatgttaaaacttggatgaagggtatttctaaaaaactgactgaggaaacccaagaatatatattgaatcttttccaacgttatgttgatgaaggtttacattttatcaataaaaagtgcagccaagcaattccacaagtggacatcagcaaagttactacactctgttgcttattggagtccttgatacttgggaaagatggagttaacttggcaatggaacaaacaaaattgaacactatactatgtcagacttttgtattctgttatttgtggtctttgggtggaaacctaactgaaaactactatgattcttttgatacatttattagaacacaatttgatgataatcctgatgccaggcttcccaattctggtgatctgtggagcattcatatggactttgacaccaaacggctggatccctgggaacgaatcatacctactttcaaatacaaccgagatgttccattttttgaaatgcttgtccccacaactgacacagtgcgctatgggtatctaatggaaaaactactggcagtcaagcattccgtgttgtttactggaataactggagtgggcaagtctgtgattgcaaaaggattgctaaataaaattcaagaatcagctggctatgtccctgtttatctaaatttttctgctcaaacttcatctgcaaggacacaagagatcattgagtcaaaactggagagaaaaagaaaaaatattctaggagcaccgggaaacaaacgaattgtgatttttgttgatgatttaaacatgcccagactggatcgctatggctctcagcctccgattgaattacttcggcagtatcaagattttgggggattttatgacagaaacaaactgttttggaaagaaatacaggatgtaacaatcatatcggcatgtgcacctccaggcggtggccgcaaccctgtgactccccgcttcatcagacacttcagcatgctgtgcctcccaatgccctcagagcacagtctgaaacagatttttcaggccatcttaaatggtttcctgagtgactttccaccagctgtaaagcaaactgcatcaagcattgtagaagcctcagttgagatttataacaaaatgagtgttgacctcctgccaacacccgccaagtcccattatgtctttaacttgagggacttatccaaatgtgtgcaaggtatcctccaatgtgatccaggaacaataagagaagaaattcagatatttagactcttttgccatgagtgccaaagggtcttccatgatcgcttgattaataatgaagataagcactatttccatgttattctgacagaaatggccaacaaacattttggaattgcaattgacctggaatattttttgaataagcccatcatatttggagatttcattaagtttggagcagataaagctgatcggatttatgatgacatgcctgatatagagaaaactgcaaatgttctacaggactatcttgatgattataatctcacaaatcccaaagaagtaaagttggtgttcttccaggatgctatagaacatgtttcaaggattgctcggatgatacgtcaagaaagaggcaatgccctgcttgttggagtaggaggcacaggaaagcagtcactcacgagacttgcagctcatatatgcggttacaaatgtttgcagattgaactcagccggggatataattatgatagttttcatgaagacctgaggaagttgtacaaaatggctggtgtagaagacaagaatatggttttccttttcactgacacccagattgtagtggaggagttcctagaagatataaataacatcctgaactcaggtgaagtgcctaatttatttgaaaaggatgaactggagcaggttttagcggccaccagaccaagagcaaaagaagtaggaatttctgaggggaacagagacgaggtgtttcaatactttatcagcaaagtgcgtcagaagctgcacattgttctctgcatgagcccagttggggaggcctttcggtcccgatgcaggatgtttccatcccttgtgaattgctgcaccattgactggtttgtgcagtggcccagagaagcacttctttctgtgtcaaagacatttttctcacaagtcgatgctggaaatgaagaactgaaagaaaagcttcccttgatgtgcgtgaacgttcacttgagtgtctccagcatggcagagcgctattacaatgagctgcgcaggcggtactacacgacacccacctcctacctggagcttatcaatctttacctgtctatgctgtctgaaaaaaggaagcagattatttcagcacgagatcgggtgaagaatggtctcaccaagctactagaaacaaacatactagtagataaaatgaaactagatctttcagctttagagcctgtacttttagcaaaatcagaagatgttgaagccctgatggaaaaattggcagtggatcaagaaagtgccgatcaggtccgtaacactgtgcaggaggatgaagcaacagcaaaagtcaaagctgaagaaacccaagcaatagctgatgatgctcaaagagatcttgacgaggcactacctgcactagatgctgccaataaagcactggattccttagataaggcagatatatctgaaatcagagtttttacaaagcccccagatttggtcatgacagtaatggaagcaatctccattcttttgaatgccaagcctgattggccatcagcaaagcaacttcttggtgactctaactttctaaaaaggcttttagaatatgataaggagaacataaagcctcagatattggcaaagcttcaaaagtatattaataatcctgattttgtgcctgaaaaagtggagaaagtgtccaaagcatgtaaatctatgtgcatgtgggtaagagctatggatttgtactctcgagtggtcaaggtcgtcgaaccaaaaagacaaaagctccgcgccgcacaggctgaacttgacattaccatggctaccctgagagaaaagcaagcattactaagacaagtagaagatcaaatacaggccttacaagatgaatatgacaaaggtgtaaatgaaaaagaaagcctggcaaagaccatggccctgacaaaagcacgtctagtacgtgctggaaagctgacagcagcattagaagatgagcaggttcgatgggaagaaagcatacagaagtttgaggaagaaatatcaaatatcactgggaacgtgttcatagcagcagcttgtgtggcctactatggggctttcacagcccagtacaggcagtcacttatagagtgttggatccaggactgtcagtctctggagatcccaatcgatccttccttcagtctcattaacattcttggagatccctacgagatacggcagtggaacactgatgggctgccccgtgacttgatatcaacagaaaatggcattttggttactcaaggcagaagatggcctttgatgattgatccccaagatcaggcaaaccgttggataaggaacaaggaaagcaaaagtggtttaaagatcattaagcttacagatagtaatttcttacgaatactcgagaattcaatccgacttggtttacctgtcttactggaagagcttaaggaaaccttggatccagctctagaacccattcttttgaaacaaatttttatcagtggtggccgactactcatccgtcttggagactcagacattgattatgacaaaaactttaggttctatatgacaaccaaaatgccaaatccccactatctgcctgaggtatgcattaaagttaccattatcaatttcactgtaacaaaatcaggcctggaggatcagttgttaagtgatgtggtgcgacttgaaaaacccaggttggaagaacaaagaattaagctcatcgtgaggatcaacactgataaaaaccagttgaaaactatcgaagagaaaatcctgagaatgctctttacctctgaaggaaatattctggacaatgaagaacttattgacacactccaggattcaaagatcacttctggtgccattaaaaccaggctggaagaagcagagtccactgagcagatgatcaatgtggctcgtgagaagtatcgtccagtggccactcaaggctctgtaatgtactttgtcattgcaagcctctcagaaatagatcctatgtaccagtactcattaaaatactttaaacagttgttcaataccaccattgaaacttctgtaaagacagaaaatctacaacagcgcctggacgtactactagaacaaactctcctaactgcttatgtcaatgtttcaagaggactttttgagcaacataaactcatctacagctttatgctttgtgttgagatgatgcgtcagcaaggaaccctatctgatgctgaatggaatttctttctccgaggttctgcaggattggaaaaggaacgcccacctaagcctgaagctccctggctacctactgctacatggttcgcatgctgtgacttggaagaatcatttccagtttttcacggacttacccaaaatatattgtcacatcctatttccatacgcttaggatcttttgagacttatattaacccacagaaatgggaaggctattctaaaatgaaacacgaagataaacacatgagacaggaaaaggaggcagcacaccaagatccatggagtgcaggattgagttctttccataagctaattcttattaaatgttgtaaagaagaaaaggtggtttttgctcttacagactttgtgatagaaaatcttggaaaacagtttatagagacaccacctgtggacctgcctaccctgtatcaagacatgtcatgcaacactcccctggtattcatcctaagcacaggctcagatcccatgggtgcatttcagaggtttgccagggaaagtggatattcagaacgggtgcagtcaatttcactggggcaaggacaaggacctattgctgaaaaaatggtcaaggatgcaatgaaatcaggaaactgggtatttttgcaaaattgccatcttgctgtttcttggatgttggcaatggaagagctcattaaaaccttcacagatccagatagtgctatcaaggacacttttcgactttttttaagctccatgcctagtaatacatttcctgttacagttcttcaaaattctgtcaaggtgaccaatgagcctccaaaaggcttacgtgcaaatatcagacgagcatttactgaaatgacaccttcgttttttgaagaaaatatacttggaaaaaaatggagacaaataatatttggcatttgtttcttccatgcaattattcaggagagaaagaagtttggcccccttggttggaatatctgctatgaatttaatgacagtgacagggaatgtgctttactgaatctcaaactctattgtaaagaaggaaagattccctgggatgcactaatttacattactggtgaaattacttatggtggtagagtcacagacagctgggaccaaagatgccttcgtactatcttgaaaagatttttttctcctgaaacattagaagaagattataaatactctgaatcaggcatctattttgcacccatggctgacagcctacaagagtttaaggactacattgaaaatctgcctttgatcgatgacccagaaatttttggaatgcatgaaaatgctaatctagtcttccagtacaaagagaccagcactttaatcaacaccatacttgaggttcagccaaggtcatctactggtggagagggaaaaagcaatgacgaaattgttcaagaacttgttgcttctgtccagaccagagttccagaaaaactggaaatggagggtgcttctgagagcctttttgtcaaggatcttcaaggacgtctgaactccttgaccaccgttcttggacaggaagtggaccggtttaacaacctgctgaagttaattcatacttctctggaaacactcaacaaagccatcgctggatttgtggtgatgtctgaagaaatggaaaaagtgtataacagtttcctcaacaaccaggttcccgctctgtggtccaacacagcctacccatccctgaagccactaggatcatgggtcaaagaccttatcctgaggacctcatttgtggatctgtggctcaaaagaggacagcctaagtcctactggatctctggtttcttctttcctcaaggatttctaacaggaactcttcaaaatcatgctcgaaaatacaatttgcctatagatgagctgagtttcaaatacagcgtaattcccacctatcgggatcaagctgcagtgatagaagctgccaagacagtgcaatttggacaagaactgcccatggacatggagttgccctctcctgaggatggtgttcttgttcatgggatgttcatggatgcttctcgatgggatgataaggagatggtgatagaagatgcattgcccggacagatgaatccagtgctgcctgtggtgcattttgaaccacaacaaaactataagccaagcccaacactttaccactgcccactttataaaacaggagcccgggcaggaacactctcaaccacaggacattcaaccaattttgtggtaaccgtcctgttaccctccaagcggtccaaagactactggattgccaagggatcagctttgctctgccagctgagcgaatgaaaaggtgccacctcagccctgaaaaagaaccaggccagagatctttcctaatgggagcaaaaggtttgaataatttatatgtgagcaaaacggtgttaattctgatttgacttaaacgtattgtgacttttatttctcttatgaccttaaaataaagtgtttgagttctttctgttggcaa

SEQ ID NO: 5765 - DNA, 2381 bp, Homo sapiens
  source 1..2381: mol_type = unassigned DNA
ggacttccggcgggtgacgcgcccgggttcggctacaaaagaggacggctgcggcgcgccgggcggaactttccagaacgctcggtgagaggcggaggagcggtaactaccccggctgcgcacagctcggcgctccttcccgctccctcacacaccggcctcagcccgcaccggcagtagaagatggtgaaagaaacaacttactacgatgttttgggggtcaaacccaatgctactcaggaagaattgaaaaaggcttataggaaactggctttgaagtaccatcctgataagaacccaaatgaaggagagaagtttaaacagatttctcaagcttacgaagttctctctgatgcaaagaaaagggaattatatgacaaaggaggagaacaggcaattaaagagggtggagcaggtggcggttttggctcccccatggacatctttgatatgttttttggaggaggaggaaggatgcagagagaaaggagaggtaaaaatgttgtacatcagctctcagtaaccctagaagacttatataatggtgcaacaagaaaactggctctgcaaaagaatgtgatttgtgacaaatgtgaaggtagaggaggtaagaaaggagcagtagagtgctgtcccaattgccgaggtactggaatgcaaataagaattcatcagataggacctggaatggttcagcaaattcagtctgtgtgcatggagtgccagggccatggggagcggatcagtcctaaagatagatgtaaaagctgcaacggaaggaagatagttcgagagaagaaaattttagaagttcatattgacaaaggcatgaaagatggccagaagataacattccatggtgaaggagaccaagaaccaggactggagccaggcgatattatcattgtgttagatcagaaggaccatgctgtttttactcgacgaggagaagaccttttcatgtgtatggacatacagctcgttgaagcactgtgtggcttccagaagccaatatctactcttgacaaccgaaccatcgtcatcacctctcatccaggtcagattgtcaagcatggagatatcaagtgtgtactaaatgaaggcatgccaatttatcgtagaccatatgaaaagggtcgcctaatcatcgaatttaaggtaaactttcctgagaatggctttctctctcctgataaactgtctttgctggaaaaactcctacccgagaggaaggaagtggaagagactgatgagatggaccaagtagaactggtggactttgatccaaatcaggaaagacggcgccactacaatggagaagcatatgaggatgatgaacatcatcccagaggtggtgttcagtgtcagacctcttaatgggccagtgaataacactcactgctggcatttaatgtgcagtagtgaatgagtgaaggactgtaatcataatatgctcactacttgctcttgtttttgttttaataaactatagtagtgttttaaaaagttaaatgaagaataaacgcaaatataaaagctctgattttgccctgtatgtatgatgacttcagtgtgcaagatgaagtttaatacctgtaaaaactacaaagaagttcccctagcatttctaggccaaaccttgtaattgacttcagctatgtacgtggacaagcttagactgaaatgctaggtatatgtattggcttcagtgtatgacccttcattgttaagctatgaaagtaaaactctgtatttaactggcaatgaggaaaaaaaaattttgtagagaagtgttggtctgtatagttctttatattaagtgggattcattgtaatgcctctgcatttattctgttgcctcagctgttacttgaagatggcgtaatatataatttatcctgtggtatcagtgataaaaatgatacctttctgtaggaggggtttatcataatatgctgcttcttgaaggcttgcacttccagaattgtgtttccttctgctgtgccattcatatatatatacatatatatatataatcttgaccagtcctggtcatttgctcccctccttgtctgtggaccatgataagcccaagtagtgacttcagagctgggtaacagaaattaaagtgaaaagacctttacgtggagaatttgcatgcgtaatataggaaggtgttctttaggtatgttacaggattactttaaaccatttgactttcgctccaaagttatgttggtagtatagcaaattatgatgaatagctttaattgtatgtttaaaagtctcatatgttcacatgcttaaatctgggtatcagaatttaagcaattcttgaaatgtattgtctccttaatatactaattacaaagcatctccaa

SEQ ID NO: 5766 - DNA, 604 bp, Homo sapiens
  source 1..604: mol_type = unassigned DNA
gaacgctcggtgagaggcggaggagcggtaactaccccggctgcgcacagctcggcgctccttcccgctccctcacacaccggcctcagcccgcaccggcatgaaagatggccagaagataacattccatggtgaaggagaccaagaaccaggactggagccaggcgatattatcattgtgttagatcagaaggaccatgctgtttttactcgtagagatggggtttcaccatgttggccaggctggtcttgaacttcagaccttaggtgatccaccctcctcagcctcccaaactgctggaattacagatgcgaaccacagtgcctggcctaaccctcactcttacgaggagaagaccttttcatgtgtatggacatacagctcgttgaagcactgtgtggcttccagaagccaatatctactcttgacaaccgaaccatcgtcatcacctctcatccaggtcagattgtcaagcatggagatatcaagtgtgtactaaatgaaggcatgccaatttatcgtagaccatatgaaaagggtcgcctaatcatcgaatttaaggtaaactttcctgagaatggctttctctctcctgataaactg

SEQ ID NO: 5767 - DNA, 505 bp, Homo sapiens
  source 1..505: mol_type = unassigned DNA
caagaaccaggactggagccaggcgatattatcattgtgttagatcagaaggaccatgctgtttttactcgacgaggagaagaccttttcatgtgtatggacatacagctcgttgaagcactgtgtggcttccagaagccaatatctactcttgacaaccgaaccatcgtcatcacctctcatccaggtcagattgtcaagcatggagatatcaagtgtgtactaaatgaaggcatgccaatttatcgtagaccatatgaaaagggtcgcctaatcatcgaatttaaggtaagctgtaatgtactttaagaatacttgagaacaattggcttactaaaatctgataaaaaagtaaaatttcagccaggtgcaagtagctcatgcctgtaatccccgcattttgagaggctgaggcaggaggatcccttgagccctggagttttgagaacagcctgggcaacatagtgaaaccctgtctctttaaaaaaacaaaaaaaaaaaaaaa

SEQ ID NO: 5768 - DNA, 3245 bp, Homo sapiens
  source 1..3245: mol_type = unassigned DNA
agacggcggccacacccccggggagaggccgggtggggaccgcagggcgcagctctcccagtcccacccttcggcgcagggctccggccaacacagccctccaggccgcctactctccagccagccggctccacggacccacggaagggcaagggggcggcctcggggcggcgggacagttgtcggagggcgccctccaggcccaagccgccttctccggcccccgccatggcccggggcggcagtcagagctggagctccggggaatcagacgggcagccaaaggagcagacgcccgagaagcccagacacaagatggtgaaggagacccagtactatgacatcctgggcgtgaagcccagcgcgtccccggaggagatcaagaaggcctatcggaagctggcgctcaagtaccacccggacaagaacccggatgagggcgagaagtttaaactcatatcccaggcatatgaagtgctttcagatccaaagaaaagggatgtttatgaccaaggcggagagcaggcaattaaagaaggaggctcaggcagccccagcttctcttcacccatggacatctttgacatgttctttggtggtggtggacggatggctagagagagaagaggcaagaatgttgtacaccagttatctgtaactcttgaagatctatataatggagtcacgaagaaattggccctccagaaaaatgtaatttgtgagaaatgtgaaggtgttggtgggaagaagggatcggtggagaagtgcccgctgtgcaaggggcgggggatgcagatccacatccagcagatcgggccgggcatggtacagcagatccagaccgtgtgcatcgagtgcaagggccagggtgagcgcatcaaccccaaggaccgctgcgagagctgcagcggggccaaggtgatccgtgagaagaagattatcgaggtacatgttgaaaaaggtatgaaagatgggcaaaagatactatttcatggagaaggagatcaggagcctgagctggagcctggtgatgtcataattgtgcttgatcagaaggatcatagtgtctttcagagacgaggccatgacttgatcatgaaaatgaaaattcagctttctgaagctctttgtggcttcaagaagacgataaaaacattggacaatcgaattcttgttattacatccaaagcaggtgaggtgataaagcacggggacctgagatgcgtgcgcgatgaaggaatgcccatctacaaagcacccctggaaaaagggattctgatcatacagtttttagtaatctttcctgaaaaacactggctttctctggaaaagcttcctcagctggaagctttactccctcctcgacagaaagtgaggattacagatgacatggatcaggtggagctgaaggagttttgtcccaatgagcagaactggcgtcagcacagggaggcctacgaggaggacgaagacgggccccaggctggagtgcagtgccagacggcatgacgtggtgcggggcagcgtggccccaccggactagcacatgatgaatgtaaagttggcacaatgaaaatgacatcgctttaatggccttgtgtttgggatgtcctgtgtatgtgttcagcattcttaattgctgagtgtctttttggcttttcttttggttgtaacttaagttatagcttaatttatatttaaatgttttaagtataaatcacctctagtctgcatatggaatctgttcatttctattttcaggatatacttttgagatgtcagtgattgcaccaatactttgtgcttctagtggctttgccataattcagtgtcaccaataaggcacagcccagttagcagcttagcccccctagcaaaccccaaggcacaaagtgggcatcctgactcatctctaggtctgtggtttctcccctcttcccttggcagagttattgagggcatgatctcagggctgctaagataacatttctgaggattctagatgatcctcttaaagaataaaagcacatccgtggatcggacatggctgcatgtgcctgcttaacagggccaacttagttcctactgttctgtgcccttcagtggatggaacgtgagtgtctgatcatctctcttggaagttttctgaaccttccaagctctgtggtgaggacaaaccagtgtttgaatcatatgctgataactgtttgcctgtgaccctcacaccttgttcttcagggttttaatgattttctgttgacaacttttgcaatgctttcccaccaaagtgcttacttgtaaagaaaactaaatccttctgtgtccccggcagcctcagtgcagcaacagaagccaagggagaatgctgctggtttggcccatggcacagccagcttctctgaccagtaatccggggtgacttgagggtctgcaaaggcatagaactccccagtgttttccacctcattctcccagattgagctcccttccaaaggatcgttcctctcattgcacagccatattacaaagggtttcctgctcaagtgatgttttggtaagaacttcgctgagttccactgtggattacagtttgtatggactactactgtaaattatagcttgtttggagggatattagtcattattttattcatgacaggtagactacaattcgaacttagggttacctcagtctttagccattactgcttatttcttttccccaagtcacaaaaaacttgtaagctgctgggttaaagcagaggccacctgtcagatctaccctacccttatttggttacatggcacctgagagtttcactcagaccagggatcttccttaggagggtcaaagtgcagatcagaccatgcaggtaaggtgaaccagctgcacggaccaggttcccgcaaaacattgccagctagtgaggcataatttgctcaaagtatagaaacagcccacctgtgcccactttgaccattggtgaggatagatataaaatcacttcttccaacgaagcctaggtgaaaatctatttataaatggaccacaactctggggtgtcgtttttgtgctgtgacttcctaattattgctaaagaactactgtttagttggtaatggtgtaaaattacattcagctccttcttgtcatataaaaggaatttggagggtgtcgcttaaaattttattccacctgtacatttgtcactttaaaattaaaattgagctggtatgagagataa

SEQ ID NO: 5769 - DNA, 947 bp, Homo sapiens
  source 1..947: mol_type = unassigned DNA
agtcccacccttcggcgcagggctccggccaacacagccctccaggccgcctactctccagccagccggctccacggacccacggaagggcaagggggcggcctcggggcggcgggacagttgtcggagggcgccctccaggcccaagccgccttctccggcccccgccatggcccggggcggcagtcagagctggagctccggggaatcagacgggcagccaaaggagcagacgcccgagaagcccagacacaagatggtgaaggagacccagtactatgacatcctgggcgtgaagcccagcgcgtccccggaggagatcaagaaggcctatcggaagctggcgctcaagtaccacccggacaagaacccggatgagggcgagaagggacacggacatctgcaacctgacatcagcttgtactcatattctgggttttcggtgacaagtgacacacagttgatcataagtaccaatcatagactgaaaatgctctgcattttagagacagaagttaaaagcttttccatcctgtttacagaaagtttgctttttatctctaaagaggctcatgacccacctgaataggtgaattgaaggatgaggcattgcaaggaaaggctgctaaccctcccgttcctcctttcacttcttgccattttcttacaaaactttggttgttccgcatgggtcttgagaggtggggccgttatagtagctgatagcagtgtcacttgggccacgtttgaaaccacaccaatcacccatgtagcatttaagacctgtggaaacgacgctggaatcaaaatacctgtctgtgttagttgttccaagctggagaaagctacttcaggacggttggctgaatggcaacagtgatggaatatttatatttagccacatgtgctgaatgtggctgtcacaagtttaaaatgctttcctgtaa

SEQ ID NO: 5770 - DNA, 1308 bp, Homo sapiens
  source 1..1308: mol_type = unassigned DNA
ggaggagccggtggctctagtgcggtggagccaggcgtggaaacacaagatggtgaaggagacccagtactatgacatcctgggcgtgaagcccagcgcgtccccggaggagatcaagaaggcctatcggaagctggcgctcaagtaccacccggacaagaacccggatgagggcgagaagtttaaactcatatcccaggcatatgaagtgctttcagatccaaagaaaagggatgtttatgaccaaggcggagagcaggcaattaaagaaggaggctcaggcagccccagcttctcttcacccatggacatctttgacatgttctttggtggtggtggacggatggctagagagagaagaggcaagaatgttgtacaccagttatctgtaactcttgaagatctatataatggagtcacgaagaaattggccctccagaaaaatgtaatttgtgagaaatgtgaaggtgttggtgggaagaagggatcggtggagaagtgcccgctgtgcaaggggcgggggatgcagatccacatccagcagatcgggccgggcatggtacagcagatccagaccgtgtgcatcgagtgcaagggccagggtgagcgcatcaaccccaaggaccgctgcgagagctgcagcggggccaaggtgatccgtgagaagaagattatcgaggtatgaaagatgggcaaaagatactatttcatggagaaggagatcaggagcctgagctggagcctggtgatgtcataattgtgcttgatcagaaggatcatagtgtctttcagagacgaggccatgacttgatcatgaaaatgaaaattcagctttctgaagctctttgtggcttcaagaagacgataaaaacattggacaatcgaattcttgttattacatccaaagcaggtgaggtgataaagcacggggacctgagatgcgtgcgcgatgaaggaatgcccatctacaaagcacccctggaaaaagggattctgatcatacagtttttagtaatctttcctgaaaaacactggctttctctggaaaagcttcctcagctggaagctttactccctcctcgacagaaagtgaggattacagatgacatggatcaggtggagctgaaggagttttgtcccaatgagcagaactggcgtcagcacagggaggcctacgaggaggacgaagacgggccccaggctggagtgcagtgccagacggcatgacgtggtgcggggcagcgtggccccaccggactagcacatgatgaatgtaaagttggcacaatgaaaatgacatcgctttaa

SEQ ID NO: 5771 - DNA, 514 bp, Homo sapiens
  source 1..514: mol_type = unassigned DNA
agtgcggtggagccaggcgtggaaacacaagatggtgaaggagacccagtactatgacatcctgggcgtgaagcccagcgcgtccccggaggagatcaagaaggcctatcggaagctggcgctcaagtaccacccggacaagaacccggatgagggcgagaagtttaaactcatatcccaggcatatgaagtgctttcagatccaaagaaaagggatgtttatgaccaaggcggagagcaggcaattaaagaaggaggctcaggcagccccagcttctcttcacccatggacatctttgacatgttctttggtggtggtggacggatggctagagagagaagagaatgttgtacaccagttatctgtaactcttgaagatctatataatggagtcacgaagaaattggccctccagaaaaatgtaatttgtgagaaatgtgaaggtgttggtgggaagaagggatcggtggagaagtgcccgctgtgcaaggggcgggggatgcagatccacat

SEQ ID NO: 5772 - DNA, 1320 bp, Homo sapiens
  source 1..1320: mol_type = unassigned DNA
agtgcggtggagccaggcgtggaaacacaagatggtgaaggagacccagtactatgacatcctgggcgtgaagcccagcgcgtccccggaggagatcaagaaggcctatcggaagctggcgctcaagtaccacccggacaagaacccggatgagggcgagaagtttaaactcatatcccaggcatatgaagtgctttcagatccaaagaaaagggatgtttatgaccaaggcggagagcaggcaattaaagaaggaggctcaggcagccccagcttctcttcacccatggacatctttgacatgttctttggtggtggtggacggatggctagagagagaagaggcaagaatgttgtacaccagttatctgtaactcttgaagatctatataatggagtcacgaagaaattggccctccagaaaaatgtaatttgtgagaaatgtgaaggtgttggtgggaagaagggatcggtggagaagtgcccgctgtgcaaggggcgggggatgcagatccacatccagcagatcgggccgggcatggtacagcagatccagaccgtgtgcatcgagtgcaagggccagggtgagcgcatcaaccccaaggaccgctgcgagagctgcagcggggccaaggtgatccgtgagaagaagattatcgaggtacatgttgaaaaagagacgaggccatgacttgatcatgaaaatgaaaattcagctttctgaagctctttgtggcttcaagaagacgataaaaacattggacaatcgaattcttgttattacatccaaagcaggtgaggtgataaagcacggggacctgagatgcgtgcgcgatgaaggaatgcccatctacaaagcacccctggaaaaagggattctgatcatacagtttttagtaatctttcctgaaaaacactggctttctctggaaaagcttcctcagctggaagctttactccctcctcgacagaaagtgaggattacagatgacatggatcaggtggagctgaaggagttttgtcccaatgagcagaactggcgtcagcacagggaggcctacgaggaggacgaagacgggccccaggctggagtgcagtgccagacggcatgacgtggtgcggggcagcgtggccccaccggactagcacatgatgaatgtaaagttggcacaatgaaaatgacatcgctttaatggccttgtgtttgggatgtcctgtgtatgtgttcagcattcttaattgctgagtgtctttttggcttttcttttggttgtaacttaagttatagcttaatttatatttaaatgttttaagtataaa

SEQ ID NO: 5773 - DNA, 2961 bp, Homo sapiens
  source 1..2961: mol_type = unassigned DNA
agtgcggtggagccaggcgtggaaacacaagatggtgaaggagacccagtactatgacatcctgggcgtgaagcccagcgcgtccccggaggagatcaagaaggcctatcggaagctggcgctcaagtaccacccggacaagaacccggatgagggcgagaagtttaaactcatatcccaggcatatgaagtgctttcagatccaaagaaaagggatgtttatgaccaaggcggagagcaggcaattaaagaaggaggctcaggcagccccagcttctcttcacccatggacatctttgacatgttctttggtggtggtggacggatggctagagagagaagaggcaagaatgttgtacaccagttatctgtaactcttgaagatctatataatggagtcacgaagaaattggccctccagaaaaatgtaatttgtgagaaatgtgaaggtgttggtgggaagaagggatcggtggagaagtgcccgctgtgcaaggggcgggggatgcagatccacatccagcagatcgggccgggcatggtacagcagatccagaccgtgtgcatcgagtgcaagggccagggtgagcgcatcaaccccaaggaccgctgcgagagctgcagcggggccaaggtgatccgtgagaagaagattatcgaggtacatgttgaaaaaggtatgaaagatgggcaaaagatactatttcatggagaaggagatcaggagcctgagctggagcctggtgatgtcataattgtgcttgatcagaaggatcatagtgtctttcagagacgaggccatgacttgatcatgaaaatgaaaattcagctttctgaagctctttgtggcttcaagaagacgataaaaacattggacaatcgaattcttgttattacatccaaagcaggtgaggtgataaagcacggggacctgagatgcgtgcgcgatgaaggaatgcccatctacaaagcacccctggaaaaagggattctgatcatacagtttttagtaatctttcctgaaaaacactggctttctctggaaaagcttcctcagctggaagctttactccctcctcgacagaaagtgaggattacagatgacatggatcaggtggagctgaaggagttttgtcccaatgagcagaactggcgtcagcacagggaggcctacgaggaggacgaagacgggccccaggctggagtgcagtgccagacggcatgacgtggtgcggggcagcgtggccccaccggactagcacatgatgaatgtaaagttggcacaatgaaaatgacatcgctttaatggccttgtgtttgggatgtcctgtgtatgtgttcagcattcttaattgctgagtgtctttttggcttttcttttggttgtaacttaagttatagcttaatttatatttaaatgttttaagtataaatcacctctagtctgcatatggaatctgttcatttctattttcaggatatacttttgagatgtcagtgattgcaccaatactttgtgcttctagtggctttgccataattcagtgtcaccaataaggcacagcccagttagcagcttagcccccctagcaaaccccaaggcacaaagtgggcatcctgactcatctctaggtctgtggtttctcccctcttcccttggcagagttattgagggcatgatctcagggctgctaagataacatttctgaggattctagatgatcctcttaaagaataaaagcacatccgtggatcggacatggctgcatgtgcctgcttaacagggccaacttagttcctactgttctgtgcccttcagtggatggaacgtgagtgtctgatcatctctcttggaagttttctgaaccttccaagctctgtggtgaggacaaaccagtgtttgaatcatatgctgataactgtttgcctgtgaccctcacaccttgttcttcagggttttaatgattttctgttgacaacttttgcaatgctttcccaccaaagtgcttacttgtaaagaaaactaaatccttctgtgtccccggcagcctcagtgcagcaacagaagccaagggagaatgctgctggtttggcccatggcacagccagcttctctgaccagtaatccggggtgacttgagggtctgcaaaggcatagaactccccagtgttttccacctcattctcccagattgagctcccttccaaaggatcgttcctctcattgcacagccatattacaaagggtttcctgctcaagtgatgttttggtaagaacttcgctgagttccactgtggattacagtttgtatggactactactgtaaattatagcttgtttggagggatattagtcattattttattcatgacaggtagactacaattcgaacttagggttacctcagtctttagccattactgcttatttcttttccccaagtcacaaaaaacttgtaagctgctgggttaaagcagaggccacctgtcagatctaccctacccttatttggttacatggcacctgagagtttcactcagaccagggatcttccttaggagggtcaaagtgcagatcagaccatgcaggtaaggtgaaccagctgcacggaccaggttcccgcaaaacattgccagctagtgaggcataatttgctcaaagtatagaaacagcccacctgtgcccactttgaccattggtgaggatagatataaaatcacttcttccaacgaagcctaggtgaaaatctatttataaatggaccacaactctggggtgtcgtttttgtgctgtgacttcctaattattgctaaagaactactgtttagttggtaatggtgtaaaattacattcagctccttcttgtcatataaaaggaatttggagggtgtcgcttaaaattttattccacctgtacatttgtcactttaaaattaaaattgagctggtatgagagataa

SEQ ID NO: 5774 - DNA, 3116 bp, Homo sapiens
  source 1..3116: mol_type = unassigned DNA
ccaggcgtggaagtcggtccggcgcggggcggggggcgggcgggagctacaagcggcggcggcggcggcgaccgtgaccgtgacgcgcgagcgggcggcgggggcgcgggccaggggcgcgggccagggtgccggcaggggcgtccggggcgctctgaccggcctcgcccgccccccccgcagacacaagatggtgaaggagacccagtactatgacatcctgggcgtgaagcccagcgcgtccccggaggagatcaagaaggcctatcggaagctggcgctcaagtaccacccggacaagaacccggatgagggcgagaagtttaaactcatatcccaggcatatgaagtgctttcagatccaaagaaaagggatgtttatgaccaaggcggagagcaggcaattaaagaaggaggctcaggcagccccagcttctcttcacccatggacatctttgacatgttctttggtggtggtggacggatggctagagagagaagaggcaagaatgttgtacaccagttatctgtaactcttgaagatctatataatggagtcacgaagaaattggccctccagaaaaatgtaatttgtgagaaatgtgaaggtgttggtgggaagaagggatcggtggagaagtgcccgctgtgcaaggggcgggggatgcagatccacatccagcagatcgggccgggcatggtacagcagatccagaccgtgtgcatcgagtgcaagggccagggtgagcgcatcaaccccaaggaccgctgcgagagctgcagcggggccaaggtgatccgtgagaagaagattatcgaggtacatgttgaaaaaggtatgaaagatgggcaaaagatactatttcatggagaaggagatcaggagcctgagctggagcctggtgatgtcataattgtgcttgatcagaaggatcatagtgtctttcagagacgaggccatgacttgatcatgaaaatgaaaattcagctttctgaagctctttgtggcttcaagaagacgataaaaacattggacaatcgaattcttgttattacatccaaagcaggtgaggtgataaagcacggggacctgagatgcgtgcgcgatgaaggaatgcccatctacaaagcacccctggaaaaagggattctgatcatacagtttttagtaatctttcctgaaaaacactggctttctctggaaaagcttcctcagctggaagctttactccctcctcgacagaaagtgaggattacagatgacatggatcaggtggagctgaaggagttttgtcccaatgagcagaactggcgtcagcacagggaggcctacgaggaggacgaagacgggccccaggctggagtgcagtgccagacggcatgacgtggtgcggggcagcgtggccccaccggactagcacatgatgaatgtaaagttggcacaatgaaaatgacatcgctttaatggccttgtgtttgggatgtcctgtgtatgtgttcagcattcttaattgctgagtgtctttttggcttttcttttggttgtaacttaagttatagcttaatttatatttaaatgttttaagtataaatcacctctagtctgcatatggaatctgttcatttctattttcaggatatacttttgagatgtcagtgattgcaccaatactttgtgcttctagtggctttgccataattcagtgtcaccaataaggcacagcccagttagcagcttagcccccctagcaaaccccaaggcacaaagtgggcatcctgactcatctctaggtctgtggtttctcccctcttcccttggcagagttattgagggcatgatctcagggctgctaagataacatttctgaggattctagatgatcctcttaaagaataaaagcacatccgtggatcggacatggctgcatgtgcctgcttaacagggccaacttagttcctactgttctgtgcccttcagtggatggaacgtgagtgtctgatcatctctcttggaagttttctgaaccttccaagctctgtggtgaggacaaaccagtgtttgaatcatatgctgataactgtttgcctgtgaccctcacaccttgttcttcagggttttaatgattttctgttgacaacttttgcaatgctttcccaccaaagtgcttacttgtaaagaaaactaaatccttctgtgtccccggcagcctcagtgcagcaacagaagccaagggagaatgctgctggtttggcccatggcacagccagcttctctgaccagtaatccggggtgacttgagggtctgcaaaggcatagaactccccagtgttttccacctcattctcccagattgagctcccttccaaaggatcgttcctctcattgcacagccatattacaaagggtttcctgctcaagtgatgttttggtaagaacttcgctgagttccactgtggattacagtttgtatggactactactgtaaattatagcttgtttggagggatattagtcattattttattcatgacaggtagactacaattcgaacttagggttacctcagtctttagccattactgcttatttcttttccccaagtcacaaaaaacttgtaagctgctgggttaaagcagaggccacctgtcagatctaccctacccttatttggttacatggcacctgagagtttcactcagaccagggatcttccttaggagggtcaaagtgcagatcagaccatgcaggtaaggtgaaccagctgcacggaccaggttcccgcaaaacattgccagctagtgaggcataatttgctcaaagtatagaaacagcccacctgtgcccactttgaccattggtgaggatagatataaaatcacttcttccaacgaagcctaggtgaaaatctatttataaatggaccacaactctggggtgtcgtttttgtgctgtgacttcctaattattgctaaagaactactgtttagttggtaatggtgtaaaattacattcagctccttcttgtcatataaaaggaatttggagggtgtcgcttaaaattttattccacctgtacatttgtcactttaaaattaaaattgagctggtatgagag

SEQ ID NO: 5775 - DNA, 866 bp, Homo sapiens
  source 1..866: mol_type = unassigned DNA
gcgggcgggagctacaagcggcggcggcggcggcgaccgtgaccgtgacgcgcgagcgggcggcgggggcgcgggccaggggcgcgggccagggtgccggcaggggcgtccggggcgctctgaccggcctcgcccgccccccccgcagacacaagatggtgaaggagacccagtactatgacatcctgggcgtgaagcccagcgcgtccccggaggagatcaagaaggcctatcggaagctggcgctcaagtaccacccggacaagaacccggatgagggcgagaaggcaagaatgttgtacaccagttatctgtaactcttgaagatctatataatggagtcacgaagaaattggccctccagaaaaatgtaatttgtgagaaatgtgaaggtgttggtgggaagaagggatcggtggagaagtgcccgctgtgcaaggggcgggggatgcagatccacatccagcagatcgggccgggcatggtacagcagatccagaccgtgtgcatcgagtgcaagggccagggtgagcgcatcaaccccaaggaccgctgcgagagctgcagcggggccaaggtgatccgtgagaagaagattatcgaggtacatgttgaaaaaggtatgaaagatgggcaaaagatactatttcatggagaaggagatcaggagcctgagctggagcctggtgatgtcataattgtgcttgatcagaaggatcatagtgtctttcagagacgaggccatgacttgatcatgaaaatgaaaattcagctttctgaagctctttgtggcttcaagaagacgataaaaacattggacaatcgaattcttgttattacatccaaagcaggtgaggtgataaagc

SEQ ID NO: 5776 - DNA, 1399 bp, Homo sapiens
  source 1..1399: mol_type = unassigned DNA
agtctcctttaaggagagcttgtaggcttctaatttcacatttcagcaagctggctaaagacatgtgggaaagcctgaccctggattcaggtcaaatctcagcactcacaagatttaaactcatatcccaggcatatgaagtgctttcagatccaaagaaaagggatgtttatgaccaaggcggagagcaggcaattaaagaaggaggctcaggcagccccagcttctcttcacccatggacatctttgacatgttctttggtggtggtggacggatggctagagagagaagaggcaagaatgttgtacaccagttatctgtaactcttgaagatctatataatggagtcacgaagaaattggccctccagaaaaatgtaatttgtgagaaatgtgaaggtgttggtgggaagaagggatcggtggagaagtgcccgctgtgcaaggggcgggggatgcagatccacatccagcagatcgggccgggcatggtacagcagatccagaccgtgtgcatcgagtgcaagggccagggtgagcgcatcaaccccaaggaccgctgcgagagctgcagcggggccaaggtgatccgtgagaagaagattatcgaggtacatgttgaaaaaggtatgaaagatgggcaaaagatactatttcatggagaaggagatcaggagcctgagctggagcctggtgatgtcataattgtgcttgatcagaaggatcatagtgtctttcagagacgaggccatgacttgatcatgaaaatgaaaattcagctttctgaagctctttgtggcttcaagaagacgataaaaacattggacaatcgaattcttgttattacatccaaagcaggtgaggtgataaagcacggggacctgagatgcgtgcgcgatgaaggaatgcccatctacaaagcacccctggaaaaagggattctgatcatacagtttttagtaatctttcctgaaaaacactggctttctctggaaaagcttcctcagctggaagctttactccctcctcgacagaaagtgaggattacagatgacatggatcaggtggagctgaaggagttttgtcccaatgagcagaactggcgtcagcacagggaggcctacgaggaggacgaagacgggccccaggctggagtgcagtgccagacggcatgacgtggtgcggggcagcgtggccccaccggactagcacatgatgaatgtaaagttggcacaatgaaaatgacatcgctttaatggccttgtgtttgggatgtcctgtgtatgtgttcagcattcttaattgctgagtgtctttttggcttttcttttggttgtaacttaagttatagcttaatttatatttaaatgttttaagtataaatcacctctagtctgca

SEQ ID NO: 5777 - DNA, 2006 bp, Homo sapiens
  source 1..2006: mol_type = unassigned DNA
ggtttgtatccaatgtctggcacgtggttagatgctcacagatgcctgtagttgaatttcattctagtaaactagtgaaatgattcccatgaggaggtgagccagtggtaatgcccagagtcctggctctatctggttagaggttcacccctggcactgtctcatggtatcctagctggtctcgacttcctgtctggtgcagccggattagtgagaaactttccctctctactggcttctctcccttattcttatcgtgtccctaccaccagtcccttaatatgtttgccctgtgtttcccactttaccaaaggagtaggtagacaggcaagtcagattccaggtagaggatgtatagactggctagttcaagggtttgggggcagaatacctctattactttgtatgtttatatggcaggtttgcttaacaaaacaactgaaacttctctaaaaatctctctctctctctcttttaaagtttaaactcatatcccaggcatatgaagtgctttcagatccaaagaaaagggatgtttatgaccaaggcggagagcaggcaattaaagaaggaggctcaggcagccccagcttctcttcacccatggacatctttgacatgttctttggtggtggtggacggatggctagagagagaagaggcaagaatgttgtacaccagttatctgtaactcttgaagatctatataatggagtcacgaagaaattggccctccagaaaaatgtaatttgtgagaaatgtgaaggtgttggtgggaagaagggatcggtggagaagtgcccgctgtgcaaggggcgggggatgcagatccacatccagcagatcgggccgggcatggtacagcagatccagaccgtgtgcatcgagtgcaagggccagggtgagcgcatcaaccccaaggaccgctgcgagagctgcagcggggccaaggtgatccgtgagaagaagattatcgaggtacatgttgaaaaaggtgaggctgcgcagagctggtgctccacacgggctggaaatgctgtctgggtgctaatcgtgagatacacagactagatgtcagggaagtgagctgtatcacaacatgtattgggtgtgccatgaattcctcttgtttcccagtcttctcttcacccttcctggccttatttccattccatgtcacctgccaaagtgttcttgctgaggtttacttccttgagatcacagacagcctctttatgaggttttctaacgctctgaaagtcttacctggccttggtttgggttagttgccatctcctgacattctcaagccattcctctagaatctttcggagtgtcttcctggtcgcttctgatgctcattggccataagggcttgtgtaagtgtttgtggctgcatgttccctttctccacatttccccatgtgctgcatcagattcccccaaatacagcaccttctcctgctattcattttgcctgatgccatcattttaaggcctttttccattttagctgtcctccaagtattccgatgattctgtggctttccaatccagtaaatatatcctagatcagagatgagaccaaaagtaaaagaatcaacagccaaaccgacacaggtgttattaaaggacttactgtttaaacatgcctaaaccctgtgccttgagtgtgcaagctgacttattagaaaaggacagggctggctgacctgtccctatcagtcccaagtcatgcaccctgtgccccgggaagtgggcggtgaccctatgctggtggtgtggcatcacaggccctgggcagggagtgctgtgtaaacctgggatgtagagccgcattcccccactccctgtgcatgctgggcttggccccacattatgccaagggaagcgggacctcttctgtcattggccatcctagccacccctccctgccttgtgcctgcatgaggttgggagacttgatgaataaagaatccctgaaggactctgttccttcttcaaaa

SEQ ID NO: 5778 - DNA, 1134 bp, Homo sapiens
  source 1..1134: mol_type = unassigned DNA
cctagatcagagatgagaccaaaagtaaaagaatcaacagccaaaccgacacaggtgttattaaaggacttactgtttaaacatgcctaaaccctgtgccttgagtgtgcaagctgacttattagaaaaggacagggctggctgacctgtccctatcagtcccaagtcatgcaccctgtgccccgggaagtgggcggtgaccctatgctggtggtgtggcatcacaggccctgggcagggagtgctgtgtaaacctgggatgtagagccgcattcccccactccctgtgcatgctgggcttggccccacattatgccaagggaagcgggacctcttctgtcattggccatcctagccacccctccctgccttgtgcctgcatgaggttgggagacttgatgaataaagaatccctgaaggactctgttccttcttcaaaagctttaaggaagcatggtttgtatgagaaatggctaatcagaaagggatgatgtttcataggtatgaaagatgggcaaaagatactatttcatggagaaggagatcaggagcctgagctggagcctggtgatgtcataattgtgcttgatcagaaggatcatagtgtctttcagagacgaggccatgacttgatcatgaaaatgaaaattcagctttctgaagctctttgtggcttcaagaagacgataaaaacattggacaatcgaattcttgttattacatccaaagcaggtgaggtgataaagcacggggacctgagatgcgtgcgcgatgaaggaatgcccatctacaaagcacccctggaaaaagggattctgatcatacagtttttagtaatctttcctgaaaaacactggctttctctggaaaagcttcctcagctggaagctttactccctcctcgacagaaagtgaggattacagatgacatggatcaggtggagctgaaggagttttgtcccaatgagcagaactggcgtcagcacagggaggcctacgaggaggacgaagacgggccccaggctggagtgcagtgccagacggcatgacgtggtgcggggcagcgtggccccaccggactagcacatgatgaatgtaaagttggcacaatgaaaatgacatcgctttaatggc

SEQ ID NO: 5779 - DNA, 2961 bp, Homo sapiens
  source 1..2961: mol_type = unassigned DNA
atttttaaaacctcctctttaaagatttcctcttgaagagacagctcactttctacatagtcccgtatggaagtggactgctgaagaaattagtgtttccattcccctccaccgtctcccccattttttccgaacatttctttctgtctttgtccattttcatcgctgagctgaagagcatgctttatcagaaacccttttgtccctttccttttccatgcttagagggaagtttctgacttgggagaacgccttagagttcttggggtctgaactcctctgatgccttccaaagtcacgtagctgtaagacccagcgggtgccagccgggagggtgactccagctcagcagcatgtatggaagtgcattgtgaccatgaaggagtctgccagtggccaagccacctagtgagctccctaccaaggaacctgggtgtcacctgcaggtggccaagagccagtttttatgccaggcaggggactggttggactctattgaggcttcttcctgtctgtggggagcactcctgtccccctcgtggtagggatacctgtcaccccacaaagaggcagggtgacaggtgttggccccattttaggcagacttgggtgtcatgacttctagttcacttgttttaaacctacctgtgatggcagctgcaccatgctgccctcttgacacactgctggagcccagagcacaggccagagtctcagcctgagccccttccccaggcagtacctgacaaggatacctgggattggggccagctttccagtcagatgccacgtttcctttgcccactgccacggggcactagggcctgccgcaggctctcccatgagggagaacgacctctgcaggcccctctgccttcctccttcctaattgaccctttctctggcaggtgaggtgataaagcacggggacctgagatgcgtgcgcgatgaaggaatgcccatctacaaagcacccctggaaaaagggattctgatcatacagtttttagtaatctttcctgaaaaacactggctttctctggaaaagcttcctcagctggaagctttactccctcctcgacagaaagtgaggattacagatgacatggatcaggtggagctgaaggagttttgtcccaatgagcagaactggcgtcagcacagggaggcctacgaggaggacgaagacgggccccaggctggagtgcagtgccagacggcatgacgtggtgcggggcagcgtggccccaccggactagcacatgatgaatgtaaagttggcacaatgaaaatgacatcgctttaatggccttgtgtttgggatgtcctgtgtatgtgttcagcattcttaattgctgagtgtctttttggcttttcttttggttgtaacttaagttatagcttaatttatatttaaatgttttaagtataaatcacctctagtctgcatatggaatctgttcatttctattttcaggatatacttttgagatgtcagtgattgcaccaatactttgtgcttctagtggctttgccataattcagtgtcaccaataaggcacagcccagttagcagcttagcccccctagcaaaccccaaggcacaaagtgggcatcctgactcatctctaggtctgtggtttctcccctcttcccttggcagagttattgagggcatgatctcagggctgctaagataacatttctgaggattctagatgatcctcttaaagaataaaagcacatccgtggatcggacatggctgcatgtgcctgcttaacagggccaacttagttcctactgttctgtgcccttcagtggatggaacgtgagtgtctgatcatctctcttggaagttttctgaaccttccaagctctgtggtgaggacaaaccagtgtttgaatcatatgctgataactgtttgcctgtgaccctcacaccttgttcttcagggttttaatgattttctgttgacaacttttgcaatgctttcccaccaaagtgcttacttgtaaagaaaactaaatccttctgtgtccccggcagcctcagtgcagcaacagaagccaagggagaatgctgctggtttggcccatggcacagccagcttctctgaccagtaatccggggtgacttgagggtctgcaaaggcatagaactccccagtgttttccacctcattctcccagattgagctcccttccaaaggatcgttcctctcattgcacagccatattacaaagggtttcctgctcaagtgatgttttggtaagaacttcgctgagttccactgtggattacagtttgtatggactactactgtaaattatagcttgtttggagggatattagtcattattttattcatgacaggtagactacaattcgaacttagggttacctcagtctttagccattactgcttatttcttttccccaagtcacaaaaaacttgtaagctgctgggttaaagcagaggccacctgtcagatctaccctacccttatttggttacatggcacctgagagtttcactcagaccagggatcttccttaggagggtcaaagtgcagatcagaccatgcaggtaaggtgaaccagctgcacggaccaggttcccgcaaaacattgccagctagtgaggcataatttgctcaaagtatagaaacagcccacctgtgcccactttgaccattggtgaggatagatataaaatcacttcttccaacgaagcctaggtgaaaatctatttataaatggaccacaactctggggtgtcgtttttgtgctgtgacttcctaattattgctaaagaactactgtttagttggtaatggtgtaaaattacattcagctccttcttgtcatataaaaggaatttggagggtgtcgcttaaaattttattccacctgtacatttgtcactttaaaattaaaattgagctggtatgagagataa

SEQ ID NO: 5780 - DNA, 2264 bp, Homo sapiens
  source 1..2264: mol_type = unassigned DNA
agagtccgggactggtcggcggcggagccgggggacggcgacagcgggtcggcgggccgcaggagggggtcatgggtaaagactactaccagacgttgggcctggcccgcggcgcgtcggacgaggagatcaagcgggcctaccgccgccaggcgctgcgctaccacccggacaagaacaaggagcccggcgccgaggagaagttcaaggagatcgctgaggcctacgacgtgctcagcgacccgcgcaagcgcgagatcttcgaccgctacggggaggaaggcctaaaggggagtggccccagtggcggtagcggcggtggtgccaatggtacctctttcagctacacattccatggagaccctcatgccatgtttgctgagttcttcggtggcagaaatccctttgacaccttttttgggcagcggaacggggaggaaggcatggacattgatgacccattctctggcttccctatgggcatgggtggcttcaccaacgtgaactttggccgctcccgctctgcccaagagcccgcccgaaagaagcaagatcccccagtcacccacgaccttcgagtctcccttgaagagatctacagcggctgtaccaagaagatgaaaatctcccacaagcggctaaaccccgacggaaagagcattcgaaacgaagacaaaatattgaccatcgaagtgaagaaggggtggaaagaaggaaccaaaatcactttccccaaggaaggagaccagacctccaacaacattccagctgatatcgtctttgttttaaaggacaagccccacaatatctttaagagagatggctctgatgtcatttatcctgccaggatcagcctccgggaggctctgtgtggctgcacagtgaacgtccccactctggacggcaggacgatacccgtcgtattcaaagatgttatcaggcctggcatgcggcgaaaagttcctggagaaggcctccccctccccaaaacacccgagaaacgtggggacctcattattgagtttgaagtgatcttccccgaaaggattccccagacatcaagaaccgtacttgagcaggttcttccaatatagctatctgagctccccaaggactgaccagggacctttccagagctcaaggatttctggacctttctaccagttgtggaccatgagagggtgggagggcccagggagggctttcgtactgctgaatgttttccagagcatatattacaatctttcaaagtcgcacactagacttcagtggtttttcgagctatagggcatcaggtggtgggaacagcaggaaaaggcattccagtctgccccactgggtctggcagccctcccgggatgggcccacatccacctccagtccctggccaggggtgagaggcagaccagcagatggacttgatccctctgtgtctttttgcttctggctggtagataatgtcaacctgcagtcttgattcccagaccctgtacactcctccttttctgttgtgtgatcagtttgtgctttattctgtatttgtctcccatgtcttgctcttctcctggagaattctgtcttctctttggccatctcaaattgagaacctaaactattcctgcagaactgcctggttggcgtccacaagcaatacctctcgttccagcaggaccaagggagccagcctccagtgagtgactccagcaagtgcagccacctctcccttgatggtctgggagcctggcctcagcaaggggccttcctgacctctggctccagtgaagctgaatgtcctcactttgtgggtcacactctttacatttctgtaaggcaatcttggcacacgtggggcttaccagtggcccaggtaattttttgtttcatggactatggactctttcaaagggatctgatccttttgaattttgcacagccctagatacaatcccttttgataaaagggtctttgcttctgattacaggagcactgtggaacgtctgtaaatatgtttttataattccatgtatagttggtgtacactcaaaacctgtccccggcagccagtgctctctgtatagggccataatggaattctgaagaaatcttggggagggaaggggagttggaacaaatgtctgttccctggaggccagtccagtgctcagacctttagactcattgtaagttgccactgccaacatgagaccaaagtgtgtgactagtcaatgaagtgcgacagcattaaagactgatgctaaacctc

SEQ ID NO: 5781 - DNA, 1287 bp, Homo sapiens
  source 1..1287: mol_type = unassigned DNA
aagcgacggttaggccagacgcgggggcggggtaagaagttgagtgacaggcaaggcagcatccacatgacaggcggcgccgaaggggtaaattctgagatcctgcccctgagctttcatgagctgttgaaccatctggaattcacaggcctgtcatgagagacacgatgagaagtccttaaaggcctaaaggggagtggccccagtggcggtagcggcggtggtgccaatggtacctctttcagctacacattccatggagaccctcatgccatgtttgctgagttcttcggtggcagaaatccctttgacaccttttttgggcagcggaacggggaggaaggcatggacattgatgacccattctctggcttccctatgggcatgggtggcttcaccaacgtgaactttggccgctcccgctctgcccaagagcccgcccgaaagaagcaagatcccccagtcacccacgaccttcgagtctcccttgaagagatctacagcggctgtaccaagaagatgaaaatctcccacaagcggctaaaccccgacggaaagagcattcgaaacgaagacaaaatattgaccatcgaagtgaagaaggggtggaaagaaggaaccaaaatcactttccccaaggaaggagaccagacctccaacaacattccagctgatatcgtctttgttttaaaggacaagccccacaatatctttaagagagatggctctgatgtcatttatcctgccaggatcagcctccgggaggctctgtgtggctgcacagtgaacgtccccactctggacggcaggacgatacccgtcgtattcaaagatgttatcaggcctggcatgcggcgaaaagttcctggagaaggcctccccctccccaaaacacccgagaaacgtggggacctcattattgagtttgaagtgatcttccccgaaaggattccccagacatcaagaaccgtacttgagcaggttcttccaatatagctatctgagctccccaaggactgaccagggacctttccagagctcaaggatttctggacctttctaccagttgtggaccatgagagggtgggagggcccagggagggctttcgtactgctgaatgttttccagagcatatattacaatctttcaaagtcgcacactagacttcagtggtttttcgagctatagggcatcaggtggtgggaacagcaggaaaaggcattccagtctgccccactgggtctggcagccctcccgggatgggcccacatccacctccagtccct

SEQ ID NO: 5782 - DNA, 882 bp, Homo sapiens
  source 1..882: mol_type = unassigned DNA
cgacggggacggcgcggcggagcccgctgcggacccgggctcacctgggctcggccgccggggtccgcggggcggcgcctccggctcagctgcggggcgaggggttgtgaatgcaggagccgaccccgttcgtgggcttgggggctgggttgggataattcccgggaagtgatgacctggccccggcagggcacgcaggaggcagcggccgcccaggtccggagagcggggccgcctcggagggcctaaaggggagtggccccagtggcggtagcggcggtggtgccaatggtacctctttcagctacacattccatggagaccctcatgccatgtttgctgagttcttcggtggcagaaatccctttgacaccttttttgggcagcggaacggggaggaaggcatggacattgatgacccattctctggcttccctatgggcatgggtggcttcaccaacgtgaactttggccgctcccgctctgcccaagagcccgcccgaaagaagcaagatcccccagtcacccacgaccttcgagtctcccttgaagagatctacagcggctgtaccaagaagatgaaaatctcccacaagcggctaaaccccgacggaaagagcattcgaaacgaagacaaaatattgaccatcgaagtgaagaaggggtggaaagaaggaaccaaaatcactttccccaaggaaggagaccagacctccaacaacattccagctgatatcgtctttgttttaaaggacaagccccacaatatctttaagagagatggctctgatgtcatttatcctgccaggatcagcctccgggaggctctgtgtggctgcacagtgaacgtccccactctggacggcaggacgatacccgtcg

SEQ ID NO: 5783 - DNA, 569 bp, Homo sapiens
  source 1..569: mol_type = unassigned DNA
gttcctgtgcccgttgatgattcaggctggcttctgggcttgatctggagctgactttttgtgcaaggatggtggcagtgaatgctaatgtgcctaaaggggagtggccccagtggcggtagcggcggtggtgccaatggtacctctttcagctacacattccatggagaccctcatgccatgtttgctgagttcttcggtggcagaaatccctttgacaccttttttgggcagcggaacggggaggaaggcatggacattgatgacccattctctggcttccctatgggcatgggtggcttcaccaacgtgaactttggccgctcccgctctgcccaagagcccgcccgaaagaagcaagatcccccagtcacccacgaccttcgagtctcccttgaagagatctacagcggctgtaccaagaagatgaaaatctcccacaagcggctaaaccccgacggaaagagcattcgaaacgaagacaaaatattgaccatcgaagtgaagaaggggtggaaagaaggaaccaaaatcactttccccaaggaaggagaccagacctccaacaa

SEQ ID NO: 5784 - DNA, 593 bp, Homo sapiens
  source 1..593: mol_type = unassigned DNA
gtacaccgggaacagcaggagagggctaggggctggggtcgcgggctgcggagtctggttggcgaggagatcctgcccctgagctttcatgagctgttgaaccatctggaattcacaggcctgtcatgagagacacgatgagaagtccttaaaggcctaaaggggagtggccccagtggcggtagcggcggtggtgccaatggtacctctttcagctacacattccatggagaccctcatgccatgtttgctgagttcttcggtggcagaaatccctttgacaccttttttgggcagcggaacggggaggaaggcatggacattgatgacccattctctggcttccctatgggcatgggtggcttcaccaacgtgaactttggccgctcccgctctgcccaagagcccgcccgaaagaagcaagatcccccagtcacccacgaccttcgagtctcccttgaagagatctacagcggctgtaccaagaagatgaaaatctcccacaagcggctaaaccccgacggaaagagcattcgaaacgaagacaaaatattgaccatcgaagtgaagaaggggtggaaagaaggaaccaa

SEQ ID NO: 5785 - DNA, 601 bp, Homo sapiens
  source 1..601: mol_type = unassigned DNA
gttaggccagacgcgggggcggggtaagaagttgagtgacaggcaaggcagcatccacatgacaggcggcgccgaagggatcctgcccctgagctttcatgagctgttgaaccatctggaattcacaggcctgtcatgagagacacgatgagaagtccttaaaggcctaaaggggagtggccccagtggcggtagcggcggtggtgccaatggtacctctttcagctacacattccatggagaccctcatgccatgtttgctgagttcttcggtggcagaaatccctttgacaccttttttgggcagcggaacggggaggaaggcatggacattgatgacccattctctggcttccctatgggcatgggtggcttcaccaacgtgaactttggccgctcccgctctgcccaagagcccgcccgaaagaagcaagatcccccagtcacccacgaccttcgagtctcccttgaagagatctacagcggctgtaccaagaagatgaaaatctcccacaagcggctaaaccccgacggaaagagcattcgaaacgaagacaaaatattgaccatcgaagtgaagaaggggtggaaagaaggaacc

SEQ ID NO: 5786 - DNA, 995 bp, Homo sapiens
  source 1..995: mol_type = unassigned DNA
aaagaaggaaaaagaatgggtcagcagtggccacacggcccctgtttctcgcttcttacctcgtaatgcttcatggctccctcccacggcggctactgctccgcggctgctgctgcctaactgcgcggcacagcacaggctccctacagcgctcgcaaccgcagcgatagactaaacgcggctctgcgtccgccccgcccctccaggccgcgcgcgccccgtcggccaatcagggcacgaggcgcccacgttcgcccctgctccttggggccggtccgaaccaagactaggactagcaccaggggattgaccaatcaacttgcgagaccaatcgaagggggcggaacgcctgtaggaggggctaaagagaaggggcttgaccatccaccaatccaaaggaggtctctgccccgcgcgtccctttgccacgccccctgatggcgtcgctgtggaaaccaagatcctgcccctgagctttcatgagctgttgaaccatctggaattcacaggcctgtcatgagagacacgatgagaagtccttaaaggtagatcactgattcacaggggagcaggcggaggcaagggcctaaaggggagtggccccagtggcggtagcggcggtggtgccaatggtacctctttcagctacacattccatggagaccctcatgccatgtttgctgagttcttcggtggcagaaatccctttgacaccttttttgggcagcggaacggggaggaaggcatggacattgatgacccattctctggcttccctatgggcatgggtggcttcaccaacgtgaactttggccgctcccgctctgcccaagagcccgcccgaaagaagcaagatcccccagtcacccacgaccttcgagtctcccttgaagagatctacagcggctgtaccaagaagatgaaaatctcccacaagcggctaaaccccgacggaaagagcattcgaaacgaagacaaaatattgaccatcgaag

SEQ ID NO: 5787 - DNA, 573 bp, Homo sapiens
  source 1..573: mol_type = unassigned DNA
aagcgacggttaggccagacgcgggggcggggtaagaagttgagtgacaggcaaggcagcatccacatgacaggcggcgccgaagggatcctgcccctgagctttcatgagctgttgaaccatctggaattcacaggcctgtcatgagagacacgatgagaagtccttaaaggtagatcactgattcacaggggagcaggcggaggcaagggcctaaaggggagtggccccagtggcggtagcggcggtggtgccaatggtacctctttcagctacacattccatggagaccctcatgccatgtttgctgagttcttcggtggcagaaatccctttgacaccttttttgggcagcggaacggggaggaaggcatggacattgatgacccattctctggcttccctatgggcatgggtggcttcaccaacgtgaactttggccgctcccgctctgcccaagagcccgcccgaaagaagcaagatcccccagtcacccacgaccttcgagtctcccttgaagagatctacagcggctgtaccaagaagatgaaaatctcccacaagcggctaaac

SEQ ID NO: 5788 - DNA, 567 bp, Homo sapiens
  source 1..567: mol_type = unassigned DNA
gtggaaaccaaggtaagcgacggttaggccagacgcgggggcggggtaagaagttgagtgacaggcaaggcagcatccacatgacaggcggcgccgaaggggtaaattctgagatcctgcccctgagctttcatgagctgttgaaccatctggaattcacaggcctgtcatgagagacacgatgagaagtccttaaaggtagatcactgattcacaggggagcaggcggaggcaagggcctaaaggggagtggccccagtggcggtagcggcggtggtgccaatggtacctctttcagctacacattccatggagaccctcatgccatgtttgctgagttcttcggtggcagaaatccctttgacaccttttttgggcagcggaacggggaggaaggcatggacattgatgacccattctctggcttccctatgggcatgggtggcttcaccaacgtgaactttggccgctcccgctctgcccaagagcccgcccgaaagaagcaagatcccccagtcacccacgaccttcgagtctcccttgaagagatctacagcggctgtacca

SEQ ID NO: 5789 - DNA, 573 bp, Homo sapiens
  source 1..573: mol_type = unassigned DNA
agcatccacatgacaggcggcgccgaagggatcctgcccctgagctttcatgagctgttgaaccatctggaattcacaggcctgtcatgagagacacgatgagaagtccttaaaggcgctgcgctaccacccggacaagaacaaggagcccggcgccgaggagaagttcaaggagatcgctgaggcctacgacgtgctcagcgacccgcgcaagcgcgagatcttcgaccgctacggggaggaaggcctaaaggggagtggccccagtggcggtagcggcggtggtgccaatggtacctctttcagctacacattccatggagaccctcatgccatgtttgctgagttcttcggtggcagaaatccctttgacaccttttttgggcagcggaacggggaggaaggcatggacattgatgacccattctctggcttccctatgggcatgggtggcttcaccaacgtgaactttggccgctcccgctctgcccaagagcccgcccgaaagaagcaagatcccccagtcacccacgaccttcgagtctcccttgaagagatctacagcggctgtac

SEQ ID NO: 5790 - DNA, 488 bp, Homo sapiens
  source 1..488: mol_type = unassigned DNA
gcagcatccacatgacaggcggcgccgaaggggtaaattctgagatcctgcccctgagctttcatgagctgttgaaccatctggaattcacaggcctgtcatgagagacacgatgagaagtccttaaaggtagatcactgattcacaggggagcaggcggaggcaagggtgagtcagtgcttggaactcagtcatccagatttggctctggaaacttctgaagctgtagcctttggggatccctgactgcgagtacaggaagccaacgctatgtggtcttctggaaactcattatctttttcactggtgctatctgggaaaaacagatgaaaacctgaaggtgttctgtatgtgtgctttcaaaagcaaggatctggccggacgcagtggctcaggcctgtaatcccagcactttgggaggccgaggcaggaggatcacctgaggtcaggagtttgagaccagcttggccaacatggcgaaaccatct

SEQ ID NO: 5791 - DNA, 949 bp, Homo sapiens
  source 1..949: mol_type = unassigned DNA
gcgctggtgtgggttagggctgagaaagaacgacaggaacagagacgtcgcgaggattaagtttaagacttcgcgagaacagaatttcttttggcacctcctctccgcgcgttcttgggggttgaaaggaggagcaggaggtactgatggacaaggaggtaccttccggtacacctttcatggcgatcctcatgctacatttgctgcatttttcggagggtccaacccctttgaaattttctttggaagacgaatgggtggtggtagagattctgaagaaatggaaatagatggtgatccttttagtgcctttggtttcagcatgaatggatatccaagagacaggaattctgtggggccatcccgcctcaaacaagatcctccagttattcatgaacttagagtatcacttgaagagatatatagtggttgtaccaaacggatgaagatttctcgaaaaaggctaaacgctgatggaaggagttacagatctgaggacaaaattcttaccattgagattaaaaaagggtggaaagaaggcaccaaaattacttttccaagagaaggagatgaaacaccaaatagtattccagcagacattgtttttatcattaaagacaaagatcatccaaaatttaaaagggatggatcaaatataatttatactgctaaaattagtttacgagaggcattgtgtggctgctcaattaatgtaccaacactggatggaagaaacatacctatgtcagtaaatgatattgtgaaacccggaatgaggagaagaattattggatatgggctgccatttccaaaaaatcctgaccaacgtggtgaccttctaatagaatttgaggtgtccttcccagatactatatcttcttcatccaaagaagtacttaggaaacatcttcctgcctcatagaatgaagaactttgttacacatatttt

SEQ ID NO: 5792 - DNA, 737 bp, Homo sapiens
  source 1..737: mol_type = unassigned DNA
taagtttaagacttcgcgagaacagaatttcttttggcacctcctctccgcgcgttcttggggctggagtgcagtggcacgatcttggctcactgaaacctcagcctcccaggttcaagagattctcccacctcagcctctggagtagctgggatcacagagtctctgttgcccaggctggaatgcaatggtgcgatctcagtcactacaacctctgcctcccgggttcaagcgattatcctgcttcagcctcccgagtagctggaattacagggttgaaaggaggagcaggaggtactgatggacaaggaggtaccttccggtacacctttcatggcgatcctcatgctacatttgctgcatttttcggagggtccaacccctttgaaattttctttggaagacgaatgggtggtggtagagattctgaagaaatggaaatagatggtgatccttttagtgcctttggtttcagcatgaatggatatccaagagacaggaattctgtggggccatcccgcctcaaacaagatcctccagttattcatgaacttagagtatcacttgaagagatatatagtggttgtaccaaacggatgaagatttctcgaaaaaggctaaacgctgatggaaggagttacagatctgaggacaaaattcttaccattgagattaaaaaagggtggaaagaaggcaccaaaattacttttccaagagaaggagatgaaacaccaaat

SEQ ID NO: 5793 - DNA, 906 bp, Homo sapiens
  source 1..906: mol_type = unassigned DNA
gcgcgttcttggggtgaggctgggtaattgttcctgcagggtggtgggtgatagtggccagttgactgcgactgtgtttgggtggtgggaagcctgaagaaaaggttgtttcttaccggtcgctgcctcagggaggtagtgcggtagaattttccgctatgggtcattctcggtgtccgcggggaagggcgtgacaacgacgggcgtgacggcgaagcaacagtgtctcgagagcgctgccgcccggagggcgccaggagaagtgcgtccgagacgccgcgcggtgatgctcctgaaaacgtctgcccggcgtagcgggaacccagcatgattttcaggggttgaaaggaggagcaggaggtactgatggacaaggaggtaccttccggtacacctttcatggcgatcctcatgctacatttgctgcatttttcggagggtccaacccctttgaaattttctttggaagacgaatgggtggtggtagagattctgaagaaatggaaatagatggtgatccttttagtgcctttggtttcagcatgaatggatatccaagagacaggaattctgtggggccatcccgcctcaaacaagatcctccagttattcatgaacttagagtatcacttgaagagatatatagtggttgtaccaaacggatgaagatttctcgaaaaaggctaaacgctgatggaaggagttacagatctgaggacaaaattcttaccattgagattaaaaaagggtggaaagaaggcaccaaaattacttttccaagagaaggagatgaaacaccaaatagtattccagcagacattgtttttatcattaaagacaaagatcatccaaaatttaaaagggatggatcaaatataatttatactgctaaaattagtttacgag

SEQ ID NO: 5794 - DNA, 686 bp, Homo sapiens
  source 1..686: mol_type = unassigned DNA
gttaaggtctcttaagttaagaacagcattgtttcttgaccaaaatagattttgtagcttcttaggcgtagtttctcccaccccatcctgtgggtactcaaatgtaagatcatattctgaattgtcatcacaggactagggaaatctaagttaatttcaaggcattcgaaatggggaaagactattattgcattttgggaattgagaaaggagcttcagatgaagatattaaaaaggcttaccgaaaacaagccctcaaatttcatccggacaagaacaaatctcctcaggcagaggaaaaatttaaagaggtcgcagaagcttatgaagtattgagtgatcctaaaaagagagaaatatatgatcagtttggggaggaagggttgaaaggaggagcaggaggtactgatggacaaggaggtaccttccggtacacctttcatggcgatcctcatgctacatttgctgcatttttcggagggtccaacccctttgaaattttctttggaagacgaatgggtggtggtagagattctgaagaaatggaaatagatggtgatccttttagtgcctttggtttcagcatgaatggatatccaagagacaggaattctgtggggccatcccgcctcaaacaagatcctccagttattcatgaacttagagtatcacttgaagagatatat

SEQ ID NO: 5795 - DNA, 2988 bp, Homo sapiens
  source 1..2988: mol_type = unassigned DNA
agagacacgtagtgaaaatgggaggatctagaaggaggctgtctcctgtgtagtgtatatttatctgtaagtgagccgttggggaaggattgaatacagagacgctgtctgcttgctgccttaagacagctagctgaattgctgattaacttttaaaatacccagcttggtttatttttcttagaatctgttgctaagactggggacgctgttttcttttacaaagggaaatctaagttaatttcaaggcattcgaaatggggaaagactattattgcattttgggaattgagaaaggagcttcagatgaagatattaaaaaggcttaccgaaaacaagccctcaaatttcatccggacaagaacaaatctcctcaggcagaggaaaaatttaaagaggtcgcagaagcttatgaagtattgagtgatcctaaaaagagagaaatatatgatcagtttggggaggaagggttgaaaggaggagcaggaggtactgatggacaaggaggtaccttccggtacacctttcatggcgatcctcatgctacatttgctgcatttttcggagggtccaacccctttgaaattttctttggaagacgaatgggtggtggtagagattctgaagaaatggaaatagatggtgatccttttagtgcctttggtttcagcatgaatggatatccaagagacaggaattctgtggggccatcccgcctcaaacaagatcctccagttattcatgaacttagagtatcacttgaagagatatatagtggttgtaccaaacggatgaagatttctcgaaaaaggctaaacgctgatggaaggagttacagatctgaggacaaaattcttaccattgagattaaaaaagggtggaaagaaggcaccaaaattacttttccaagagaaggagatgaaacaccaaatagtattccagcagacattgtttttatcattaaagacaaagatcatccaaaatttaaaagggatggatcaaatataatttatactgctaaaattagtttacgagaggcattgtgtggctgctcaattaatgtaccaacactggatggaagaaacatacctatgtcagtaaatgatattgtgaaacccggaatgaggagaagaattattggatatgggctgccatttccaaaaaatcctgaccaacgtggtgaccttctaatagaatttgaggtgtccttcccagatactatatcttcttcatccaaagaagtacttaggaaacatcttcctgcctcatagaatgaagaactttgttacacatattttgataaggcactgaaaatataaaaggactggtagtttactgatgtagatgtgaattctgtataaagatgtgtaaattcttttgagggttcattaaattgcatgaatagagacgggtcaaataaataggcaaaagggatttttacagttagagataaaagagaaaaccattcactgtattttatttcatttctcctgattcagatatttttagtaatttgcttatatgtaaaagttgtttttgtggagtcagtggatatatttctaatgaagtgctagactatccaattacttaatttcttatacctttagataatcagtatgaaaagttcccatttataatggaaatgaaaattcttaactaaactatacatgtaatatgtatttctagaagagaataaaaacccaagtcagttattagatttaaatcaccttctgaaatgctgctatagggctggtatctgtaaaagaatatcctgatgcatctgtttcaccattttgatttttaaagtatgctgtagcatttcttaataacatcgttgtgatgttcttaaggcagatctttcttcataaaaaggaaagtaatggcaatttctctcctgtggaaatcccaattgcttgaattactgatattttagaatagactttttaaaatgccatatgtaattttatgcaagttgactatatatcttgtacttaataaattataggctcattttgttctctgctagtttaaagtaattcgtttaataatagatgtgtttttagaggaaatgctgttacttggaattaattttccagttatacagtcttctataacttactaataatattctatatgtactttatgtaatttccctaaaaagaatgaactaccactacactatggtgttaaaccaaaatatagggaaaataaacactaactgctgcttatggataatgttgcaactacttgttatgcatataaatattttactttttcacatgtatagattgcatttcttaggtgttttaattttttaaatatatttatgttttaaaaatttagttttgttttctgttttataactatagtgagaatgatgttttgaagcaaaatttttggttataaaatagttttcaggattatatatatatatactggatcctatcgccttttagtagaatatgaaatattcttttagaaatccaatataaataggttataatagccatattctttattactttattgagatataatttacatgccataaagtttacccttaaaatatataattcagtggtttttagtgatatttacaaagtggtacaatcatcatcactttctaattccagaatattttcatcaccccaaaaagaaatcctaaatccattagcagttacttcccattcttcccttcctccagcccctgaaaacactaccatctacttttcatctgtatggatttgtctgttctggacatttcacataaatagactcaaacaatatatggctttttttttttttggtctggcctctttcatttagcttaatgttttcaaggttcatctatgttgtatcacgtatcagtactttattttttgtgtggcacgtcatatggatataccacaatttgtttatcttttcattaattatgggcatttggcttatttctacttttttggctattataaataatgctgctgtgaa

SEQ ID NO: 5796 - DNA, 673 bp, Homo sapiens
  source 1..673: mol_type = unassigned DNA
gggaaggattgaatacagagacgctgtctgcttgctgccttaagacagctagctgaattgctgattaacttttaaaatacccagcttggtttatttttcttagaatctgttgctaagactggggacgctgttttcttttacaaagggaaatctaagttaatttcaaggcattcgaaatggggaaagactattattgcattttgggaattgagaaaggagcttcagatgaagatattaaaaaggcttaccgaaaacaagccctcaaatttcatccggacaagaacaaatctcctcaggcagaggaaaaatttaaagaggtcgcagaagcttatgaagtattgagtgatcctaaaaagagagaaatatatgatcagtttggggaggaaggcattgtgtggctgctcaattaatgtaccaacactggatggaagaaacatacctatgtcagtaaatgatattgtgaaacccggaatgaggagaagaattattggatatgggctgccatttccaaaaaatcctgaccaacgtggtgaccttctaatagaatttgaggtgtccttcccagatactatatcttcttcatccaaagaagtacttaggaaacatcttcctgcctcatagaatgaagaactttgttacacatattttgataaggcactgaaaatataaaagg

SEQ ID NO: 5797 - DNA, 5228 bp, Homo sapiens
  source 1..5228: mol_type = unassigned DNA
cgagggaggagactcccgtcagtgacttcattgagtaggttcttggggattggggtcgggtcctccccagtgagaggcgacaggagctcactgcctctcgggccctcacaatcacacctgtcacaggtatacacgctgccactcacaaacacacgcttgcactcccagcctcactgacacgctgccatacagccgctcacagccagccagacactgctgcacctgagagcaggtggccgcgggtcttctcccttcactctccacatttggggatcaggtccggcacctgctgcgccagacaggccttgctgggcacgcgcctctgagagtccaaggaggtggcttccagagctgcagcacttcaggccggctccggtggagcgatcagaggtgaggggcttggctgggcatgtttaagcgcacagtgctctcctgcccacccccagcagcacccccactgcaggcccgaggagctttccggagcttcccacactcctggggagaagacttcttagccagcttgatgtttaaaattcagctggagcccttaaaacttcgagcgtggacgctgaatgggtttgtaaagtttcggtaagtccctccggagaagggcactcacacccatacccagtcaaaccctccacgcggccatcccctccattgccttcctgcttcctccaactcatcctcatcccctctgtgacatacaggaacccccctccggcctcacccacatatttgaatgaattgcaccccttatcattccttttctcaaacccttcaggtatccattttccacagacatttcctccattatttcaactctccacattcctccctttcaacccatcattaacccattttccacctcagccatttccatctgtcactcatccccctccatcagtacctcattttctgtatcagccatctcccctccctgtacctcaacagtccccctcgccattttctccccatttttccttcctgcctctaccttaacatcctcctcattcttctccatcaaaggcagtgccatgccatggggctcctttgtcattccaacacgtggcctgtgggtaggggggaagggaaggagggaggaaagcagaaagagaaaaaggaggcagatcctgaaagagcttgccctgtgtctgcggaggcaagagatgtatgggcctagagcagctagcaggtgggtaccagggaggaagctggccgggtgtggaggtaatgcagggacaccaaaaggaggtgggtggttggtgagccgttccactggccctctgcctggaagctgctctcgttctctaggggcaccctcttggtgtgctagggttctttcccagtcccaggggaaagaaggtgtgggttgaggcagaaatggcagaccacccccccccgctccctctcagacggcttttgctgccatttccgaaaacggttgcccccccccccaacgaggtgctctttcttctctgcctctcccaaccccaccccccaccccatctcccccacagacgtgacatgctggtggggggcaatgggggagtacccgcctttgtggagccttttcttcgtcagagaaaggtgactcccagaaccatgagtcaacccagccacctgcagcagggcctgtgggggcagcagtgagggccattgtccctgcccacctagggccttgggcgcctcccccttacccggttacaggcctcactcctggaaggacaccctgtacacctccctgctgtgaagcagtcagaggcagaaaggcaggtctcagctgtggctgccagcctaggacattgctagaaagactctggttctcctggctttggcaggggttggccaagtctcagaagggctgagaatggcttctggccatcccccagagagctctagctacaggaaagtcccccttcccctgatatccaccacagacacaccgatagagggagactggaatggaagaattcgggttgtacgtttctcttataacaaatgctcctgcacccaccttaaaagggactcagaggaatatgggtctgatgatgggccggatcctaaaccacagggtggactgggggcgtagggtgaggctaggagaggtattaaggaaatggtggttggttagtgcccaattgtctcctaacagctggggttgaaaaagtcctgtccccaggatgcttttgttcactcacactggtgcttaggcggcacagccctcacagttttgtgtgtagacgctggcaaatgagtaaagggaactgttgccctggttgggggaaggatagtgtcgccccccctgctaatgagggagttggaaacagcagtttccaaaggctgtgagtcaccctgtgatctgagtcacacgtgaggcttagcatcgtcagaggggtgggggcggggaggcctggggtctccgatggcagacaggactccagacacccattccctgactcagtctggctggccaggacagctggcggaagacccaggcctgttcccggtcctgggccactgccccagctgccctcagcctgggcaccatgcctgaggcgtggcgtaggagaccacgatgctcaggtgacctcacccgttacactgaccttcgccagctcctgtgtgtgggtcgctcagtccatggtgccacctcgctcagcagggcctctcaggggtcctcagtctggcccaaggaccagggcctcagcctagccccaagagtgggccacaaccttcagcttcctgctgggaaaacccaggaggtgaggacggaatcacagaattctagaatgtcagagccagaagagatcatctagtccaaacctttcattttacagatggggggacgcaggcccacagaacaggcatgacctgctgaaggttacccagggagtcatttagggattgcaagatcatcaggaacagggctggggcagaagagaaggcatcaagtcttggccctgggtttctttcagaaacaaggagaccagtgctggtccagtggctgtgatgggaaaagattattacaagattcttgggatcccatcgggggccaacgaggatgagatcaagaaagcctaccggaagatggccttgaagtaccacccagacaagaataaagaacccaacgctgaggagaagtttaaggagattgcagaggcctatgatgtgctaagtgaccccaagaaacggggcctgtatgaccagtatggggaggaaggcctgaagaccggcggtggcacatcaggtggctccagtggctcctttcactacacctttcatggggacccccatgccacctttgcctccttctttggtggctccaaccccttcgatatcttctttgccagcagccgctccactcggcccttcagtggctttgacccagatgacatggatgtggatgaagatgaggacccatttggcgctttcggccgttttggcttcaatgggctgagtaggggtccaaggcgagccccagaaccactgtaccctcggcgcaaggtgcaggaccccccagtggtgcacgagctgcgggtgtccctggaggagatctaccatggctccaccaagcgcatgaagatcacaaggcgtcgcctcaaccctgatgggcgaactgtgcgcaccgaggacaagatcctgcacatagtcatcaagcgtggctggaaggaaggcaccaagatcaccttccccaaagaaggcgacgccacacctgacaacatccctgctgacatcgtctttgtgctcaaagacaagccccatgcacacttccgccgagatggcaccaacgtgctctacagtgccctgatcagcctcaaggaggcgctgtgtggctgcactgtgaacattcccactatcgacggccgagtgatccctttgccctgcaatgatgtcatcaagccaggcaccgtgaagagactccgtggggagggccttcccttccccaaagtgccaactcagcgaggagacctcattgttgagttcaaagttcgcttcccagacagattaacaccacagacaagacagatccttaagcagcacctaccctgttcctaggctctgccccagccagtccagagcctaccacagcaatacccccaacactcactccactcaatgtgcacccagcttgatgtccactggacactggcaactttttctaaaatgcaaaaaaaagccactggttttcaggaaaatgttcctgtccctgaccccttttagagctgggctgcctggggggagtgggagggaggtggggagagctagcccaggccaggggtcaatgttcatgtcactagctttcaatccagtttccactgcagtggctggagagtgacctgagtgctacttgaagatatgtagagattccttatccatgcctgtacatagcatgtcctcctcccctcagctttgctaataccagtcccctcccttccctttggcttcctgctgttgggggtggaaaagactagaaaggacattgctttctcagccccacccccaggtccacagtgtccaaggtaatggcacacatattcatgcacaagaagcactcacctagagctgtctgtgcctctctgggagaaaggagagaggataagaagggaaagttcacaacctgtgaacagggacttgagcacgagacacttttcatctggagcaggggggtgagctcctcagcagcctccgtaacagctgccctgcctacacctgcagagctggaggttctgtcctccctgctgctctcaggagtgttcaagggtggagggcagggaatggggcctgaggtattaaggctaagaggtgggggacagggcccatctaccagccttcatcaggaagggaaagggctttggggtcaggtggcagctattccccaccaagagattcagggtcacaggtttttccccacacctctgaactcagggcctagccacccccaaacttccaaatcccacttttgtgatatgtgaagctactcatttcttacccttggaggctgtgtggggaatttccagcccttttatgcctgtgtgatcccaccccacccccatagttgtataaaggtcatagtgaagaagctgggggaagactgcttcagccagatcctggggtggggtctttaggttttctcactttgacaacccccgaatgtttttatagtagtttttttgtatttttttgtaatgacagtattatgtaaaaaataaagtattttaaaaata

SEQ ID NO: 5798 - DNA, 2818 bp, Homo sapiens
  source 1..2818: mol_type = unassigned DNA
cattgagtaggttcttggggattggggtcgggtcctccccagtgagaggcgacaggagctcactgcctctcgggccctcacaatcacacctgtcacaggtatacacgctgccactcacaaacacacgcttgcactcccagcctcactgacacgctgccatacagccgctcacagccagccagacactgctgcacctgagagcaggtggccgcgggtcttctcccttcactctccacatttggggatcaggtccggcacctgctgcgccagacaggccttgctgggcacgcgcctctgagagtccaaggaggtggcttccagagctgcagcacttcaggccggctccggtggagcgatcagaggtgaggggcttggctgggcatgtttaagcgcacagtgctctcctgcccacccccagcagcacccccactgcaggcccgaggagctttccggagcttcccacactcctggggagaagacttcttagccagcttgatgtttaaaattcagctggagcccttaaaacttcgagcgtggacgctgaatgggtttgtaaagtttcgaaacaaggagaccagtgctggtccagtggctgtgatgggaaaagattattacaagattcttgggatcccatcgggggccaacgaggatgagatcaagaaagcctaccggaagatggccttgaagtaccacccagacaagaataaagaacccaacgctgaggagaagtttaaggagattgcagaggcctatgatgtgctaagtgaccccaagaaacggggcctgtatgaccagtatggggaggaaggcctgaagaccggcggtggcacatcaggtggctccagtggctcctttcactacacctttcatggggacccccatgccacctttgcctccttctttggtggctccaaccccttcgatatcttctttgccagcagccgctccactcggcccttcagtggctttgacccagatgacatggatgtggatgaagatgaggacccatttggcgctttcggccgttttggcttcaatgggctgagtaggggtccaaggcgagccccagaaccactgtaccctcggcgcaaggtgcaggaccccccagtggtgcacgagctgcgggtgtccctggaggagatctaccatggctccaccaagcgcatgaagatcacaaggcgtcgcctcaaccctgatgggcgaactgtgcgcaccgaggacaagatcctgcacatagtcatcaagcgtggctggaaggaaggcaccaagatcaccttccccaaagaaggcgacgccacacctgacaacatccctgctgacatcgtctttgtgctcaaagacaagccccatgcacacttccgccgagatggcaccaacgtgctctacagtgccctgatcagcctcaaggaggcgctgtgtggctgcactgtgaacattcccactatcgacggccgagtgatccctttgccctgcaatgatgtcatcaagccaggcaccgtgaagagactccgtggggagggccttcccttccccaaagtgccaactcagcgaggagacctcattgttgagttcaaagttcgcttcccagacagattaacaccacagacaagacagatccttaagcagcacctaccctgttcctaggctctgccccagccagtccagagcctaccacagcaatacccccaacactcactccactcaatgtgcacccagcttgatgtccactggacactggcaactttttctaaaatgcaaaaaaaagccactggttttcaggaaaatgttcctgtccctgaccccttttagagctgggctgcctggggggagtgggagggaggtggggagagctagcccaggccaggggtcaatgttcatgtcactagctttcaatccagtttccactgcagtggctggagagtgacctgagtgctacttgaagatatgtagagattccttatccatgcctgtacatagcatgtcctcctcccctcagctttgctaataccagtcccctcccttccctttggcttcctgctgttgggggtggaaaagactagaaaggacattgctttctcagccccacccccaggtccacagtgtccaaggtaatggcacacatattcatgcacaagaagcactcacctagagctgtctgtgcctctctgggagaaaggagagaggataagaagggaaagttcacaacctgtgaacagggacttgagcacgagacacttttcatctggagcaggggggtgagctcctcagcagcctccgtaacagctgccctgcctacacctgcagagctggaggttctgtcctccctgctgctctcaggagtgttcaagggtggagggcagggaatggggcctgaggtattaaggctaagaggtgggggacagggcccatctaccagccttcatcaggaagggaaagggctttggggtcaggtggcagctattccccaccaagagattcagggtcacaggtttttccccacacctctgaactcagggcctagccacccccaaacttccaaatcccacttttgtgatatgtgaagctactcatttcttacccttggaggctgtgtggggaatttccagcccttttatgcctgtgtgatcccaccccacccccatagttgtataaaggtcatagtgaagaagctgggggaagactgcttcagccagatcctggggtggggtctttaggttttctcactttgacaacccccgaatgtttttatagtagtttttttgtatttttttgtaatgacagtattatgtaaaaaataaagtattttaaaaatatggca

SEQ ID NO: 5799 - DNA, 3068 bp, Homo sapiens
  source 1..3068: mol_type = unassigned DNA
ggggattggggtcgggtcctccccagtgagaggcgacaggagctcactgcctctcgggccctcacaatcacacctgtcacaggtatacacgctgccactcacaaacacacgcttgcactcccagcctcactgacacgctgccatacagccgctcacagccagccagacactgctgcacctgagagcaggtggccgcgggtcttctcccttcactctccacatttggggatcaggtccggcacctgctgcgccagacaggccttgctgggcacgcgcctctgagagtccaaggaggtggcttccagagctgcagcacttcaggccggctccggtggagcgatcagagaaacaaggagaccagtgctggtccagtggctgtgatgggaaaagattattacaagattcttgggatcccatcgggggccaacgaggatgagatcaagaaagcctaccggaagatggccttgaagtaccacccagacaagaataaagaacccaacgctgaggagaagtttaaggagattgcagaggcctatgatgtgctaagtgaccccaagaaacggggcctgtatgaccagtatggggaggaaggcctgaagaccggcggtggcacatcaggtggctccagtggctcctttcactacacctttcatggggacccccatgccacctttgcctccttctttggtggctccaaccccttcgatatcttctttgccagcagccgctccactcggcccttcagtggctttgacccagatgacatggatgtggatgaagatgaggacccatttggcgctttcggccgttttggcttcaatgggctgagtaggggtccaaggcgagccccagaaccactgtaccctcggcgcaaggtgcaggaccccccagtggtgcacgagctgcgggtgtccctggaggagatctaccatggctccaccaagcgcatgaagatcacaaggcgtcgcctcaaccctgatgggcgaactgtgcgcaccgaggacaagatcctgcacatagtcatcaagcgtggctggaaggaaggcaccaagatcaccttccccaaagaaggcgacgccacacctgacaacatccctgctgacatcgtctttgtgctcaaagacaagccccatgcacacttccgccgagatggcaccaacgtgctctacagtgccctgatcagcctcaaggaggcgctgtgtggctgcactgtgaacattcccactatcgacggccgagtgatccctttgccctgcaatgatgtcatcaagccaggcaccgtgaagagactccgtggggagggccttcccttccccaaagtgccaactcagcgaggagacctcattgttgagttcaaagttcgcttcccagacagattaacaccacagacaagacagatccttaagcagcacctaccctgttcctaggctctgccccagccagtccagagcctaccacagcaatacccccaacactcactccactcaatgtgcacccagcttgatgtccactggacactggcaactttttctaaaatgcaaaaaaaagccactggttttcaggaaaatgttcctgtccctgaccccttttagagctgggctgcctggggggagtgggagggaggtggggagagctagcccaggccaggggtcaatgttcatgtcactagctttcaatccagtttccactgcagtggctggagagtgacctgagtgctacttgaagatatgtagagattccttatccatgcctgtacatagcatgtcctcctcccctcagctttgctaataccagtcccctcccttccctttggcttcctgctgttgggggtggaaaagactagaaaggacattgctttctcagccccacccccaggtccacagtgtccaaggtaatggcacacatattcatgcacaagaagcactcacctagagctgtctgtgcctctctgggagaaaggagagaggataagaagggaaagttcacaacctgtgaacagggacttgagcacgagacacttttcatctggagcaggggggtgagctcctcagcagcctccgtaacagctgccctgcctacacctgcagagctggaggttctgtcctccctgctgctctcaggagtgttcaagggtggagggcagggaatggggcctgaggtattaaggctaagaggtgggggacagggcccatctaccagccttcatcaggaagggaaagggctttggggtcaggtggcagctattccccaccaagagattcagggtcacaggtttttccccacacctctgaactcagggcctagccacccccaaacttccaaatcccacttttgtgatatgtgaagctactcatttcttacccttggaggctgtgtggggaatttccagcccttttatgcctgtgtgatcccaccccacccccatagttgtataaaggtcatagtgaagaagctgggggaagactgcttcagccagatcctggggtggggtctttaggttttctcactttgacaacccccgaatgtttttatagtagtttttttgtatttttttgtaatgacagtattatgtaaaaaataaagtattttaaaaatatggcatctgagcaggagcaacaaacctgggatgggggtggctgaggagggccactgtcatcctccctcccgggctctggtcacctttgagaagcccaagcaggccctcagtataagctgaagctgacctctgccttcctcgaagcctcctgggatttctaaaacttatacttcaaacacagcacagacagaaagtaccactcagctattagaagaaacatctatttgggaaggaaaaatatccctgctcatgagagacagagaccattgtcttcagatgtgctagcatgaaaacagattttctcttcttgtctaaattttctctgagtcagacaaattttccttctaggagaaaatttttttctaggagggggtggagaactttttttttttttttttttttttgacacggagtcttgctctgtcgcccaggctggagtgcagtgatgcgatcttggttcactgcagcctct

SEQ ID NO: 5800 - DNA, 683 bp, Homo sapiens
  source 1..683: mol_type = unassigned DNA
aggaggcagatcctgaaagagcttgccctgtgtctgcggaggcaagagatgtatgggcctagagcagctagcagaaacaaggagaccagtgctggtccagtggctgtgatgggaaaagattattacaagattcttgggatcccatcgggggccaacgaggatgagatcaagaaagcctaccggaagatggccttgaagtaccacccagacaagaataaagaacccaacgctgaggagaagtttaaggagattgcagaggcctatgatgtgctaagtgaccccaagaaacggggcctgtatgaccagtatggggaggaaggcctgaagaccggcggtggcacatcaggtggctccagtggctcctttcactacacctttcatggggacccccatgccacctttgcctccttctttggtggctccaaccccttcgatatcttctttgccagcagccgctccactcggcccttcagtggctttgacccagatgacatggatgtggatgaagatgaggacccatttggcgctttcggccgttttggcttcaatgggctgagtaggggtccaaggcgagccccagaaccactgtaccctcggcgcaaggtgcaggaccccccagtggtgcacgagctgcgggtgtccctggaggagatctaccatggctccaccaagcgcatgaagat

SEQ ID NO: 5801 - DNA, 615 bp, Homo sapiens
  source 1..615: mol_type = unassigned DNA
cacctcgctcagcagggcctctcaggggtcctcagtctggcccaaggaccagggcctcagcctagccccaagagtgggccacaaccttcagcttcctgctgggaaaacccaggagaaacaaggagaccagtgctggtccagtggctgtgatgggaaaagattattacaagattcttgggatcccatcgggggccaacgaggatgagatcaagaaagcctaccggaagatggccttgaagtaccacccagacaagaataaagaacccaacgctgaggagaagtttaaggagattgcagaggcctatgatgtgctaagtgaccccaagaaacggggcctgtatgaccagtatggggaggaaggcctgaagaccggcggtggcacatcaggtggctccagtggctcctttcactacacctttcatggggacccccatgccacctttgcctccttctttggtggctccaaccccttcgatatcttctttgccagcagccgctccactcggcccttcagtggctttgacccagatgacatggatgtggatgaagatgaggacccatttggcgctttcggccgttttggcttcaatgggctgagtaggggtccaaggcgag

SEQ ID NO: 5802 - DNA, 851 bp, Homo sapiens
  source 1..851: mol_type = unassigned DNA
gtcccgggtggaggcggcggagccggagccgggggagggggcagcggctgtctcacggaccacggcggcgcccgcagctcctcaccggtccggcacctgctgcgccagacaggccttgctgggcacgcgcctctgagagtccaaggaggtggcttccagagctgcagcacttcaggccggctccggtggagcgatcagagaaacaaggagaccagtgctggtccagtggctgtgatgggaaaagattattacaagattcttgggatcccatcgggggccaacgaggatgagatcaagaaagcctaccggaagatggccttgaagtaccacccagacaagaataaagaacccaacgctgaggagaagtttaaggagattgcagaggcctatgatgtgctaagtgaccccaagaaacggggcctgtatgaccagtatggggaggaaggcctgaagaccggcggtggcacatcaggtggctccagtggctcctttcactacacctttcatggggacccccatgccacctttgcctccttctttggtggctccaaccccttcgatatcttctttgccagcagccgctccactcggcccttcagtggctttgacccagatgacatggatgtggatgaagatgaggacccatttggcgctttcggccgttttggcttcaatgggctgagtaggggtccaaggcgagccccagaaccactgtaccctcggcgcaaggtgcaggaccccccagtggtgcacgagctgcgggtgtccctggaggagatctaccatggctccaccaagcgcatgaagatcacaaggcgtcgcctcaaccctgatgggcgaactgtgcgcac

SEQ ID NO: 5803 - DNA, 852 bp, Homo sapiens
  source 1..852: mol_type = unassigned DNA
cgggtggaggcggcggagccggagccgggggagggggcagcggctgtctcacggaccacggcggcgcccgcagctcctcaccgaaacaaggagaccagtgctggtccagtggctgtgatgggaaaagattattacaagattcttgggatcccatcgggggccaacgaggatgagatcaagaaagcctaccggaagatggccttgaagtaccacccagacaagaataaagaacccaacgctgaggagaagtttaaggagattgcagaggcctatgatgtgctaagtgaccccaagaaacggggcctgtatgaccagtatggggaggaagcagccgctccactcggcccttcagtggctttgacccagatgacatggatgtggatgaagatgaggacccatttggcgctttcggccgttttggcttcaatgggctgagtaggggtccaaggcgagccccagaaccactgtaccctcggcgcaaggtgcaggaccccccagtggtgcacgagctgcgggtgtccctggaggagatctaccatggctccaccaagcgcatgaagatcacaaggcgtcgcctcaaccctgatgggcgaactgtgcgcaccgaggacaagatcctgcacatagtcatcaagcgtggctggaaggaaggcaccaagatcaccttccccaaagaaggcgacgccacacctgacaacatccctgctgacatcgtctttgtgctcaaagacaagccccatgcacacttccgccgagatggcaccaacgtgctctacagtgccctgatcagcctcaaggaggcgctgtgtggctgcactgtgaacattcccactatcgacggccgagtgatcc

SEQ ID NO: 5804 - DNA, 484 bp, Homo sapiens
  source 1..484: mol_type = unassigned DNA
gtcccgggtggaggcggcggagccggagccgggggagggggcagcggctgtctcacggaccacggcggcgcccgcagctcctcaccggtatacacgctgccactcacaaacacacgcttgcactcccagcctcactgacacgctgccatacagccgctcacagccagccagacactgctgcacctgagagcaggtggccgcgggtcttctcccttcactctccacatttggggatcaggtccggcacctgctgcgccagacaggccttgctgggcacgcgcctctgagagtccaaggaggtggcttccagagctgcagcacttcaggccggctccggtggagcgatcagagaaacaaggagaccagtgctggtccagtggctgtgatgggaaaagattattacaagattcttgggatcccatcgggggccaacgaggatgagatcaagaaagcctaccggaagatggccttgaagtaccaccca

SEQ ID NO: 5805 - DNA, 2391 bp, Homo sapiens
  source 1..2391: mol_type = unassigned DNA
gggggcgggctcccggtcccgctatcggcggccggcgggcaggcgactcctgtcccgggtggaggcggcggagccggagccgggggagggggcagcggctgtctcacggaccacggcggcgcccgcagctcctcaccgaaacaaggagaccagtgctggtccagtggctgtgatgggaaaagattattacaagattcttgggatcccatcgggggccaacgaggatgagatcaagaaagcctaccggaagatggccttgaagtaccacccagacaagaataaagaacccaacgctgaggagaagtttaaggagattgcagaggcctatgatgtgctaagtgaccccaagaaacggggcctgtatgaccagtatggggaggaaggcctgaagaccggcggtggcacatcaggtggctccagtggctcctttcactacacctttcatggggacccccatgccacctttgcctccttctttggtggctccaaccccttcgatatcttctttgccagcagccgctccactcggcccttcagtggctttgacccagatgacatggatgtggatgaagatgaggacccatttggcgctttcggccgttttggcttcaatgggctgagtaggggtccaaggcgagccccagaaccactgtaccctcggcgcaaggtgcaggaccccccagtggtgcacgagctgcgggtgtccctggaggagatctaccatggctccaccaagcgcatgaagatcacaaggcgtcgcctcaaccctgatgggcgaactgtgcgcaccgaggacaagatcctgcacatagtcatcaagcgtggctggaaggaaggcaccaagatcaccttccccaaagaaggcgacgccacacctgacaacatccctgctgacatcgtctttgtgctcaaagacaagccccatgcacacttccgccgagatggcaccaacgtgctctacagtgccctgatcagcctcaaggaggcgctgtgtggctgcactgtgaacattcccactatcgacggccgagtgatccctttgccctgcaatgatgtcatcaagccaggcaccgtgaagagactccgtggggagggccttcccttccccaaagtgccaactcagcgaggagacctcattgttgagttcaaagttcgcttcccagacagattaacaccacagacaagacagatccttaagcagcacctaccctgttcctaggctctgccccagccagtccagagcctaccacagcaatacccccaacactcactccactcaatgtgcacccagcttgatgtccactggacactggcaactttttctaaaatgcaaaaaaaagccactggttttcaggaaaatgttcctgtccctgaccccttttagagctgggctgcctggggggagtgggagggaggtggggagagctagcccaggccaggggtcaatgttcatgtcactagctttcaatccagtttccactgcagtggctggagagtgacctgagtgctacttgaagatatgtagagattccttatccatgcctgtacatagcatgtcctcctcccctcagctttgctaataccagtcccctcccttccctttggcttcctgctgttgggggtggaaaagactagaaaggacattgctttctcagccccacccccaggtccacagtgtccaaggtaatggcacacatattcatgcacaagaagcactcacctagagctgtctgtgcctctctgggagaaaggagagaggataagaagggaaagttcacaacctgtgaacagggacttgagcacgagacacttttcatctggagcaggggggtgagctcctcagcagcctccgtaacagctgccctgcctacacctgcagagctggaggttctgtcctccctgctgctctcaggagtgttcaagggtggagggcagggaatggggcctgaggtattaaggctaagaggtgggggacagggcccatctaccagccttcatcaggaagggaaagggctttggggtcaggtggcagctattccccaccaagagattcagggtcacaggtttttccccacacctctgaactcagggcctagccacccccaaacttccaaatcccacttttgtgatatgtgaagctactcatttcttacccttggaggctgtgtggggaatttccagcccttttatgcctgtgtgatcccaccccacccccatagttgtataaaggtcatagtgaagaagctgggggaagactgcttcagccagatcctggggtggggtctttaggttttctcactttgacaacccccgaatgtttttatagtagtttttttgtatttttttgtaatgacagtattatgtaaaaaataaagtattttaaaaatatgg

SEQ ID NO: 5806 - DNA, 2589 bp, Homo sapiens
  source 1..2589: mol_type = unassigned DNA
ctgagctgagtgacaggaagacggttcaatgggcggcgcggaggcggagccgtgggggcgggctcccggtcccgctatcggcggccggcgggcaggcgactcctgtcccgggtggaggcggcggagccggagccgggggagggggcagcggctgtctcacggaccacggcggcgcccgcagctcctcaccgcagcacccccactgcaggcccgaggagctttccggagcttcccacactcctggggagaagacttcttagccagcttgatgtttaaaattcagctggagcccttaaaacttcgagcgtggacgctgaatgggtttgtaaagtttcgaaacaaggagaccagtgctggtccagtggctgtgatgggaaaagattattacaagattcttgggatcccatcgggggccaacgaggatgagatcaagaaagcctaccggaagatggccttgaagtaccacccagacaagaataaagaacccaacgctgaggagaagtttaaggagattgcagaggcctatgatgtgctaagtgaccccaagaaacggggcctgtatgaccagtatggggaggaaggcctgaagaccggcggtggcacatcaggtggctccagtggctcctttcactacacctttcatggggacccccatgccacctttgcctccttctttggtggctccaaccccttcgatatcttctttgccagcagccgctccactcggcccttcagtggctttgacccagatgacatggatgtggatgaagatgaggacccatttggcgctttcggccgttttggcttcaatgggctgagtaggggtccaaggcgagccccagaaccactgtaccctcggcgcaaggtgcaggaccccccagtggtgcacgagctgcgggtgtccctggaggagatctaccatggctccaccaagcgcatgaagatcacaaggcgtcgcctcaaccctgatgggcgaactgtgcgcaccgaggacaagatcctgcacatagtcatcaagcgtggctggaaggaaggcaccaagatcaccttccccaaagaaggcgacgccacacctgacaacatccctgctgacatcgtctttgtgctcaaagacaagccccatgcacacttccgccgagatggcaccaacgtgctctacagtgccctgatcagcctcaaggaggcgctgtgtggctgcactgtgaacattcccactatcgacggccgagtgatccctttgccctgcaatgatgtcatcaagccaggcaccgtgaagagactccgtggggagggccttcccttccccaaagtgccaactcagcgaggagacctcattgttgagttcaaagttcgcttcccagacagattaacaccacagacaagacagatccttaagcagcacctaccctgttcctaggctctgccccagccagtccagagcctaccacagcaatacccccaacactcactccactcaatgtgcacccagcttgatgtccactggacactggcaactttttctaaaatgcaaaaaaaagccactggttttcaggaaaatgttcctgtccctgaccccttttagagctgggctgcctggggggagtgggagggaggtggggagagctagcccaggccaggggtcaatgttcatgtcactagctttcaatccagtttccactgcagtggctggagagtgacctgagtgctacttgaagatatgtagagattccttatccatgcctgtacatagcatgtcctcctcccctcagctttgctaataccagtcccctcccttccctttggcttcctgctgttgggggtggaaaagactagaaaggacattgctttctcagccccacccccaggtccacagtgtccaaggtaatggcacacatattcatgcacaagaagcactcacctagagctgtctgtgcctctctgggagaaaggagagaggataagaagggaaagttcacaacctgtgaacagggacttgagcacgagacacttttcatctggagcaggggggtgagctcctcagcagcctccgtaacagctgccctgcctacacctgcagagctggaggttctgtcctccctgctgctctcaggagtgttcaagggtggagggcagggaatggggcctgaggtattaaggctaagaggtgggggacagggcccatctaccagccttcatcaggaagggaaagggctttggggtcaggtggcagctattccccaccaagagattcagggtcacaggtttttccccacacctctgaactcagggcctagccacccccaaacttccaaatcccacttttgtgatatgtgaagctactcatttcttacccttggaggctgtgtggggaatttccagcccttttatgcctgtgtgatcccaccccacccccatagttgtataaaggtcatagtgaagaagctgggggaagactgcttcagccagatcctggggtggggtctttaggttttctcactttgacaacccccgaatgtttttatagtagtttttttgtatttttttgtaatgacagtattatgtaaaaaataaagtattttaaaaatatgg

SEQ ID NO: 5807 - DNA, 1022 bp, Homo sapiens
  source 1..1022: mol_type = unassigned DNA
atactaatgtggtaatcagtgaactatttgcttccgtttccttcagtcactattccctggcgaagtctccacgcgctcccgttcgccggggaacttagggtatccgggcttccctaaattgacaagcgggggccggcgccttcgcccgccttcgctggccgccgcttggtttgttcttcttctccttcggggacttctccgcccgcgcccgcgcccgcgccccagctttcgtcccgctgtgcggagatgccacccagctccaccgcaggaccgcggagcgagaggcggcagacgcgctccgggggccgccggtcaagaggaagatgaagggcgcgacgacttcgcggtttccagaatgggctccttctggcccaacaataagtgccatttggaatcttctcggccttctctgtgccttccgcgcgtctgggctccccggagagaaaggaaagcgcgaggagccgccgccaccaccagcgcagcagtcctggagctgtgaggagattcgggccgtcaccctgcctcccctgcgtcccgccaccggccgcttctgtcctcggacccattccaacaatctcgtaaaacatggtggattactatgaagttctaggcgtgcagagacatgcctcacccgaggatattaaaaaggcatatcggaaactggcactgaagtggcatccagataaaaatcctgagaataaagaagaagcagagagaaaattcaagcaagtagcggaggcatatgaagtgctgtcggatgctaagaaacgggacatctatgacaaatatggcaaagaaggattaaatggtggaggaggaggtggaagtcattttgacagtccatttgaatttggcttcacattccgtaacccagatgatgtcttcagggaattttttggtggaagggacccattttcatttgacttctttgaagacccttttgaggacttctttgggaatcgaaggggtccccgaggaagcagaagccgagggacggggtcgtttttctctgcgttcagtgg

SEQ ID NO: 5808 - DNA, 1609 bp, Homo sapiens
  source 1..1609: mol_type = unassigned DNA
agttgacgccgccgtgccgccgccgcgtgacgcatttcctgtttgttgttggagaaaggagagaaaggaaagcgcgaggagccgccgccaccaccagcgcagcagtcctggagctgtgaggagattcgggccgtcaccctgcctcccctgcgtcccgccaccggccgcttctgtcctcggacccattccaacaatctcgtaaaacatggtggattactatgaagttctaggcgtgcagagacatgcctcacccgaggatattaaaaaggcatatcggaaactggcactgaagtggcatccagataaaaatcctgagaataaagaagaagcagagagaaaattcaagcaagtagcggaggcatatgaagtgctgtcggatgctaagaaacgggacatctatgacaaatatggcaaagaaggattaaatggtggaggaggaggtggaagtcattttgacagtccatttgaatttggcttcacattccgtaacccagatgatgtcttcagggaattttttggtggaagggacccattttcatttgacttctttgaagacccttttgaggacttctttgggaatcgaaggggtccccgaggaagcagaagccgagggacggggtcgtttttctctgcgttcagtggatttccgtcttttggaagtggattttcttcttttgatacaggatttacttcatttgggtcactaggtcacgggggcctcacttcattctcttccacgtcatttggtggtagtggcatgggcaacttcaaatcgatatcaacttcaactaaaatggttaatggcagaaaaatcactacaaagagaattgtcgagaacggtcaagaaagagtagaagttgaagaagatggccagttaaagtccttaacaataaatggtaaggagcagctgctgcgcttggataacaagtaattcaacgcacgcacttaacagaaatgttaaactataacaagcaccatttgaggattaacaggaacatttttttgaagatttcaaacgaactcgactttcagtataattgtacctaaagtatttataaacagctcatcggagcctctatttgtcatagacttttgagttgattgttgggaccacataataggaccattttttttttgtctttaaaattgttgtaaatctctgtatgcactttgcttttttattaaacgtactccaaggtgagtcttgactctttagtgtaggacaagattgtacactaacaccagcatggacctgcttttcattgtgtctgaaatgtgagccacgtagtgtcggcctgctgtgaagttaacattgccaggacgattcttctacagaaataatttcaatttttttcagtatttagtagtgaaagatattaatacattaatggtaatacatttctggtttaatataaattaaggatgttttctagttgtgcatgaatgctggcaacttagtaagttttgacaattgtttaaatatgtaatgttaagcttaggtttaaaaaagtaaagctggtaaactgggtctttgtcatttgctttaaaaaaaaaaaaaaagaaaataaatgcgaatgtgttggtgcattcttcctgagtgggatctgga

SEQ ID NO: 5809 - DNA, 2527 bp, Homo sapiens
  source 1..2527: mol_type = unassigned DNA
agttgacgccgccgtgccgccgccgcgtgacgcatttcctgtttgttgttggagaaaggagagaaaggaaagcgcgaggagccgccgccaccaccagcgcagcagtcctggagctgtgaggagattcgggccgtcaccctgcctcccctgcgtcccgccaccggccgcttctgtcctcggacccattccaacaatctcgtaaaacatggtggattactatgaagttctaggcgtgcagagacatgcctcacccgaggatattaaaaaggcatatcggaaactggcactgaagtggcatccagataaaaatcctgagaataaagaagaagcagagagaaaattcaagcaagtagcggaggcatatgaagtgctgtcggatgctaagaaacgggacatctatgacaaatatggcaaagaaggattaaatggtggaggaggaggtggaagtcattttgacagtccatttgaatttggcttcacattccgtaacccagatgatgtcttcagggaattttttggtggaagggacccattttcatttgacttctttgaagacccttttgaggacttctttgggaatcgaaggggtccccgaggaagcagaagccgagggacggggtcgtttttctctgcgttcagtggatttccgtcttttggaagtggattttcttcttttgatacaggatttacttcatttgggtcactaggtcacgggggcctcacttcattctcttccacgtcatttggtggtagtggcatgggcaacttcaaatcgatatcaacttcaactaaaatggttaatggcagaaaaatcactacaaagagaattgtcgagaacggtcaagaaagagtagaagttgaagaagatggccagttaaagtccttaacaataaatggtgtggccgacgacgatgccctcgctgaggagcgcatgcggagaggccagaacgccctgccagcccagcctgccggcctccgcccgccgaagccgccccggcctgcctcgctgctgagacacgcgcctcactgtctctctgaggaggagggcgagcaggaccgacctcgggcacccgggccctgggaccccctcgcgtccgcagcaggattgaaagaaggtggcaagaggaagaagcagaagcagagagaggagtcgaagaagaagaagtcgaccaaaggcaatcactagaccggacttgaggcacgcggtgcacccccagacgctggcgctccaccgtgctcggcatgcggtcgtgcacacgcgctaggtagcagcgtcggtcaggactgtctcgaggccacactcgctcggcaggattatgcgatcacggatcagtcagagcagggtcaggagacggggctgacggcacgggtggcggggacagacgtttgggacttggccgcgactctctgcttctctccagctctcaatctgctgcattttcctctagtgcttccggatcctcttcattcttttcggctactcaaccactccgcatgctgctggaatatttctggctttagaagtacaggagggcgcagatggctaactgagtaacattcatgaaatgaggctttctgtggcggcgtagtgtttggaattagaaggtaattcagtagagtgtaacttagagaatattgcaagtgacacattgaatcctgcccgtcagggcaccttttcctcagagcaatccggccacacgaatagaaggctgtcgtgaatcacatcagatgtaaaatcattccttctgtttactcttttaattttcatcctttgcaggtagtgcaaattcaacttcaaatatggtgtaggttttgctagattccatatttttttcttggatttttgctaattatttttagcaaaaaatttttgctcagtggcactctccctagtgtccatgggttagggccatgctggggaaaacgggccggtatttacacacgcgcaaaacacccagagacggcacaaggaggttgaactcatgtttcagttcgcgaacattgactccttacgaaagtcacttcattctaactagatgcgcccacttccggtcattatttcgtttgcatgatgtattgcttcttcacgttttgtttttattgagcacggagtagaattccagggctgccttgacttcttccctgcatgctccctcccagtgactttccttccctttcacatgaggatctgccgttcatgttgctttctcctttgtcctcttggacttgagggcattgtgaaaagctttgctgtgatttaaaaatgccagcaattttaatctagcagtgttgaagctgggaattttttggcgcaatccatgtagcagtgacccaggcttgggagccagaaacaagtgtgacctgggattttatttaacacaactgttgccaaagagttggctttgtttatttggttttggcggggagaggagtggtatttgatgctttctgtggacaatgtaaccctaaacacatcatgtattttaaatgccacctacataaataaaacataagcatattgaataca

SEQ ID NO: 5810 - DNA, 699 bp, Homo sapiens
  source 1..699: mol_type = unassigned DNA
ctgtttgttgttggagaaaggagagaaaggaaagcgcgaggagccgccgccaccaccagcgcagcagtcctggagctgtgaggagattcgggccgtcaccctgcctcccctgcgtcccgccaccggccgcttctgtcctcggacccattccaacaatctcgtaaaacatggtggattactatgaagttctaggcgtgcagagacatgcctcacccgaggatattaaaaaggcatatcggaaactggcactgaagtggcatccagataaaaatcctgagaataaagaagaagcagagagaaaattcaagcaagtagcggaggcatatgaagtgctgtcggatgctaagaaacgggacatctatgacaaatatggcaaagaaggattaaatggtggaggaggaggtggaagtcattttgacagtccatttgaatttggcttcacattccgtaacccagatgatgtcttcagggaattttttggtggaagggacccattttcatttgacttctttggtgttctagatgacttccattttcaggctctcaggatttacacactggggaagctgctgctccatggctgctatatgtatgtagtcactgagcagcctgctgacgggtttgaggaagtggccggtgaggacttggagcctagtgaggagttagtagagctgcccagggtggaggaggccacagagg

SEQ ID NO: 5811 - DNA, 852 bp, Homo sapiens
  source 1..852: mol_type = unassigned DNA
gttgttggagaaaggagagaaaggaaagcgcgaggagccgccgccaccaccagcgcagcagtcctggagctgtgaggagattcgggccgtcaccctgcctcccctgcgtcccgccaccggccgcttctgtcctcggtgagggacccattccaacaatctcgtaaaacatggtggattactatgaagttctaggcgtgcagagacatgcctcacccgaggatattaaaaaggcatatcggaaactggcactgaagtggcatccagataaaaatcctgagaataaagaagaagcagagagaaaattcaagcaagtagcggaggcatatgaagtgctgtcggatgctaagaaacgggacatctatgacaaatatggcaaagaaggattaaatggtggaggaggaggtggaagtcattttgacagtccatttgaatttggcttcacattccgtaacccagatgatgtcttcagggaattttttggtggaagggacccattttcatttgacttctttgaagacccttttgaggacttctttgggaatcgaaggggtccccgaggaagcagaagccgagggacggggtcgtttttctctgcgttcagtggatttccgtcttttggaagtggattttcttcttttgatacaggatttacttcatttgggtcactaggtcacgggggcctcacttcattctcttccacgtcatttggtggtagtggcatgggcaacttcaaatcgatatcaacttcaactaaaatggttaatggcagaaaaatcactacaaagagaattgtcgagaacggtcaagaaagagtagaagttgaagaagatggccagttaaagtccttaacaa

SEQ ID NO: 5812 - DNA, 7992 bp, Homo sapiens
  source 1..7992: mol_type = unassigned DNA
ggagagaaaggaaagcgcgaggagccgccgccaccaccagcgcagcagtcctggagctgtgaggagattcgggccgtcaccctgcctcccctgcgtcccgccaccggccgcttctgtcctcggacccattccaacaatctcgtaaaacatggtggattactatgaagttctaggcgtgcagagacatgcctcacccgaggatattaaaaaggcatatcggaaactggcactgaagtggcatccagataaaaatcctgagaataaagaagaagcagagagaaaattcaagcaagtagcggaggcatatgaagtgctgtcggatgctaagaaacgggacatctatgacaaatatggcaaagaaggattaaatggtggaggaggaggtggaagtcattttgacagtccatttgaatttggcttcacattccgtaacccagatgatgtcttcagggaattttttggtggaagggacccattttcatttgacttctttgaagacccttttgaggacttctttgggaatcgaaggggtccccgaggaagcagaagccgagggacggggtcgtttttctctgcgttcagtggatttccgtcttttggaagtggattttcttcttttgatacaggatttacttcatttgggtcactaggtcacgggggcctcacttcattctcttccacgtcatttggtggtagtggcatgggcaacttcaaatcgatatcaacttcaactaaaatggttaatggcagaaaaatcactacaaagagaattgtcgagaacggtcaagaaagagtagaagttgaagaagatggccagttaaagtccttaacaataaatggtgtggccgacgacgatgccctcgctgaggagcgcatgcggagaggccagaacgccctgccagcccagcctgccggcctccgcccgccgaagccgccccggcctgcctcgctgctgagacacgcgcctcactgtctctctgaggaggagggcgagcaggaccgacctcgggcacccgggccctgggaccccctcgcgtccgcagcaggtgtgcaaagggaggcagccgtggagcaggcgcagagtgagacttctctgggtgccagaggacagcgaggacacaaaccgcgcctgggctgctgtgttctgacctgagcgggcgtgggcggtcgggcggggcgggaggaggtagcctcgctctgctcctctcccgctcgcggcgccccacgccacggtggctccgggccccccaccgttaaaacggggtccgcgtgtcctgtacgcagcgtgttgctccgcaaaggatgacagagctgccacggcagtgcgaggtgctgcttttaccgtagacgtgccttttcgtagctttcagcgtagagcttgaggcctgtggcttaggccgggtggtctcgtgctggtggggtctgcgtttgcccctgcccctccgtcagcttcaccttctcgtgccttcttctgcgctgggtgcagaacaaaagaccccctcaagtcaagcctccttgtgaagcgtagtctgcccgcccaccccccgtggggttcttggccgccctgccctcctcccacctgttagggagccggatagtctctgaagtgagtgccccggagaagttctgggtcaccctgaggacgtgctgtgcatgtaggcttggccctgactgcgtcctaaagcccagggtccatgtagtgtgaatcgtgcgtcagttggaagtatttgtgcctcttctggttcttatcaccgcacgcggtgaggtgaccccagccgctcatgtcgtgcaggaagacatggatggttgatccctgggtttgggggaccgaagcggatgtcgtgaggttacttctgtggacttgggccgaacagcactgtctaagcaggacatgaaaagaagggggaagcgtctctccttttcccttcatggaactttccattgaaaaattagccccttccagtccttctcggatgaagcacagttgccggttacgcttccgaggaggacggaaggtgcacccccagccgtgagagcctcaggatgtgccgcctgtgggtgggcacggcagcccctccagccggccgcccacctgccgtgctgcgctcacctttgctgtgtgagtctgtgctgtgtcactgagtgacagacagaggcagttgcaggctgcatgcacccagaaagaactccccctgcactaagcgggcatgggggaggctccccagggtccctgcactgagcggggtgggggaggctccccacggttccctgcactgagcggggtgggggagactccccacggttccctgcactgagcgggcgtggggaaggttcccaggatccctgcactgagcggggtgggggagactccccacggttccctgcactgagcgggcgtggggaaggttcccaggatccctgcactgagcgggcgtggggaaggttcccaggatccctgcactgagcgggcgtaggggaggctccccaggatccctgcactgagcgggcgttggggaggctccccagggtctgttgtgcgctcctggtactggagggtctgatggccgtagggagggtgcactgtttgtcgatgggtctttgcaaggtgcaggatagagcagggttgtagctgtagtgtccctgaaccactggggttaggaggccaccggaagcctggcctgctaggggccttgtgatttcgcaggccccgagaacgtggtgtgcaggtgcgggccgcctgggggagccatgtttaaagtgcggtgaggctcctggaacggcacccaccgcaggcccgaggccacacctgtatgtcagaactgggcgggtcttctcctcccaggccttcagcgcctgtggctatggctgtgggcgggactgatacgggcaggcaggcgctgttctccccacgtattctcggcttccccgccatacaccgtttctgagtggggagaactggttgactgctgaatcccaacacaaatccttagagcaaagaggccagtgatggcttttgtttctgcccggatcctctttgtggatcttccgttttgcggcttttcctctcatttgtttcctttttttaatcgcttcatgagatcttgaagataccaaagtaaccatcaaagatttaaagacgtgatttttatacaaatatataacgaacacgtcagagacttttacttaagttcttactgagagatgacaaagctgactcaaaggatgagtcaagaaaccgctgcagagttggagacagaactggagtgaaattgcaaagcagggtggttttggtctctgcagaggccatttgcgactcactcaccaactccggtgtcagggtgctggtgggtgacagggaagaggttgagcaagcctccgcccctgcaggctcgctcattatacaatgagcacctgcaccaccaaatccgaacaactgtacatgcttacagagaagggcacgtgctagtgtgggagtgacaaagtcacacgggtgcagaccccttagctccagcctgctgggtgttctgacgaatggactttgtagcgataacacaggctcctgagtcaggatactggtttgctgcatttctgcgtcactgaaggtctcgctttccccgaagccccttgtcacagaaaacccatgactcttggccaggcctctgggtgcctggaagatcccactatcatctttttgtgggatttgcatgtcctggtcaaggttcctgtaaaaggaatacagtgaggagaccggccacccgacagtattgatggcccccactttggcctccagccgtctgacccgtccctgaatcgagcaggtcctgtcggagctcccaggagtgagcgagcttccactcacagggtcacagccaggtgtgcagcccccaggcctgggcggttctagggcatgattttttttaggctggaaatgagctctcacttgagatgcacccctcaaaatactgaacgtactgcttctgtgagaatttcccctccttgtgtctggtgtgattgacaacgggtgcagccagtggaagcaggaatgtcggggagcgcggggtgcagggggtgccctgtcacagtcagcggggagcgcctgtccctgctgcgtggtgtggggttcccgtggctggcatttgctgctgtgtggagtcctcaaacccagcgctcgccctgcctgcgttcagaggacagaggcaccaccgggaacccaccggatcctcactcaggctttggaaaggccgagtgatgttttgtgtttgtgaattccacacatactgtaggagtatcaagaacacgtaactgttaaaaaaggaaaagtaaaattactgaacaggaaagaaagaataaagcaggtcctttgtttttttggctgaggaaagcagcctgccctggaacgctgtagaatgtctccctttttgtgaagcacagcatggagctctcggaactgaagatgggaatctaaccctgccctcagctttcaacagctcgaagtttgtctttttaatgaaactaatttgtgtatttatacttaagggttttcaagtccttaaacttgataagaaaacttaagtcgttttctatcaggacaagtttttaagtagtcactggtgggagagcgtgcctctgtggactgtgcccaaggctggcggtcccacgaagtcccagagcccgcgagccggtgcccaaggccatgtctgtgatttgcaggaggttcaggtgacaggaaggcctgctctgtttttctcacttcaattttggacttttttttttttttttttttttttgagacagtctcgctctgtcgcccaggctggagtgcagtggcgtgatctcggctcactgcaacctctgcctcaagggttccagcgattttcctgcctcacctccccagtggccggaactacaggtgcttgccaccacttctggctcatttttgtatttttagtagagatgtggtttctccatgttggactggctgctctcgaactcctgacctcaggtgatccccccgcttcagcctcccaaagtgctgggattacaggcgggagccaccgcgcccggcaatagtggaggcttgaagaacaccggaaagtggtttccttgtaccggacccgcccctcccccaccatcccggcagccccagggcgggtgagggcgactgcagtgtggtcacctcaggctttccgtccctagctcataaaggcccagtggcagcagttgctttaaaggagctccgttactccctttgttctggggtcttggtaaagtttgctttgctgaagcggaggaaccgcaggcggtgctgacccccccaccccgcccccatcccacggggtcccttgggtcccggggcacgaggctcctctgagggacacggcctccaagagctggctctgccctggccgccctccacagtcacggcggctccccgcatgctcctcgggacggagatctcctggcttcctcccgcttcctttcctctgcgttttccgcagagccgcctccctgctttggaagcaggtactcagcggcctctgcagccgccaacggcacacaggcctctctctgttcgttctttctttccgtaaccgtagcttgaggcacatttcctaaatatgcagcatggaacgcttggcggttctgaacgcgcatctcgtgctgctcctgtagggcggttaggacgcgctcctctggcgaggaaggtggcagcctccactgtgcacgggtcacaggcgagtgtggtgtggtgtggttgtgggtggggtgtggactggatctgcaggcttgtccctctctcgtggagagctgtcggggtccaggcagtgctcagtggtgagagccacagcacatttgaaagtccacatgtgtttgccccactgtggtccaggacatgtgtgagccacactcagtggacttgcacctgtgacatgttggtcagcgtggcggccgtcagctgggtgtggaatgcatctgattggagcctggcacccggcctaccatgattgtgattctctggggcgagtcctgagtgtgggcagggcctcaggcccccaagagggctgtgagcaggcaccttcctgtgaggcacgatgccaccatgtgaagttgtgtgggtctttggagagttctggcaggttgagggcctgtgcgtgtgggacccaggcctgccctgcctgctgccggccatgttccctctgcccagtcatgttgacaattgtggccaaattcaacatcgggcctgtttcctgcacccacgttggcacacactgagttcaagacagtttctgcagaaatgaatccagaggtgtttatttctggcacgttggatcagacgttcagagggtgggcgtctttctccatgcacttcagctggatcagtcagtgtcagccattgactttagcaacagggaaatgaaagactttcctcaataagaaatgggactttctcacgctggatggcacagagctggcaaacatgaggccagtccacaccaaggctttgcctgcagaaaggctgcactgtggccagcgggggaagcggaggagacacctgtggacaccctccccacaggattgaaagaaggtggcaagaggaagaagcagaagcagagagaggagtcgaagaagaagaagtcgaccaaaggcaatcactagaccggacttgaggcacgcggtgcacccccagacgctggcgctccaccgtgctcggcatgcggtcgtgcacacgcgctaggtagcagcgtcggtcaggactgtctcgaggccacactcgctcggcaggattatgcgatcacggatcagtcagagcagggtcaggagacggggctgacggcacgggtggcggggacagacgtttgggacttggccgcgactctctgcttctctccagctctcaatctgctgcattttcctctagtgcttccggatcctcttcattcttttcggctactcaaccactccgcatgctgctggaatatttctggctttagaagtacaggagggcgcagatggctaactgagtaacattcatgaaatgaggctttctgtggcggcgtagtgtttggaattagaaggtaattcagtagagtgtaacttagagaatattgcaagtgacacattgaatcctgcccgtcagggcaccttttcctcagagcaatccggccacacgaatagaaggctgtcgtgaatcacatcagatgtaaaatcattccttctgtttactcttttaattttcatcctttgcaggtagtgcaaattcaacttcaaatatggtgtaggttttgctagattccatatttttttcttggatttttgctaattatttttagcaaaaaatttttgctcagtggcactctccctagtgtccatgggttagggccatgctggggaaaacgggccggtatttacacacgcgcaaaacacccagagacggcacaaggaggttgaactcatgtttcagttcgcgaacattgactccttacgaaagtcacttcattctaactagatgcgcccacttccggtcattatttcgtttgcatgatgtattgcttcttcacgttttgtttttattgagcacggagtagaattccagggctgccttgacttcttccctgcatgctccctcccagtgactttccttccctttcacatgaggatctgccgttcatgttgctttctcctttgtcctcttggacttgagggcattgtgaaaagctttgctgtgatttaaaaatgccagcaattttaatctagcagtgttgaagctgggaattttttggcgcaatccatgtagcagtgacccaggcttgggagccagaaacaagtgtgacctgggattttatttaacacaactgttgccaaagagttggctttgtttatttggttttggcggggagaggagtggtatttgatgctttctgtggacaatgtaaccctaaacacatcatgtattttaaatgccacctacataaataaaacataagcatattg

SEQ ID NO: 5813 - DNA, 551 bp, Homo sapiens
  source 1..551: mol_type = unassigned DNA
agagaaaggaaagcgcgaggagccgccgccaccaccagcgcagcagtcctggagctgtgaggagattcgggccgtcaccctgcctcccctgcgtcccgccaccggccgcttctgtcctcggacccattccaacaatctcgtaaaacatggtggattactatgaagttctaggcgtgcagagacatgcctcacccgaggatattaaaaaggcatatcggaaactggcactgaagtggcatccagataaaaatcctgagaataaagaagaagcagagagaaaattcaagcaagtagcggaggcatatgaagtgctgtcggatgctaagaaacgggacatctatgacaaatatggcaaagaaggattaaatggtggaggaggaggtggaagtcattttgacagtccatttgaatttggcttcacattccgtaacccagatgatgtcttcagggaattttttggtggaagggacccattttcatttgacttctttgttgtttttgtcttttgacttattgaaagggaaacacattgtatgtttacctccttcatt

SEQ ID NO: 5814 - DNA, 1159 bp, Homo sapiens
  source 1..1159: mol_type = unassigned DNA
agagaaaggaaagcgcgaggagccgccgccaccaccagcgcagcagtcctggagctgtgaggagattcgggccgtcaccctgcctcccctgcgtcccgccaccggccgcttctgtcctcggacccattccaacaatctcgtaaaacatggtggattactatgaagttctaggcgtgcagagacatgcctcacccgaggatattaaaaaggcatatcggaaactggcactgaagtggcatccagataaaaatcctgagaataaagaagaagcagagagaaaattcaagcaagtagcggaggcatatgaagtgctgtcggatgctaagaaacgggacatctatgacaaatatggcaaagaaggattaaatggtggaggaggaggtggaagtcattttgacagtccatttgaatttggcttcacattccgtaacccagatgatgtcttcagggaattttttggtggaagggacccattttcatttgacttctttggtgtggccgacgacgatgccctcgctgaggagcgcatgcggagaggccagaacgccctgccagcccagcctgccggcctccgcccgccgaagccgccccggcctgcctcgctgctgagacacgcgcctcactgtctctctgaggaggagggcgagcaggaccgacctcgggcacccgggccctgggaccccctcgcgtccgcagcaggattgaaagaaggtggcaagaggaagaagcagaagcagagagaggagtcgaagaagaagaagtcgaccaaaggcaatcactagaccggacttgaggcacgcggtgcacccccagacgctggcgctccaccgtgctcggcatgcggtcgtgcacacgcgctaggtagcagcgtcggtcaggactgtctcgaggccacactcgctcggcaggattatgcgatcacggatcagtcagagcagggtcaggagacggggctgacggcacgggtggcggggacagacgtttgggacttggccgcgactctctgcttctctccagctctcaatctgctgcattttcctctagtgcttccggatcctcttcattcttttcggctactcaaccactccgcatgctgctggaatatttctggctttagaagtacaggagggcgcagatggctaactgagtaacattcatg

SEQ ID NO: 5815 - DNA, 614 bp, Homo sapiens
  source 1..614: mol_type = unassigned DNA
gccgccgccaccaccagcgcagcagtcctggagctgtgaggagattcgggccgtcaccctgcctcccctgcgtcccgccaccggccgcttctgtcctcggacccattccaacaatctcgtaaaacatggtggattactatgaagttctaggcgtgcagagacatgcctcacccgaggatattaaaaaggcatatcggaaactggcactgaagtggcatccagataaaaatcctgagaataaagaagaagcagagagaaaattcaagcaagtagcggaggcatatgaagtgctgtcggatgctaagaaacgggacatctatgacaaatatggcaaagaaggattaaatggtggaggaggaggtggaagtcattttgacagtccatttgaatttggcttcacattccgtaacccagatgatgtcttcagggaattttttggtggaagggacccattttcatttgacttctttggacagggcagtgtttgggttgaagtcctgtgttctgatcggtgattctcatggtgaccaagcgaggaagaaggcccgctcttccaacaccatggcttctcttctggggcacacgagaagacccttttgaggacttctttggga

SEQ ID NO: 5816 - DNA, 566 bp, Homo sapiens
  source 1..566: mol_type = unassigned DNA
accaccagcgcagcagtcctggagctgtgaggagattcgggccgtcaccctgcctcccctgcgtcccgccaccggccgcttctgtcctcgaaacgggagtggcttgcggagcaggaatgccgcagccgtgccgccaagttcggagggagaagaagcaggtgggggaccgcaaagccctgtttctagaactccggacggattgttcagaagtttgtggaagagcaggctgcctttctcactcagaatgtttgtctgctttgctttgcgttaaagaatctgcaccgtagttgatgcaactgaagtttatataagaagtttacattaactcttacctaaggaaggacccattccaacaatctcgtaaaacatggtggattactatgaagttctaggcgtgcagagacatgcctcacccgaggatattaaaaaggcatatcggaaactggcactgaagtggcatccagataaaaatcctgagaataaagaagaagcagagagaaaattcaagcaagtagcggaggcatatgaagtgctgtcggatgctaagaaacgggacatctatgaca

SEQ ID NO: 5817 - DNA, 506 bp, Homo sapiens
  source 1..506: mol_type = unassigned DNA
tttttctaaggctcccgcactcgcgtctgaaaccagaaacgggagtggcttgcggagcaggaatgccgcagccgtgccgccaagttcggagggagaagaagcaggacccattccaacaatctcgtaaaacatggtggattactatgaagttctaggcgtgcagagacatgcctcacccgaggatattaaaaaggcatatcggaaactggcactgaagtggcatccagataaaaatcctgagaataaagaagaagcagagagaaaattcaagcaagtagcggaggcatatgaagtgctgtcggatgctaagaaacgggacatctatgacaaatatggcaaagaaggattaaatggtggaggaggaggtggaagtcattttgacagtccatttgaatttggcttcacattccgtaacccagatgatgtcttcagggaattttttggtggaagggacccattttcatttgacttctttgaagacccttttgaggacttctttgggaatc

SEQ ID NO: 5818 - DNA, 590 bp, Homo sapiens
  source 1..590: mol_type = unassigned DNA
actcgcgtctgaaaccagaaacgggagtggcttgcggagcaggaatgccgcagccgtgccgccaagttcggagggagaagaagcaggtgggggaccgcaaagccctgtttctagaactccggacggattgttcagaagtttgtggaagagcaggctgcctttctcactcagaatgtttgtctgctttgctttgcgttaaagaatctgcaccgtagttgatgcaactgaagtttatataagaagtttacattaactcttacctaaggaaggacccattccaacaatctcgtaaaacatggtggattactatgaagttctaggcgtgcagagacatgcctcacccgaggatattaaaaaggcatatcggaaactggcactgaagtggcatccagataaaaatcctgagaataaagaagaagcagagagaaaattcaagcaagtagcggaggcatatgaagtgctgtcggatgctaagaaacgggacatctatgacaaatatggcaaagaaggattaaatggtggaggaggaggtggaagtcattttgacagtccatttgaatttggcttcacattccgtaacccagatgatg

SEQ ID NO: 5819 - DNA, 398 bp, Homo sapiens
  source 1..398: mol_type = unassigned DNA
ttcactatgttgttcaggctggtctcgaactcctgacctcaggtgatccacccgcctcggcttcgcaaagtgctggattacaggtgtgagcccgcgcgtccggctgtcactttaaagagtattataagagggcacttcataacttgggcaggtatttttagtcatcctgaacgtgtcgctgtggactgggtgtcaccgcgggaccgcacagacaccttactgtcgtctgctgtaaaggacccattccaacaatctcgtaaaacatggtggattactatgaagttctaggcgtgcagagacatgcctcacccgaggatattaaaaaggcatatcggaaactggcactgaagtggcatccagataaaaatcctgagaataaagaagaagcagagagaaaa

SEQ ID NO: 5820 - DNA, 1005 bp, Homo sapiens
  source 1..1005: mol_type = unassigned DNA
atggtggattactatgaagttctaggcgtgcagagacatgcctcacccgaggatattaaaaaggcatatcggaaactggcactgaagtggcatccagataaaaatcctgagaataaagaagaagcagagagaaaattcaagcaagtagcggaggcatatgaagtgctgtcggatgctaagaaacgggacatctatgacaaatatggcaaagaaggattaaatggtggaggaggaggtggaagtcattttgacagtccatttgaatttggcttcacattccgtaacccagatgatgtcttcagggaattttttggtggaagggacccattttcatttgacttctttgaagacccttttgaggacttctttgggaatcgaaggggtccccgaggaagcagaagccgagggacggggtcgtttttctctgcgttcagtggatttccgtcttttggaagtggattttcttcttttgatacaggatttacttcatttgggtcactaggtcacgggggcctcacttcattctcttccacgtcatttggtggtagtggcatgggcaacttcaaatcgatatcaacttcaactaaaatggttaatggcagaaaaatcactacaaagagaattgtcgagaacggtcaagaaagagtagaagttgaagaagatggccagttaaagtccttaacaataaatggtgtggccgacgacgatgccctcgctgaggagcgcatgcggagaggccagaacgccctgccagcccagcctgccggcctccgcccgccgaagccgccccggcctgcctcgctgctgagacacgcgcctcactgtctctctgaggaggagggcgagcaggaccgacctcgggcacccgggccctgggaccccctcgcgtccgcagcaggtgtgcaaagggaggcagccgtggagcaggcgcagagtgagacttctctgggtgccagaggacagcgaggacacaaaccgcgcctgggctgctgtgttctgacctga

SEQ ID NO: 5821 - DNA, 900 bp, Homo sapiens
  source 1..900: mol_type = unassigned DNA
gtcttgggcacagtttgggtcaggcacttttgttagctgtctcctgttagagtcttctcaaccactgggacttcctgagtggtgcactgggtgacctgagaggtcaggattaaacatgtactcctgtagttgtttttgtcttttgacttattgaaagggaaacacattgtatgtttacctccttcattgcctggagcttgggtgaagaaactgaacaccacctgcaactcgaggagggaaagagaagagtagttgtgtctacagataatacaggggagaaacgtggagctcctgcctgccgcaggcacgaagaagcataatcactctcatatctggggaccgggagactggcgtgctcatcgtttaagtgcatttgctgtaatcactgctgccatcagcagaaacagagctcaagaaagaaccatgtttacatccgtccttcatcaaccctcacaggacagggcagtgtttgggttgaagtcctgtgttctgatcggtgattctcatggtgaccaagcgaggaagaaggcccgctcttccaacaccatggcttctcttctggggcacacgaggctctcaggatttacacactggggaagctgctgctccatggctgctatatgtatgtagtcactgagcagcctgctgacgaagacccttttgaggacttctttgggaatcgaaggggtccccgaggaagcagaagccgagggacggggtcgtttttctctgcgttcagtggatttccgtcttttggaagtggattttcttcttttgatacaggatttacttcatttgggtcactaggtcacgggggcctcacttcattctcttccacgtcatttggtggtagtggcatgggcaacttcaaatcgatatcaacttcaactaaaatggtta

SEQ ID NO: 5822 - DNA, 694 bp, Homo sapiens
  source 1..694: mol_type = unassigned DNA
gagcttgggtgaagaaactgaacaccacctgcaactcgaggagggaaagagaagagtagttgtgtctacagataatacaggggagaaacgtggagctcctgcctgccgcaggcacgaagaagcataatcactctcatatctgaagacccttttgaggacttctttgggaatcgaaggggtccccgaggaagcagaagccgagggacggggtcgtttttctctgcgttcagtggatttccgtcttttggaagtggattttcttcttttgatacaggatttacttcatttgggtcactaggtcacgggggcctcacttcattctcttccacgtcatttggtggtagtggcatgggcaacttcaaatcgatatcaacttcaactaaaatggttaatggcagaaaaatcactacaaagagaattgtcgagaacggtcaagaaagagtagaagttgaagaagatggccagttaaagtccttaacaataaatggtgtggccgacgacgatgccctcgctgaggagcgcatgcggagaggccagaacgccctgccagcccagcctgccggcctccgcccgccgaagccgccccggcctgcctcgctgctgagacacgcgcctcactgtctctctgaggaggagggcgagcaggaccgacctcgggcacccgggccctgggaccccctcgcgtccgcagcag

SEQ ID NO: 5823 - DNA, 5173 bp, Homo sapiens
  source 1..5173: mol_type = unassigned DNA
ggcattgatggtcctcgttcctgtaactggtcctgtggacacagccactttcttccactgcccattctgtggtcttgtggccttcagcaggcacctcactggttgtggttctttctggtgaggtaaagtaaaaaagaagttggtagcacatttgattaacacgtgtcttaagatttatttctaaggtataaaagtatgatcagttgtttataaatccaaaagtaataatacatgctgggtttaagatttgaaaatgggaatgaggtgagaggaggaggaggtcttgcccctccaccccagttggagccccacaggaacgttgtagcacgtgctgtatagttgtgatgcccgcggtcggagccccacgggagcattgtagcacgcgctgtatggttgtgcgttgtagcgtgcgctgtatagttgtgatgcccacaggcttccttgcatttctctccagctctgctagccacgaacacttcaagtctgcacttcacatgcttgcttgcctgtgcatggttacgcacgctcagcaacttagttccacgttttgggatgagttgagttccctgacgtagaattgctgggttgagggttttttataataaaaatattggttttattttgggggctgaaggttttaaaagcttaatacatacttctagattgcttttcaaaacgacagaaaccagcacatgataagtagctcttacttgaaataaggacttgtctgatctcaagtggcaacttttaactggtctttaaatattataaattttgaaattattttaatgtttcttagcactgtttctgttacaaatgagacttcatttttagggtaatttgtgattttaatatttgaaattatacgagttaaaattcagtgaatacctgaattgtgaaaaattatatttaagctacaaaatgtcagtagagaaataaacaagataaagatttttttcatacaagaaaatggaacggaaaagcattggccttctcataacatagtactcagccagcttttgaggtagcttctgtagatgatgatataattatgaatgtcattgtcttaatttagcttagaatgcaaaccagttaaaatcacttggttagtactgttaccactgagacacgggttcaagatgcatgtaaaagctcagtgccttgtggacaacttctaagggtttagttgccatggatttaaagaaattgtgactaaaccaatgttttagcattgataaatgggaaattgcggaaggatgtaaacgtagagtttaactctacaacttggcttagggactcaggtatggacagtgagaataacttggtttagggactcagatatggacagtgagactggccacatgagtgcctttctcactgtcacactcttacccaggttggagtgcagtggctgtcgacaggtgtgatcatagctccctgcagccttgaattcctgggctcaagcagtcctgcctcagcctcccaaggaggtgggactaaagatggtgtgccaccacacctggctaatttttaaatttattgtagagaaggggtcttgctatgttgcccaggttggtcttgaacccctgacctccagggatctctcctgccttggcctcctcaggagctggaactacagatatatgctaatgtcttcaatttatggaaatgcagaaatgccttttttttttttttttttttttttgagatggactcatgttctgctgcccaggctggagtgctgtggtgtgatcttagctcactgtatcctccacctccggggttcaagcaattttcgtgcctcagcctcctgggtggctgagactacagatgcccaccaccactcctggctaacttttttgtatttttagtagagacagggttttaccatgttggccaggctggtctcaaactcctgacctcaagtgatctgcccgcctcggcctcccaaagtactgggattatagctgtgagccactgcaccctcccggaaatgctttttaacggtcacctcctaggggagatgaagagagttaccgcataatcagttttaactgtatttgtaatgtttgtttctttacctgggaggatatgttgtagatacgtgagatagaatacctaagtgacacaatggtgtgcaggctatggctgcaaagtagaaagtttctaaatagcatgcttggatttttatttgaattggatgaagtttttgtgtcctagagaaattcacaaaatgttcctagtttcagataaaaggttatgatttaacatctttgcttttgttctttcttgtctttgaatagaacagtgggggacggtaaggtctgtttgcaaagtacctatgaccatcttacattatttttatgggtggggggcattgactgtggaatgtgggcagtaacttgcacagtcagtaaccgtttgagtaacttcttgttggcatccccattctggcactcctcctctaggtctccacctcacacgctggtttgtgggcggaggggcaggttggtgcgtggggtgtccgggcactggctgtgcatgccttcttcctcttctgtctcttggccaccttttccaaaaagtcaccagtgaccaattctcccagtgtttctttgggactcaatgccttgggcttggcattgggtaaagccaactggccagtttcattctgacgagctctatagtagtccggtgtggacctctgccctccctgctctgcggaagcttcctcagcctttgcttctcactatttactatttgcgggtcctgggggtacccagcgtctcagggttttggctgcccacctgtacgtcggtcctttcaaactgtggtcagagtcaacctcaggtgctgcttttctctagtcactgcattttttttttttagtagagacaaagtcttgctgtgttgtccagcctggattcaaactcctgagctcaaggaatcctcccactcagcctccagagtagctggatcaagtcactcttgttcataacctcagttgcttcatgaatctcgatttctgcttgatttcagtgcttgctgttgtatccttgtgtgctgcagtatttattgttaacatttgtgactcaaatgtatccactccctgctttggttgctctggcctgcaagtaggccgtactaattctgtagttggtcctagcttgcctttgtctttaccttgcatgcgtttatgtcttaatgcacctattaggattccttgcttttatcacaggtttcccatttttctgaaaaaattacagtaattattaacgcagaacccaggtaaattaaaaaggtttgtatgctttatgaatttttagtaagtactcattgattgataacagcaacagaggaaaacaaaacggtcagttccgatcttgatttccaggagcactttgtgtttccacttggcagcgtgatgcttcctcatgtcggtgattttctgttgagacatcttcaagcatcatcttacgtctgcttgttaacatttgttcagatttgatttcagctaatccttaaaagttttttgagacatcaaacttagaataaaaggaatttcctttgccgagattcatcaggtatttacacttagcttacatggccacaccattcctcgtgtgtgtgtgtgtgtgtgtgtgtgtgtgtgggcgcgcgcatgttagggtaatccatttttctgtttgtttctgaattgctttggagaaggcaactcagactccaaggaatacaacagctgccgtgtgaagcttttctcacttttccagtggtcgtagcaggaacagcgtcttgacctcacatcagtgacgtgaaaagagctgagtttgaagtgcatattggtcctccataaagaatgtgtgtatgtgctgtttttttaattaagtctggtaatttatttgatacaatgtattgtagttttagttgaattaaactagttagtaaaactgttggtgaggtagtgtttcagttactctgtagataagctcttttgttaaaacctcttaagttttttgttcctgaatatgttacaaacatctattttctcttactgtagctatcacatgaggaaaaaaacttgaaaaaaagacttcatagtgtgtgtttatgtttgattttagaagacccttttgaggacttctttgggaatcgaaggggtccccgaggaagcagaagccgagggacggggtcgtttttctctgcgttcagtggatttccgtcttttggaagtggattttcttcttttgatacaggatttacttcatttgggtcactaggtcacgggggcctcacttcattctcttccacgtcatttggtggtagtggcatgggcaacttcaaatcgatatcaacttcaactaaaatggttaatggcagaaaaatcactacaaagagaattgtcgagaacggtcaagaaagagtagaagttgaagaagatggccagttaaagtccttaacaataaatggtaaggagcagctgctgcgcttggataacaagtaattcaacgcacgcacttaacagaaatgttaaactataacaagcaccatttgaggattaacaggaacatttttttgaagatttcaaacgaactcgactttcagtataattgtacctaaagtatttataaacagctcatcggagcctctatttgtcatagacttttgagttgattgttgggaccacataataggaccattttttttttgtctttaaaattgttgtaaatctctgtatgcactttgcttttttattaaacgtactccaaggtgagtcttgactctttagtgtaggacaagattgtacactaacaccagcatggacctgcttttcattgtgtctgaaatgtgagccacgtagtgtcggcctgctgtgaagttaacattgccaggacgattcttctacagaaataatttcaatttttttcagtatttagtagtgaaagatattaatacattaatggtaatacatttctggtttaatataaattaaggatgttttctagttgtgcatgaatgctggcaacttagtaagttttgacaattgtttaaatatgtaatgttaagcttaggtttaaaaaagtaaagctggtaaactgggtctttgtcatttgctttaaaaaaaaaaaaaaagaaaataaatgcgaatgtgttggtgcattcttcctgagtggga

SEQ ID NO: 5824 - DNA, 664 bp, Homo sapiens
  source 1..664: mol_type = unassigned DNA
attgctttggagaaggcaactcagactccaaggaatacaacagctgccgtgtgaagcttttctcacttttccagtggtcgtagcaggaacagcgtcttgacctcacatcagtgacgtgaaaagagctgagtttgaagtgcatattggtcctccataaagaatgtgtaagacccttttgaggacttctttgggaatcgaaggggtccccgaggaagcagaagccgagggacggggtcgtttttctctgcgttcagtggatttccgtcttttggaagtggattttcttcttttgatacaggtattaaatccctaggtttaatctctgttatcttaacagcagttagtacttataaaatcataatactcttttagttagagtgctttaaaatatgtgtatacctttcgtagaatagcattgtggatttgccagctttttttggtatacaggtctgcgcttaacctacattttctcctaatcttcctaagaatgtcgtgcttggaaatcttctcctcttaatataataatcaaggccagaatgtaatgaaattcttagttaaaaaggggcaacatatgttctgcatcagtaggtggaaagtaacgcagttggaaaatctcactaaccttcatgctgtctaacctcctttgtagttaaaacaaaagtgc

SEQ ID NO: 5825 - DNA, 4992 bp, Homo sapiens
  source 1..4992: mol_type = unassigned DNA
gtctccctcccccggctccccacgctcccaaccgcccgcgcctgctgccaggcagcggcggggatggcgagcagcggaggcgaggcggtgacgagagcagcggctccgccattggacgaggaggcctgagggacgggccagcggtgcacaagaagagaccgaggcgggtggccccgagagagccagggccatggaggccaacatgccgaagcggaaggagcccggcaggtctctccgcatcaaagtcatctccatgggcaacgccgaagtggggaaaagctgtattataaagcgatactgtgagaaaagattcgtgtctaaatacctggcaacaattggaattgactatggagtcacaaaggtacacgtcagagacagagaaatcaaagttaacatctttgatatggctggacatcccttcttctatgaggttcgaaatgagttttacaaggacacacagggtgtgatactggtctatgatgttgggcagaaagactcctttgacgcccttgatgcgtggctggcagaaatgaagcaagagcttggacctcatggaaacatggaaaatattatatttgtagtttgtgccaacaagattgattgtaccaaacatcgctgtgtagatgaaagtgaaggacgtctttgggctgaaagcaaagggttcctgtactttgaaacttcagcacaaactggagaaggcattaatgagatgttccagaccttttatatatccatagttgatttatgtgaaaatggcgggaaacgccctaccaccaatagcagtgctagtttcaccaaagaacaagcagatgccattcgcagaattcgaaatagtaaagacagttgggacatgctgggagtcaaacctggggcctcaagggatgaagtcaataaagcgtatcggaaacttgctgtgcttcttcaccctgacaaatgtgtagcacctggcagtgaagatgccttcaaagcagttgtgaatgctcggacagccctcctgaaaaacatcaagtagaaagtacagaaaaaagccacatgtgggactcaaatgcaaacagactttccctagaggtgaaataaccaacgtggagttttccttcccagaatctcactgctcttttcattcatgtgttgtcatttgtatatcagtaattcaggtacccatttcatagacattttactgagaaatgacctgcatttgtatgaagtgaactgagcgtcacaccctgtacttcatttcatatttctagataattctgaatttttttctcattcgtcagctctgtaattatagtatcacttagacatttcacttggggaaatccacaaggttcctggaggagggaagagaggacaagaggaccctttcactttttcttttttacggaattcatcatcagagaagaaaataacaaaaatggaagcaaacaacatcagaacccctgtaagtttggtgtgaccttacagacaagttgctgcttttacaatgagttccttaggtggtattttaacccatcgatctataatgatgactcttggcagccctttgggagtttgtaaaatgaggtgatacagttctgaattgagcattcctttatgatattcactctgttcctcttctgcagccaccagtgggagagacaagccagtcctaagagaaaaggtggtggcagccacaaattctaggtacactggctgctgcctatcctgtccctggatctgaggcctttcccttgccatagaaatggttgctggtagcagtagagagcactgtgcacctgggaatgaggaatcaggccccaagacagaagtacttggaggagccagctgcagtagtatccgcctgtagtcccagctactcaggaggctgagacaggaggattgcttaagcccaggagctcaagtcccacctgggcaacatagtaagatcttgtctcttaaagaaaaaaaaaaaaggtacttagaggtcgcacttaaagattatgcacatcagcagaggaaaggccagccaagcttggggcaagcttgatgcagtaggagagactccttatgaggcttagcccttgtcttactgccagcctttgccacaggcaggtgagaaaggcagggccactcctcagcaaagttggcctcttctacacttcctcaccagtgttgtttcttccttttttcccctcttccccttcccgtcttgtgttttttctgaaccccacatctgccatcatttctctcctctagagtccctggcttctggccactgcctcctccctcttctaagccttggcctgaatctggttgatcagaggcaagtgtggatcctttgggtggcagtcaggggagatctcagggcctctgttgggaggaatctctgtaattcctgcttgggctccaaatttctgaagagtaatatttttaaactatagcttacaaaatacattctctgaccacagtctcctccttgatatacaagggatggatgaagttcatgtattaggactggcactccttacggtgcttatagaactagtctcaccacttgactcattacgtcgtcattcttgttacatcactcatacttttagctgcaaccacactaattcacatttttatatactttcaattagctgtactaattggggcttgaaagtatataaaatcttcctgtcctgtgaattttaaaaagctatcccatatcgattgccaaagagcatctaccttacctcctaagaagaaaagccactttcttccaatccaagcccactgcagccttgtggattttccacacagcagcttttcactgtatgcctgtacttgggctgcactgagcttgtcttcaggaaaccagagcgttgctttatcatcgcacttttcatcttggtaatatcaaaacaactttttaaatgaactgattgatatatgttatttcttgcgaggttttcctctggcctttaactggcttctgaggctacagaactccaacccagagttcttcgggacctaaattttgcttaaggaaggcctttatcatgctgaaagcactcagacatgtctgtcctcacagcagaatgtagaagtcatatgaatgagggatcgtgcacggtagcgtcagcccgaattgacacgacaactctgaatgtgtggccctctatgaaagctggtgccagttttcatcactgttattaaatactagattgggaacctcattcagccgtattgcacagatgagcaattacagcagagaaaattcattagtgctcccactcatatccttatgtgtgagttggtgaaatttagcctgagcttgattcttaggtcttgagactcagtttccaacaccttcattattaatgttaagaatggccatataccacttcatttacgtaaaaggaataaaataagcaagttaagcttcagggtcctagaatttttctgatttctataatccttcagcagaatattaagaaataaagcatgatctgcaatggaaaggtttttttggcactaacttcatgcagaatttcacagacatctatgcattaatttaaattcttggtgcaaatgtgtgctttgtagttcaaccttattaaaaattcttcagccagttaggatttcaaaatacattagtgagagtaacagctagcagaataattacaatggctaaaacgtttttatagagaatcttgtttttcaaaaaagaataaaaagtttgaatagctattattaaagaaaagccatgtcttcaacatctgagtcaccaagaagtaacactttttaaacttgttagaaatccctggaggcatttcaaattcatcttctaacctacctaagcactttaaaatacagcctccttctgttcctctgttccccttcatgcctccttttgaattgatatctcagctgtcaatatttctttgacttcagcattgttattttatttctctatatcaatgtgtccttagttttcttagcctgttaatttaaaaatccagacttgggggtcattgtgttgctacccaagagaaaatgctacagttttatagattgcacatcattctttaaggcatacttttacctcaggaaacttactctagtatgttctcatatattgaattctcaactaagtaactatttctttatacctataaactagtacctaattcactgttagttaaatgagctatagataaggcagctaaatttctgaaagatagccagagtaagtaagcagccactgcaagctctgaatcagttttttaaaaaaaagaaaaaaaaaaaaaaggagctgtgccccattgaacaatgacaacatcacaaggggaagggagggattttgccaaaagttagaaaggtggagctgtaagccatgtgcttgttgcctttgacagtgacagtgcgcgtcttacaactaattccactaggcatgggaatgtcacctcctttgccactgtaccccatcaagcttactctgaatcaaaggttttgtaaaacttttgaaaatgaacttagctgcaaaatatagctaaccactttccattgcaagctttgcaaagtgaagagaggttcgtacttctcataattggtatttagcacaattgtaagatacagttttactgtttgtacatcgtttttttccattaaacttttctagagaagacaaaagcttacactggtgacatggataagtgagatggtgtctaacgagcagtgcaatattaggcggtgcaatagaggccctgttggcaagatgagttttgctggagagctggacagtgttggttagcttcctgcattgattgcccctgggcgttcttcccccttaactgtgaaagcagagtctataaatgaactctttgctcttacaaggtaatttacatattttctttctgttgaaataactgaaaatgttaaatctaccagtttatgtcttgtaaacagagtgtcatatgtatttaagttgtgtatttttataaagtaaagccaagtatcaaacaccgg

SEQ ID NO: 5826 - DNA, 1378 bp, Homo sapiens
  source 1..1378: mol_type = unassigned DNA; mol_type = unassigned DNA
cgcccgcgcctgctgccaggcagcggcggggatggcgagcagcggaggcgaggcggtgacgagagcagcggctccgccattggacgaggaggcctgagggacgggccagcggtgcacaagaagagaccgaggcgggtggccccgagagagccagggccatggaggccaacatgccgaagcggaaggagcccggcaggtctctccgcatcaaagtcatctccatgggcaacgccgaagtggggaaaagctgtattataaagcgatactgtgagaaaagattcgtgtctaaatacctggcaacaattggaattgactatggagtcacaaaggtacacgtcagagacagagaaatcaaagttaacatctttgatatggctggacatcccttcttctatgagatgaggaaactgagacgcagagaggttaagtgacttgcccaagatcacaaaactagttcgaaatgagttttacaaggacacacagggtgtgatactggtctatgatgttgggcagaaagactcctttgacgcccttgatgcgtggctggcagaaatgaagcaagagcttggacctcatggaaacatggaaaatattatatttgtagtttgtgccaacaagattgattgtaccaaacatcgctgtgtagatgaaagtgaaggacgtctttgggctgaaagcaaagggttcctgtactttgaaacttcagcacaaactggagaaggcattaatgagatgttccagatacatcttggatagaactaatggataaattagtctgtttaaaaaaaaaaagctaacaagaagagaataattacagtattctataaaccttttatatatccatagttgatttatgtgaaaatggcgggaaacgccctaccaccaatagcagtgctagtttcaccaaagaacaagcagatgccattcgcagaattcgaaatagtaaagacagttgggacatgctgggagtcaaacctggggcctcaagggatgaagtcaataaagcgtatcggaaacttgctgtgcttcttcaccctgacaaatgtgtagcacctggcagtgaagatgccttcaaagcagttgtgaatgctcggacagccctcctgaaaaacatcaagtagaaagtacagaaaaaagccacatgtgggactcaaatgcaaacagactttccctagaggtgaaataaccaacgtggagttttccttcccagaatctcactgctcttttcattcatgtgttgtcatttgtatatcagtaattcaggtacccatttcatagacattttactgagaaatgacctgcatttgtatgaagtgaactgagcgtcacaccctgtacttcatttcatatttctagataattctgaatttttttctca

SEQ ID NO: 5827 - DNA, 547 bp, Homo sapiens
  source 1..547: mol_type = unassigned DNA; mol_type = unassigned DNA
gtcactcttccggagatggtgtctggggtggcctctaagccttgaatgtacccccaaaagaagctgtattataaagcgatactgtgagaaaagattcgtgtctaaatacctggcaacaattggaattgactatggagtcacaaaggtacacgtcagagacagagaaatcaaagttaacatctttgatatggctggacatcccttcttctatgaggttcgaaatgagttttacaaggacacacagggtgtgatactggtctatgatgttgggcagaaagactcctttgacgcccttgatgcgtggctggcagaaatgaagcaagagcttggacctcatggaaacatggaaaatattatatttgtagtttgtgccaacaagattgattgtaccaaacatcgctgtgtagatgaaagtgaaggacgtctttgggctgaaagcaaagggttcctgtactttgaaacttcagcacaaactggagaaggcattaatgagatgttccagaccttttatatatccatagttgatttatgtgaaaatggcgggaaa

SEQ ID NO: 5828 - DNA, 561 bp, Homo sapiens
  source 1..561: mol_type = unassigned DNA; mol_type = unassigned DNA
actcttccggagatggtgtctggggtggcctctaagccttgaatgtacccccaaaagagtaagaaggcctgggtccccatgaggggccgtcggcctagataccttgcccgcgttctagggggccgtccgggaccgggagatggaggatgaaagtttagttcccccagccgggcctgggagccggcggaacgttatgggagctgtattataaagcgatactgtgagaaaagattcgtgtctaaatacctggcaacaattggaattgactatggagtcacaaaggtacacgtcagagacagagaaatcaaagttaacatctttgatatggctggacatcccttcttctatgagatgaggaaactgagacgcagagaggttaagtgacttgcccaagatcacaaaactagttcgaaatgagttttacaaggacacacagggtgtgatactggtctatgatgttgggcagaaagactcctttgacgcccttgatgcgtggctggcagaaatgaagcaagagcttggacctcatggaaacatggaaaatattatatttgtagtttg

SEQ ID NO: 5829 - DNA, 463 bp, Homo sapiens
  source 1..463: mol_type = unassigned DNA; mol_type = unassigned DNA
gtcactcttccggagatggtgtctggggtggcctctaagccttgaatgtacccccaaaagagtaagaaggcctgggtccccatgaggggccgtcggcctagataccttgcccgcgttctagggggccgtccgggaccgggagatggaggatgaaagtttagttcccccagccgggcctgggagccggcggaacgttatgggagctgtattataaagcgatactgtgagaaaagattcgtgtctaaatacctggcaacaattggaattgactatggagtcacaaaggtacacgtcagagacagagaaatcaaagttaacatctttgatatggctggacatcccttcttctatgaggttcgaaatgagttttacaaggacacacagggtgtgatactggtctatgatgttgggcagaaagactcctttgacgcccttgatgcgtggctggcagaaatgaagcaag

SEQ ID NO: 5830 - DNA, 485 bp, Homo sapiens
  source 1..485: mol_type = unassigned DNA; mol_type = unassigned DNA
cgcatcaaagtcatctccatgggcaacgccgaagtggggaaaagctgtattataaagcgatactgtgagaaaagattcgtgtctaaatacctggcaacaattggaattgactatggagtcacaaaggtacacgtcagagacagagaaatcaaagttaacatctttgatatggctggacatcccttcttctatgaggtaagaaagcctttttgacaaaacctatatccagtattgttggtggtttggggagagatccagaattatatgaaacaaccaatattgatatcatgtgtaaaattgcataattttagcttgatcgtggcttgccttcagagccttgagttaatagacaactgttgatcttttaggttatcctgttaaatagtggtaggaaatttcattgccaatatttcaaacatttcaataagacattttgactttcagaggacttttgctttttacctcatactttagcctaaaatgtg

SEQ ID NO: 5831 - DNA, 4831 bp, Homo sapiens
  source 1..4831: mol_type = unassigned DNA; mol_type = unassigned DNA
gtctccctcccccggctccccacgctcccaaccgcccgcgcctgctgccaggcagcggcggggatggcgagcagcggaggcgaggcggtgacgagagcagcggctccgccattggacgaggaggcctgagggacgggccagcggtgcacaagaagagaccgaggcgggtggccccgagagagccagggccatggaggccaacatgccgaagcggaaggagcccggcaggtctctccgcatcaaagtcatctccatgggcaacgccgaagtggggaaaagctgtattataaagcgatactgtgagaaaagattcgtgtctaaatacctggcaacaattggaattgactatggagtcacaaaggtacacgtcagagacagagaaatcaaagttaacatctttgatatggctggacatcccttcttctatgaggttcgaaatgagttttacaaggacacacagggtgtgatactggtctatgatgttgggcagaaagactcctttgacgcccttgatgcgtggctggcagaaatgaagcaagagcttggacctcatggaaacatggaaaatattatatttgtagtttgtgccaacaagattgattgtaccaaacatcgctgtgtagatgaaagtgaaggacgtctttgggctgaaagcaaagggttcctgtactttgaaacttcagcacaaactggagaaggcattaatgagatgttccagggatgaagtcaataaagcgtatcggaaacttgctgtgcttcttcaccctgacaaatgtgtagcacctggcagtgaagatgccttcaaagcagttgtgaatgctcggacagccctcctgaaaaacatcaagtagaaagtacagaaaaaagccacatgtgggactcaaatgcaaacagactttccctagaggtgaaataaccaacgtggagttttccttcccagaatctcactgctcttttcattcatgtgttgtcatttgtatatcagtaattcaggtacccatttcatagacattttactgagaaatgacctgcatttgtatgaagtgaactgagcgtcacaccctgtacttcatttcatatttctagataattctgaatttttttctcattcgtcagctctgtaattatagtatcacttagacatttcacttggggaaatccacaaggttcctggaggagggaagagaggacaagaggaccctttcactttttcttttttacggaattcatcatcagagaagaaaataacaaaaatggaagcaaacaacatcagaacccctgtaagtttggtgtgaccttacagacaagttgctgcttttacaatgagttccttaggtggtattttaacccatcgatctataatgatgactcttggcagccctttgggagtttgtaaaatgaggtgatacagttctgaattgagcattcctttatgatattcactctgttcctcttctgcagccaccagtgggagagacaagccagtcctaagagaaaaggtggtggcagccacaaattctaggtacactggctgctgcctatcctgtccctggatctgaggcctttcccttgccatagaaatggttgctggtagcagtagagagcactgtgcacctgggaatgaggaatcaggccccaagacagaagtacttggaggagccagctgcagtagtatccgcctgtagtcccagctactcaggaggctgagacaggaggattgcttaagcccaggagctcaagtcccacctgggcaacatagtaagatcttgtctcttaaagaaaaaaaaaaaaggtacttagaggtcgcacttaaagattatgcacatcagcagaggaaaggccagccaagcttggggcaagcttgatgcagtaggagagactccttatgaggcttagcccttgtcttactgccagcctttgccacaggcaggtgagaaaggcagggccactcctcagcaaagttggcctcttctacacttcctcaccagtgttgtttcttccttttttcccctcttccccttcccgtcttgtgttttttctgaaccccacatctgccatcatttctctcctctagagtccctggcttctggccactgcctcctccctcttctaagccttggcctgaatctggttgatcagaggcaagtgtggatcctttgggtggcagtcaggggagatctcagggcctctgttgggaggaatctctgtaattcctgcttgggctccaaatttctgaagagtaatatttttaaactatagcttacaaaatacattctctgaccacagtctcctccttgatatacaagggatggatgaagttcatgtattaggactggcactccttacggtgcttatagaactagtctcaccacttgactcattacgtcgtcattcttgttacatcactcatacttttagctgcaaccacactaattcacatttttatatactttcaattagctgtactaattggggcttgaaagtatataaaatcttcctgtcctgtgaattttaaaaagctatcccatatcgattgccaaagagcatctaccttacctcctaagaagaaaagccactttcttccaatccaagcccactgcagccttgtggattttccacacagcagcttttcactgtatgcctgtacttgggctgcactgagcttgtcttcaggaaaccagagcgttgctttatcatcgcacttttcatcttggtaatatcaaaacaactttttaaatgaactgattgatatatgttatttcttgcgaggttttcctctggcctttaactggcttctgaggctacagaactccaacccagagttcttcgggacctaaattttgcttaaggaaggcctttatcatgctgaaagcactcagacatgtctgtcctcacagcagaatgtagaagtcatatgaatgagggatcgtgcacggtagcgtcagcccgaattgacacgacaactctgaatgtgtggccctctatgaaagctggtgccagttttcatcactgttattaaatactagattgggaacctcattcagccgtattgcacagatgagcaattacagcagagaaaattcattagtgctcccactcatatccttatgtgtgagttggtgaaatttagcctgagcttgattcttaggtcttgagactcagtttccaacaccttcattattaatgttaagaatggccatataccacttcatttacgtaaaaggaataaaataagcaagttaagcttcagggtcctagaatttttctgatttctataatccttcagcagaatattaagaaataaagcatgatctgcaatggaaaggtttttttggcactaacttcatgcagaatttcacagacatctatgcattaatttaaattcttggtgcaaatgtgtgctttgtagttcaaccttattaaaaattcttcagccagttaggatttcaaaatacattagtgagagtaacagctagcagaataattacaatggctaaaacgtttttatagagaatcttgtttttcaaaaaagaataaaaagtttgaatagctattattaaagaaaagccatgtcttcaacatctgagtcaccaagaagtaacactttttaaacttgttagaaatccctggaggcatttcaaattcatcttctaacctacctaagcactttaaaatacagcctccttctgttcctctgttccccttcatgcctccttttgaattgatatctcagctgtcaatatttctttgacttcagcattgttattttatttctctatatcaatgtgtccttagttttcttagcctgttaatttaaaaatccagacttgggggtcattgtgttgctacccaagagaaaatgctacagttttatagattgcacatcattctttaaggcatacttttacctcaggaaacttactctagtatgttctcatatattgaattctcaactaagtaactatttctttatacctataaactagtacctaattcactgttagttaaatgagctatagataaggcagctaaatttctgaaagatagccagagtaagtaagcagccactgcaagctctgaatcagttttttaaaaaaaagaaaaaaaaaaaaaaggagctgtgccccattgaacaatgacaacatcacaaggggaagggagggattttgccaaaagttagaaaggtggagctgtaagccatgtgcttgttgcctttgacagtgacagtgcgcgtcttacaactaattccactaggcatgggaatgtcacctcctttgccactgtaccccatcaagcttactctgaatcaaaggttttgtaaaacttttgaaaatgaacttagctgcaaaatatagctaaccactttccattgcaagctttgcaaagtgaagagaggttcgtacttctcataattggtatttagcacaattgtaagatacagttttactgtttgtacatcgtttttttccattaaacttttctagagaagacaaaagcttacactggtgacatggataagtgagatggtgtctaacgagcagtgcaatattaggcggtgcaatagaggccctgttggcaagatgagttttgctggagagctggacagtgttggttagcttcctgcattgattgcccctgggcgttcttcccccttaactgtgaaagcagagtctataaatgaactctttgctcttacaaggtaatttacatattttctttctgttgaaataactgaaaatgttaaatctaccagtttatgtcttgtaaacagagtgtcatatgtatttaagttgtgtatttttataaagtaaagccaagtatcaaacaccgg

SEQ ID NO: 5832 - DNA, 2022 bp, Homo sapiens
  source 1..2022: mol_type = unassigned DNA; mol_type = unassigned DNA
acgggtaaagtggcgccgcctacgcaccggcacagcccctgggctcccgccccggcgcggagaccaccgtggacatccgggggcgggaggccgctctggccccaagcggagcctctctctggtagacgagcccgagggagcccttctgggcgcggcgccgcggagctgctctatgctccaaccggaagtgctcttcaccgccggcctcccacccagctctctggtcccggcggtaagatggcggctgccgcggagtgcgatgtggtaatggcggcgaccgagccggagctgctcgacgaccaagaggcgaagagggaagcagagactttcaaggaacaaggaaatgcatactatgccaagaaagattacaatgaagcttataattattatacaaaagccatagatatgtgtcctaaaaatgctagctattatggtaatcgagcagccaccttgatgatgcttggaaggttccgggaagctcttggagatgcacaacagtcagtgaggttggatgacagttttgtccggggacatctacgagagggcaagtgccacctctctctggggaatgccatggcagcatgtcgcagcttccagagagccctagaactggatcataaaaatgctcaggcacaacaagagttcaagaatgctaatgcagtcatggaatatgagaaaatagcagaaacagattttgagaagcgagattttcggaaggttgttttctgcatggaccgtgccctagaatttgcccctgcctgccatcgcttcaaaatcctcaaggcagaatgtttagcaatgctgggtcgttatccagaagcacagtctgtggctagtgacattctacgaatggattccaccaatgcagatgctctgtatgtacgaggtctttgcctttattacgaagattgtattgagaaggcagttcagtttttcgtacaggctctcaggatggctcctgaccacgagaaggcctgcattgcctgcagaaatgccaaagcactcaaagcaaagaaagaagatgggaataaagcatttaaggaaggaaattacaaactagcatatgaactgtacacagaagccctggggatagaccccaacaatataaaaacaaatgctaaactctactgtaatcggggtacggttaattccaagcttaggaaactagatgatgcaatagaagactgcacaaatgcagtgaagcttgatgacacttacataaaagcctacttgagaagagctcagtgttacatggacacagaacagtatgaagaagcagtacgagactatgaaaaagtataccagacagagaaaacaaaagaacacaaacagctcctaaaaaatgcgcagctggaactgaagaagagtaagaggaaagattactacaagattctaggagtggacaagaatgcctctgaggacgagatcaagaaagcttatcggaaacgggccttgatgcaccatccagatcggcatagtggagccagtgctgaggttcagaaggaggaggagaagaagttcaaggaagttggagaggcctttactatcctctctgatcccaagaaaaagactcgctatgacagtggacaggacctagatgaggagggcatgaatatgggtgattttgatccaaacaatatcttcaaggcattctttggcggtcctggcggcttcagctttgaagcatctggtccagggaatttcttttttcaatttggctaatgaagggcaaccacccagaacccagaaaatgcagattcactcagtttaatcttgaatgtggaaacagttcacctcctcccttcatcacgtctccgtgtgcttagagcagtttcgttttctcagttggatgccctgtgtctctgtgagtggggtggagcaaagggaaccaatgccgaagaccgagggcaggggagggaggcgggggtggacagggaggcagcttgtgaatttttgttttactgtttaactttattaaaaaagaaaaaaaaaagagaataaaatgttttgacccttcctggc

SEQ ID NO: 5833 - DNA, 449 bp, Homo sapiens
  source 1..449: mol_type = unassigned DNA; mol_type = unassigned DNA
gacaagaatgcctctgaggacgagatcaagaaagcttatcggaaacgggccttgatgcaccatccagattttgatccaaacaatatcttcaaggcattctttggcggtcctggcggcttcagctttgaagcatctggtccagggaatttcttttttcaatttggctaatgaagggcaaccacccagaacccagaaaatgcagattcactcagtttaatcttgaatgtggaaacagttcacctcctcccttcatcacgtctccgtgtgcttagagcagtttcgttttctcagttggatgccctgtgtctctgtgagtggggtggagcaaagggaaccaatgccgaagaccgagggcaggggagggaggcgggggtggacagggaggcagcttgtgaatttttgttttactgtttaactttattaaaaaagaaaaaaaaaagagaataaaa

SEQ ID NO: 5834 - DNA, 1774 bp, Homo sapiens
  source 1..1774: mol_type = unassigned DNA; mol_type = unassigned DNA
gcttccgcctggcgtaggagctgaggcatggccttgttctccagctgagaggacgatcgtccttataggagaggccgagtctccgagggcaatttcagaggtctggtgcgagggaagcagagactttcaaggaacaaggaaatgcatactatgccaagaaagattacaatgaagcttataattattatacaaaagccatagatatgtgtcctaaaaatgctagctattatggtaatcgagcagccaccttgatgatgcttggaaggttccgggaagctcttggagatgcacaacagtcagtgaggttggatgacagttttgtccggggacatctacgagagggcaagtgccacctctctctggggaatgccatggcagcatgtcgcagcttccagagagccctagaactggatcataaaaatgctcaggcacaacaagagttcaagaatgctaatgcagtcatggaatatgagaaaatagcagaaacagattttgagaagcgagattttcggaaggttgttttctgcatggaccgtgccctagaatttgcccctgcctgccatcgcttcaaaatcctcaaggcagaatgtttagcaatgctgggtcgttatccagaagcacagtctgtggctagtgacattctacgaatggattccaccaatgcagatgctctgtatgtacgaggtctttgcctttattacgaagattgtattgagaaggcagttcagtttttcgtacaggctctcaggatggctcctgaccacgagaaggcctgcattgcctgcagaaatgccaaagcactcaaagcaaagaaagaagatgggaataaagcatttaaggaaggaaattacaaactagcatatgaactgtacacagaagccctggggatagaccccaacaatataaaaacaaatgctaaactctactgtaatcggggtacggttaattccaagcttaggaaactagatgatgcaatagaagactgcacaaatgcagtgaagcttgatgacacttacataaaagcctacttgagaagagctcagtgttacatggacacagaacagtatgaagaagcagtacgagactatgaaaaagtataccagacagagaaaacaaaagaacacaaacagctcctaaaaaatgcgcagctggaactgaagaagagtaagaggaaagattactacaagattctaggagtggacaagaatgcctctgaggacgagatcaagaaagcttatcggaaacgggccttgatgcaccatccagatcggcatagtggagccagtgctgaggttcagaaggaggaggagaagaagttcaaggaagttggagaggcctttactatcctctctgatcccaagaaaaagactcgctatgacagtggacaggacctagatgaggagggcatgaatatgggtgattttgatccaaacaatatcttcaaggcattctttggcggtcctggcggcttcagctttgaagcatctggtccagggaatttcttttttcaatttggctaatgaagggcaaccacccagaacccagaaaatgcagattcactcagtttaatcttgaatgtggaaacagttcacctcctcccttcatcacgtctccgtgtgcttagagcagtttcgttttctcagttggatgccctgtgtctctgtgagtggggtggagcaaagggaaccaatgccgaagaccgagggcaggggagggaggcgggggtggacagggaggcagcttgtgaatttttgttttactgtttaactttatt

SEQ ID NO: 5835 - DNA, 1719 bp, Homo sapiens
  source 1..1719: mol_type = unassigned DNA; mol_type = unassigned DNA
aagatggcggctgccgcggagtgcgatgtggtaatggcggcgaccgagccggagctgctcgacgaccaagaggcgaagagggaagcagagactttcaaggaacaaggaaatgcatactatgccaagaaagattacaatgaagcttataattattatacaaaagccatagatatgtgtcctaaaaatgctagctattatggtaatcgagcagccaccttgatgatgcttggaaggttccgggaagctcttggagatgcacaacagtcagtgaggttggatgacagttttgtccggggacatctacgagagggcaagtgccacctctctctggggaatgccatggcagcatgtcgcagcttccagagagccctagaactggatcataaaaatgctcaggcacaacaagagcttcattaaaactttcctatgtctgattttccggtgcagttcaagaatgctaatgcagtcatggaatatgagaaaatagcagaaacagattttgagaagcgagattttcggaaggttgttttctgcatggaccgtgccctagaatttgcccctgcctgccatcgcttcaaaatcctcaaggcagaatgtttagcaatgctgggtcgttatccagaagcacagtctgtggctagtgacattctacgaatggattccaccaatgcagatgctctgtatgtacgaggtctttgcctttattacgaagattgtattgagaaggcagttcagtttttcgtacaggctctcaggatggctcctgaccacgagaaggcctgcattgcctgcagaaatgccaaagcactcaaagcaaagaaagaagatgggaataaagcatttaaggaaggaaattacaaactagcatatgaactgtacacagaagccctggggatagaccccaacaatataaaaacaaatgctaaactctactgtaatcggggtacggttaattccaagcttaggaaactagatgatgcaatagaagactgcacaaatgcagtgaagcttgatgacacttacataaaagcctacttgagaagagctcagtgttacatggacacagaacagtatgaagaagcagtacgagactatgaaaaagtataccagacagagaaaacaaaagaacacaaacagctcctaaaaaatgcgcagctggaactgaagaagagtaagaggaaagattactacaagattctaggagtggacaagaatgcctctgaggacgagatcaagaaagcttatcggaaacgggccttgatgcaccatccagatcggcatagtggagccagtgctgaggttcagaaggaggaggagaagaagttcaaggaagttggagaggcctttactatcctctctgatcccaagaaaaagactcgctatgacagtggacaggacctagatgaggagggcatgaatatgggtgattttgatccaaacaatatcttcaaggcattctttggcggtcctggcggcttcagctttgaagcatctggtccagggaatttcttttttcaatttggctaatgaagggcaaccacccagaacccagaaaatgcagattcactcagtttaatcttgaatgtggaaacagttcacctcctcccttcatcacgtctccgtgtgcttagagcagtttcgttttctcagttggatgccctgtgtctctgtgagtggggtggagcaaagggaaccaatgccgaagaccgagggcagggg

SEQ ID NO: 5836 - DNA, 1468 bp, Homo sapiens
  source 1..1468: mol_type = unassigned DNA
aagatggcggctgccgcggagtgcgatgtggtaatggcggcgaccgagccggagctgctcgacgaccaagaggcgaagagatatgtgtcctaaaaatgctagctattatggtaatcgagcagccaccttgatgatgcttggaaggttccgggaagctcttggagatgcacaacagtcagtgaggttggatgacagttttgtccggggacatctacgagagggcaagtgccacctctctctggggaatgccatggcagcatgtcgcagcttccagagagccctagaactggatcataaaaatgctcaggcacaacaagagttcaagaatgctaatgcagtcatggaatatgagaaaatagcagaaacagattttgagaagcgagattttcggaaggttgttttctgcatggaccgtgccctagaatttgcccctgcctgccatcgcttcaaaatcctcaaggcagaatgtttagcaatgctgggtcgttatccagaagcacagtctgtggctagtgacattctacgaatggattccaccaatgcagatgctctgtatgtacgaggtctttgcctttattacgaagattgtattgagaaggcagttcagtttttcgtacaggctctcaggatggctcctgaccacgagaaggcctgcattgcctgcagaaatgccaaagcactcaaagcaaagaaagaagatgggaataaagcatttaaggaaggaaattacaaactagcatatgaactgtacacagaagccctggggatagaccccaacaatataaaaacaaatgctaaactctactgtaatcggggtacggttaattccaagcttaggaaactagatgatgcaatagaagactgcacaaatgcagtgaagcttgatgacacttacataaaagcctacttgagaagagctcagtgttacatggacacagaacagtatgaagaagcagtacgagactatgaaaaagtataccagacagagaaaacaaaagaacacaaacagctcctaaaaaatgcgcagctggaactgaagaagagtaagaggaaagattactacaagattctaggagtggacaagaatgcctctgaggacgagatcaagaaagcttatcggaaacgggccttgatgcaccatccagatcggcatagtggagccagtgctgaggttcagaaggaggaggagaagaagttcaaggaagttggagaggcctttactatcctctctgatcccaagaaaaagactcgctatgacagtggacaggacctagatgaggagggcatgaatatgggtgattttgatccaaacaatatcttcaaggcattctttggcggtcctggcggcttcagctttgaagcatctggtccagggaatttcttttttcaatttggctaatgaagggcaaccacccagaacccagaaaatgcagattcactcagtttaatcttgaatgtggaaacagtt

SEQ ID NO: 5837 - DNA, 562 bp, Homo sapiens
  source 1..562: mol_type = unassigned DNA; mol_type = unassigned DNA
agaacacaaacagctcctaaaaaatgcgcagctggaactgaagaagagtaagaggaaagattactacaagattctaggagtggacaagaatgcctctgaggacgagatcaagaaagcttatcggaaacgggccttgatgcaccatccagatcggcatagtggagccagtgctgaggttcagaaggaggaggagaagaagttcaaggaagttggagaggcctttactatcctctctgatcccaagaaaaagactcgctatgacagtggacaggacctagatgaggagggcatgaatatgggtggtgagttggctggggcagcctgggatgaatttgacagctgtagaatgttagaattttttccaaagatgctccagagggagagtctatttgggccaaatctgatccctggtccaaacagtaatagacatggagtcaaacaaatgcagtcaaatgtggcaggttcacagtgtgcagtgagctctgaggaggcgagcactagcaagggaaggcttggaagtgcagaaaagcatggccccatgggtcatgcctgtaatcccagc

SEQ ID NO: 5838 - DNA, 579 bp, Homo sapiens
  source 1..579: mol_type = unassigned DNA; mol_type = unassigned DNA
gaaagaagatgggaataaagcatttaaggaaggaaattacaaactagcatatgaactgtacacagaagccctggggatagaccccaacaatataaaaacaaatgctaaactctactgtaatcggggtacggttaattccaagcttaggaaactagatgatgcaatagaagactgcacaaatgcagtgaagcttgatgacacttacataaaagcctacttgagaagagctcagtggtgggattgttccagccctagactatctttatagacctccagcggaggagattgcacaagctccctcagtctcccatgcctgtgtctaacgcccctcacgttacatggacacagaacagtatgaagaagcagtacgagactatgaaaaagtataccagacagagaaaacaaaagaacacaaacagctcctaaaaaatgcgcagctggaactgaagaagagtaagaggaaagattactacaagattctaggagtggacaagaatgcctctgaggacgagatcaagaaagcttatcggaaacgggccttgatgcaccatccagatcggcatagtggagccagtgctg

SEQ ID NO: 5839 - DNA, 1762 bp, Homo sapiens
  source 1..1762: mol_type = unassigned DNA; mol_type = unassigned DNA
ttttttttttttttttttttaagcaagcccccaacaccatagaaaattcttgatttgctcggaggataattggatgaaggattattttcttctttgtttatgtgcaagaaatgaaaataaggaattgctttgatcagacaacttcttatctttgtggtagaaacagaactgcccttcttggagtggctctgcctctgagatcactacaggggagacagcatgccctgttcagctggctgaatatttggcaacaatctcctgaagcagctggaattgacaagaagtactggagattagctcgggccaaacccttacatctggcctgactactgctgcagtctgcctcaacttacccctaaagctggggagatgccacccacccacatctttgctacacatgccatcatgagctagagttcaccctttctccttaaagccctatttacttttctacttcaactttaaaacaaaattaaaatgtgaggatatccctgaattttaaaaagcatgaagtaaaaatgcaaattagtatagtttgtttaatacattacatatagacctaaagaaagttcatcagggttaatcatttgtcacatcattctatacccagggctatcagctatcaattttccttttttttttttttttaattcaggatccagctctgtcacccaggctggagtgcagtatcaaagtatcatttctcttacttcaaattattacattttattctgtacattgattctgaactcctaatataatatttatgtcctgtatttgcaggccattggtttttttaaagtcataaatcaaaatgatgccagaaaatcaaagatgcccaagatgttgggcttctcttttgccagccacattggtagcactctcctgccctggcctccaagctggtggggatctgtgatgtttgtgaaaatgggcttatgccaggcgcagtggctcacgcctataatcccagcactttgggaggccgaggcgggcagatcggttcaggtcaggagatcgagaccagcctggccaacatggtgaaaccccatctctactaaaaatacaaaaaattagccaggtgtggtggcacatgcctgtaatcccagctactcaggaggctgaggcaggagaatcacttgaaacctgggaggcggaggttgcagtgagcagagatcgtgccattacactccagcctgggctacagagtgagactctgtgtcaaaaaaaaaaaagaaagaaaatgggcttgtgtggtagcaggtaagaaattgaatctctgttgtacagcagctagctgtactgcatgatcacttcccattccccagctgacagtggctgtctctggaactcctaccacagtcttcaattggtaggccagccctggtgccagtgattttatctgggcatggaaaatgccacttgcttctgtggaagagacacttaaaagatctggcagtcggccgggtgcggtggctcacgcctataatcccaacactctgggaggtcaaggcaggcggatcacgaggtcaggagatggagaccatcctggctaacacggtgaaaccctgtctctactaaaaaaaaaaataaaaaattagctgggcgaggtggcgggcgcctgtagtcccagctactctggaggctgaggcaggagaatggcgtgaacccaggaggcggagcttgcagtgatccgagatcacaccactgcactgcagtctgggcaacagagcgagactccatctcaaaaaaaaaaaaaaaa

SEQ ID NO: 5840 - DNA, 441 bp, Homo sapiens
  source 1..441: mol_type = unassigned DNA; mol_type = unassigned DNA
tgaactgtacacagaagccctggggatagaccccaacaatataaaaacaaatgctaaactctactgtaatcggggtacggttaattccaagcttaggaaactagatgatgcaatagaagactgcacaaatgcagtgaagcttgatgacacttacataaaagcctacttgagaagagctcagtggtgggattgttccagccctagactatctttatagacctccagcggaggagattgcacaagctccctcagtctcccatgcctgtgtctaacgcccctcacggtcagtaagtttcctctgatgcctgacccaaattccttttgttaaaaagtttaaatccatttcctttggagattttattttgtgttgtacacttatgctctaccctggcacagtgcttgacacataggtgctcactgaataaatgttttgttgaatga

SEQ ID NO: 5841 - DNA, 1058 bp, Homo sapiens
  source 1..1058: mol_type = unassigned DNA; mol_type = unassigned DNA
gcttccgcctggcgtaggagctgaggcatggccttgttctccagctgagaggacgatcgtccttataggagaggccgagtctccgagggcaatttcagaggtctggtgcgagggaagcagagactttcaaggaacaaggaaatgcatactatgccaagaaagattacaatgaagcttataattattatacaaaagccatagatatgtgtcctaaaaatgctagctattatggtaatcgagcagccaccttgatgatgcttggaaggttccgggaagctcttggagatgcacaacagtcagtgaggttggatgacagttttgtccggggacatctacgagagggcaagtgccacctctctctggggaatgccatggcagcatgtcgcagcttccagagagccctagaactggatcataaaaatgctcaggcacaacaagagttcaagaatgctaatgcagtcatggaatatgagaaaatagcagaaacagattttgagaagcgagattttcggaaggttgttttctgcatggaccgtgccctagaatttgcccctgcctgccatcgcttcaaaatcctcaaggcagaatgtttagcaatgctgggtcgttatccagaagcacagtctgtggctagtgacattctacgaatggattccaccaatgcagatgctctgtatgtacgaggtctttgcctttattacgaagattgtattgagaaggcagttcagtttttcgtacaggctctcaggatggctcctgaccacgagaaggcctgcattgcctgcagaaatgccaaagcactcaaagcaaagaaagaagatgggaataaagcatttaaggaaggaaattacaaactagcatatgaactgtacacagaagccctggggatagaccccaacaatataaaaacaaatgctaaactctactgtaatcggggtacggttaattccaaggaaactagatgatgcaatagaagactgcacaaatgcagtgaagcttgatgacacttacataaaagcctacttgagaagagctcagtggtgggattgttccagccc

SEQ ID NO: 5842 - DNA, 782 bp, Homo sapiens
  source 1..782: mol_type = unassigned DNA; mol_type = unassigned DNA
cggtaagatggcggctgccgcggagtgcgatgtggtaatggcggcgaccgagccggagctgctcgacgaccaagaggcgaagagggaagcagagactttcaaggaacaaggaaatgcatactatgccaagaaagattacaatgaagcttataattattatacaaaagccatagatatgtgtcctaaaaatgctagctattatggtaatcgagcagccaccttgatgatgcttggaaggttccgggaagctcttggagatgcacaacagtcagtgaggttggatgacagttttgtccggttcaagaatgctaatgcagtcatggaatatgagaaaatagcagaaacagattttgagaagcgagattttcggaaggttgttttctgcatggaccgtgccctagaatttgcccctgcctgccatcgcttcaaaatcctcaaggcagaatgtttagcaatgctgggtcgttatccagaagcacagtctgtggctagtgacattctacgaatggattccaccaatgcagatgctctgtatgtacgaggtctttgcctttattacgaagattgtattgagaaggcagttcagtttttcgtacaggctctcaggatggctcctgaccacgagaaggcctgcattgcctgcagaaatgccaaagcactcaaagcaaagaaagaagatgggaataaagcatttaaggaaggaaattacaaactagcatatgaactgtacacagaagccctggggatagaccccaacaatataaaaacaaatgctaaactct

SEQ ID NO: 5843 - DNA, 832 bp, Homo sapiens
  source 1..832: mol_type = unassigned DNA; mol_type = unassigned DNA
agtggtcgctgtggtttcagctccctccacactgggataggcagagtatgagcattggcacatgctgttttcctggaacaaacagggaagcagagactttcaaggaacaaggaaatgcatactatgccaagaaagattacaatgaagcttataattattatacaaaagccatagatatgtgtcctaaaaatgctagctattatggtaatcgagcagccaccttgatgatgcttggaaggttccgggaagctcttggagatgcacaacagtcagtgaggttggatgacagttttgtccggggacatctacgagagggcaagtgccacctctctctggggaatgccatggcagcatgtcgcagcttccagagagccctagaactggatcataaaaatgctcaggcacaacaagagttcaagaatgctaatgcagtcatggaatatgagaaaatagcagaaacagattttgagaagcgagattttcggaaggttgttttctgcatggaccgtgccctagaatttgcccctgcctgccatcgcttcaaaatcctcaaggcagaatgtttagcaatgctgggtcgttatccagaagcacagtctgtggctagtgacattctacgaatggattccaccaatgcagatgctctgtatgtacgaggtctttgcctttattacgaagattgtattgagaaggcagttcagtttttcgtacaggctctcaggatggctcctgaccacgagaaggcctgcattgcctgcagaaatgccaaagcactcaaagcaaagaaagaagatgggaataaagcatttaaggaaggaaattacaaactagc

SEQ ID NO: 5844 - DNA, 431 bp, Homo sapiens
  source 1..431: mol_type = unassigned DNA; mol_type = unassigned DNA
agaattatgatcctggcaggggaaacagatgaacttggaagaaacaaaagatcttctttgcctgcagctgtccctagtcatggggaggttggggggtgggaagtgaagcactgacgatccccatgattagcagaaccagctctgcataaaacggggtccttgtgaaggcaacagggttgttttctgcatggaccgtgccctagaatttgcccctgcctgccatcgcttcaaaatcctcaaggcagaatgtttagcaatgctgggtcgttatccagaagcacagtctgtggctagtgacattctacgaatggattccaccaatgcagatgctctgtatgtacgaggtctttgcctttattacgaagattgtattgagaaggcagttcagtttttcgtacaggctctcaggatggctcctgaccacgagaagg

SEQ ID NO: 5845 - DNA, 586 bp, Homo sapiens
  source 1..586: mol_type = unassigned DNA; mol_type = unassigned DNA
cttcctctcccgcttccgcctggcgtaggagctgaggcatggccttgttctccagctgagaggacgatcgtccttataggagaggccgagtctccgagggcaatttcagagggaagcagagactttcaaggaacaaggaaatgcatactatgccaagaaagattacaatgaagcttataattattatacaaaagccatagatatgtgtcctaaaaatgctagctattatggtaatcgagcagccaccttgatgatgcttggaaggttccgggaagctcttggagatgcacaacagtcagtgaggttggatgacagttttgtccggggacatctacgagagggcaagtgccacctctctctggggaatgccatggcagcatgtcgcagcttccagagagccctagaactggatcataaaaatgctcaggcacaacaagagttcaagaatgctaatgcagtcatggaatatgagaaaatagcagaaacagattttgagaagcgagattttcggaaggttgttttctgcatggaccgtgccctagaatttgcccctgcctgccatcgcttcaaaatcctcaaggcagaa

SEQ ID NO: 5846 - DNA, 544 bp, Homo sapiens
  source 1..544: mol_type = unassigned DNA; mol_type = unassigned DNA
ctttcttaagttaagcaccaaggaagagggcaactgcttgggcgctgttggcactccgaagcagccgcagtggttcgagattgccagtcggactagccaagggagctgctgaggaagcagagactttcaaggaacaaggaaatgcatactatgccaagaaagattacaatgaagcttataattattatacaaaagccatagatatgtgtcctaaaaatgctagctattatggtaatcgagcagccaccttgatgatgcttggaaggttccgggaagctcttggagatgcacaacagtcagtgaggttggatgacagttttgtccggggacatctacgagagggcaagtgccacctctctctggggaatgccatggcagcatgtcgcagcttccagagagccctagaactggatcataaaaatgctcaggcacaacaagagttcaagaatgctaatgcagtcatggaatatgagaaaatagcagaaacagattttgagaagcgagattttcggaaggttgttttctgcatggaccgtgccctaga

SEQ ID NO: 5847 - DNA, 620 bp, Homo sapiens
  source 1..620: mol_type = unassigned DNA; mol_type = unassigned DNA
gcctggcgtaggagctgaggcatggccttgttctccagctgagaggacgatcgtccttataggagaggccgagtctccgagggcaatttcagaggtctggtgcgagtgacaaatgcatgagccacttttcaggaggtgaaattattaaaactcttgaggatgtgacctatttcacattgagaaataagttgccctgaatggagtaaccatttttcctggaagcagagactttcaaggaacaaggaaatgcatactatgccaagaaagattacaatgaagcttataattattatacaaaagccatagatatgtgtcctaaaaatgctagctattatggtaatcgagcagccaccttgatgatgcttggaaggttccgggaagctcttggagatgcacaacagtcagtgaggttggatgacagttttgtccggggacatctacgagagggcaagtgccacctctctctggggaatgccatggcagcatgtcgcagcttccagagagccctagaactggatcataaaaatgctcaggcacaacaagagttcaagaatgctaatgcagtcatggaatatgagaaaatagcagaaacagattttgagaagcgagattttcggaag

SEQ ID NO: 5848 - DNA, 686 bp, Homo sapiens
  source 1..686: mol_type = unassigned DNA; mol_type = unassigned DNA
cggtaagatggcggctgccgcggagtgcgatgtggtaatggcggcgaccgagccggagctgctcgacgaccaagaggcgaagagtcccacgcctttgacatctcatccttcagtccctttgctgtaaaggcaacttgaacaagcttcagccctttctcagacttccagggcaggacttgaatggatttgacactggaattgttcctgatgcagccttgttcagttcttgctgctgccatgctggattccaaagatccactctttcctcgactggtctcgcaggggaagcagagactttcaaggaacaaggaaatgcatactatgccaagaaagattacaatgaagcttataattattatacaaaagccatagatatgtgtcctaaaaatgctagctattatggtaatcgagcagccaccttgatgatgcttggaaggttccgggaagctcttggagatgcacaacagtcagtgaggttggatgacagttttgtccggggacatctacgagagggcaagtgccacctctctctggggaatgccatggcagcatgtcgcagcttccagagagccctagaactggatcataaaaatgctcaggcacaacaagagttcaagaatgctaatgcagtcatggaatatgagaaaatagcagaaacagattttgagaagcgagattttcggaag

SEQ ID NO: 5849 - DNA, 678 bp, Homo sapiens
  source 1..678: mol_type = unassigned DNA; mol_type = unassigned DNA
gtcgctgtggtttcagctccctccacactgggataggcagagtatgagcattggcacatgctgttttcctggaacaaacagtcccacgcctttgacatctcatccttcagtccctttgctgtaaaggcaacttgaacaagcttcagccctttctcagacttccagggcaggacttgaatggatttgacactggaattgttcctgatgcagccttgttcagttcttgctgctgccatgctggattccaaagatccactctttcctcgactggtctcgcaggggaagcagagactttcaaggaacaaggaaatgcatactatgccaagaaagattacaatgaagcttataattattatacaaaagccatagatatgtgtcctaaaaatgctagctattatggtaatcgagcagccaccttgatgatgcttggaaggttccgggaagctcttggagatgcacaacagtcagtgaggttggatgacagttttgtccggggacatctacgagagggcaagtgccacctctctctggggaatgccatggcagcatgtcgcagcttccagagagccctagaactggatcataaaaatgctcaggcacaacaagagttcaagaatgctaatgcagtcatggaatatgagaaaatagcagaaacagattttgagaagcgagattttc

SEQ ID NO: 5850 - DNA, 543 bp, Homo sapiens
  source 1..543: mol_type = unassigned DNA; mol_type = unassigned DNA
attgaagtttgtattttaatggttttgaaaagctgagtactgggcacttgcttttttgttcttcgggactttagaagtttggagaacaatagtcagcagttgcctagttgctttgtggcctgatgcagagtccctctgagagcccatttctcccttactgcactagtctttggtcccctttctccagcactgagtgatgtggaagttactcagaggtctttccagggaagcagagactttcaaggaacaaggaaatgcatactatgccaagaaagattacaatgaagcttataattattatacaaaagccatagatatgtgtcctaaaaatgctagctattatggtaatcgagcagccaccttgatgatgcttggaaggttccgggaagctcttggagatgcacaacagtcagtgaggttggatgacagttttgtccggggacatctacgagagggcaagtgccacctctctctggggaatgccatggcagcatgtcgcagcttccagagagccctagaactggatcataaaaatgctcaggc

SEQ ID NO: 5851 - DNA, 566 bp, Homo sapiens
  source 1..566: mol_type = unassigned DNA; mol_type = unassigned DNA
accatcccaatgctagtcagaggaaacggatgtctccatgtctactactggatgtcccacgcctttgacatctcatccttcagtccctttgctgtaaaggcaacttgaacaagcttcagccctttctcagacttccagggcaggacttgaatggatttgacactggaattgttcctgatgcagccttgttcagttcttgctgctgccatgctggattccaaagatccactctttcctcgactggtctcgcaggggaagcagagactttcaaggaacaaggaaatgcatactatgccaagaaagattacaatgaagcttataattattatacaaaagccatagatatgtgtcctaaaaatgctagctattatggtaatcgagcagccaccttgatgatgcttggaaggttccgggaagctcttggagatgcacaacagtcagtgaggttggatgacagttttgtccggggacatctacgagagggcaagtgccacctctctctggggaatgccatggcagcatgtcgcagcttccagagagccctagaactggatcataaaaatgct

SEQ ID NO: 5852 - DNA, 541 bp, Homo sapiens
  source 1..541: mol_type = unassigned DNA; mol_type = unassigned DNA
acatcgcccccgacccccgcgttctcttgttaacttctgtgcattgttgcctgtctgcactttccgtctccaaaacctttgctctcctcaccccgttttcccttgtaattataccccagcgatcactagtctgggttcgaagtgattgtgtgtctccataattgacctggttgcccccggttatcccagaagtcaaagatgacagagaaaaaaaggaagagcgaggggcttatctcgtgttctctacgtcagactcctcttcccctgtccttcctgggtgatctttatccttcccagcactgttctttcttaagttaagcaccaaggaagagggcaactgcttgggcgctgttggcactccgaagcagccgcagtggttcgagattgccagtcggactagccaagggagctgctgatgacaaatgcatgagccacttttcaggaggtgaaattattaaaactcttgaggatgtgacctatttcacattgagaaataagttgccctgaatggagtaaccatttttcctggaagcagagactt

SEQ ID NO: 5853 - DNA, 1956 bp, Homo sapiens
  source 1..1956: mol_type = unassigned DNA; mol_type = unassigned DNA
tgtaaattaaacatgacaacatgcattattcctgtagttcaaatagtgacagaaaaaaattaattaaaaaaagaaaaaagactgggcgtggtggctcacacctgtaatcccagcactttgggaggccaaggcgggtggattacctgaggtcaggagttcgaaaccagcctgactaatacggtgaaaccccatctactaaaaatacaaaaattagccaggtggggtgatgctgtaatcccagctagtcaggaggctgaggcagaggttgtggtgaggggagatcatgccattgcactccagcctgggcaacaagagcaaaactccgtctcaaaaaaaaaaaaatcaattaaaaaaagaaaaaaatgcattcttatcagacttttatgtttctcatatatagcactgttttcgacagacttaaacatagttatttattatataccacttttttgcacaaatcaaaaggaaaattggctgggtgcagtggctcacacttgtaatcccatcattttgggaggctgaggtgggcggatcacgaggtcaggagtttgagaccagcctggccaacatggtgaaaccccatctctactaaaaatagaaaaaatagctgggcgtagtggtgggcacctgtaatcccagctactcgggagtctgaggcaggagagtcgcttgaacccgggaggcggaggttgcagtgagccaaggtcacaccattgcactccagcctgggcgacatggtgagactccatttcaaaaaaaaaaaaggaaaataagtgaaataaacaaaaaaatcagtttaactttttgccatatcagacatccttagaagaataaacattggccgggcgcggtggcttatgcctataatcccagcactttgggaggctaaagcaggctgatcacctgaggtcgggagtttgagaccagcctgaccaacatggagaaaccccatctctactaaaaatagaaaaaaaaaattagccaggcatggcggtgcatgcctgtagccccaccgacttggaggctgaggcaggagaatcacttgaatccggtaggcggaggttgcggtgagccgagatcgtgccattgcactccaacctgggcgacaagagtgaaactctgtctcaaaaaaaagaataaacattaggctctgttagtatgaaaaagccttgtttatgtatgatttttccagtgctgaaaatgggatggagatttagaagctttggagggaggtggttttatgtttttcatgtgtcctggattcctcttgtgtggccatagcagagggcagtgataggggcatcccttacaaatgcccttttactgtctggcttggttagagttctttggccaagttcctgcctctgttgttatggtcctcctaccagttcatttagggatcaagagttaatgagtctctcgggtcgtttttgtgaggtccagctttgtaaggagtccttccttccttacgtcttggcttaagacatgtcctgctgctgctaagttgtcacagtcccataggggggcaaaatgagaggagcttttaagacggacttcacgattgcagcattttaaatggctacatgttttatttccttagctttagtgtttctgtagagaaaagagatggatttcaatttttttgcatgtcactctgacaaagttctgtttcccttacagcagccaagaaactaaaataaggctaggcttagtggctcatgcctgtaatcttagcactttgtgaggccaaaatgagaggatcgcttaagcccagtagtttgagaccagcctgggcaacatagtgagacttagtctctataaaaacatttaaggctgggtgcggtggctcacgcctgtaattccagcaccttgggaggctgaggccagtggattgcttgaggccaggagttcgagaccaacctgggcaacgtggtgaaacccgccccccatctctgt

SEQ ID NO: 5854 - DNA, 2564 bp, Homo sapiens
  source 1..2564: mol_type = unassigned DNA; mol_type = unassigned DNA
ccgcttccgcctggcgtaggagctgaggcatggccttgttctccagctgagaggacgatcgtccttataggagaggccgagtctccgagggcaatttcagaggtctggtgcgaggtgggggaagcggcgcggcgtcgatgacgacttccttacatcgcccccgacccccgcgttctcttgttaacttctgtgcattgttgcctgtctgcactttccgtctccaaaacctttgctctcctcaccccgttttcccttgtaattataccccagcgatcactagtctgggttcgaagtgattgtgtgtctccataattgacctggttgcccccggttatcccagaagtcaaagatgacagagaaaaaaaggaagagcgaggggcttatctcgtgttctctacgtcagactcctcttcccctgtccttcctgggtgatctttatccttcccagcactgttctttcttaagttaagcaccaaggaagagggcaactgcttgggcgctgttggcactccgaagcagccgcagtggttcgagattgccagtcggactagccaagggagctgctgagtgagtggttttcgagaacgctctagattctggcaacagttaggccagattattggaagtggggttggaacagagttgtgggtagtcatacttgttctaatcctaaagcagaattgacaagaaggttctagaagtttggagccctttccttatcagctgcgggttagtctgacccttttgttcaagatatctacagtgccctcagtctctttgcaacatactttatatcttcataccaagcccgttgtgtcttcaggctgggtaatttgaggcggtgatgtagaattagttcatgagatctgaaatcaggattctgagatttttactatctaatgagttcgaaatataagaagtactcggacgcaatgaatagttatcaagcttgagggtggttaccacagccagatctcaagttcctgatctgctgggagctgaggggcctgacaaagtgtaataggcccctgggatatcagagaagccaggacaccagagtccagtctctgttcttaattttgagctttcatgttgttcctacttcttcctagatatttaaagctaagcatcatcaacccttatacatcattaaagagctgcacaatgggaaacaaaattcctcccagtgcagacggagcttaaattaattgtagagatttacttgtatttggaaagagttcagtggttctttatactgtaaatagggatttggccacaggttatttattttttattttttgagacggaatctcgctctgtcgcccaggctggagtgtagtggcgcgacctcagctcactgcaagctccgcctcctgagttcacaccattctcctgcctcagcctcaccagttgctgggactacacgtgcccaccaccacatccggctaattgttgttttttttttgtatttttagtagagatggggtttcaccctgttagccacgatggtctcgatctcctgacctcgtgatccgcccacctcggcctcccaaagtgctgggattacaggcgtgagctactgtgccgggctggccataggtaattttaaaaactcaccctactcattgtaaatctctgatgtagagtgtccctattttggacttcatttcatagcctcctatcttaagcaaatacatttcttcaatcacagccttagaggatagtctatcataaaattggagtaaatgaacctgaagacatataataaaataggttatgctgtaatgtgaccacatcacacaaaacatggtatttgatagcagtacaacaaaataaggtaaactaccttatttcatggaatttaagtgtcattaggctgggtgcagtagctcacacctgtaatcccagcactttgggaggccgaggcaggtgggtcagctgaggtcgggagtttgaaaccagcatggccaacatggcagaaccctgtctctactaaaaatacaaaaattagcggggcgtggtggcacacacatgtaatcccagttacacgggaggctgaggcaggagaatcgcttgaactcaggaggtggaggttgcagtgagctgagatcgggccattgcactccagcctgggtgacaaagtgagattccatctcaaaaaaaagtcattgattgcagaatgcaaattattttatctgtcactaagaaaatgtaactgtaaattaaacatgacaacatgcattattcctgtagttcaaatagtgacagaaaaaaattaattaaaaaaagaaaaaagactgggcgtggtggctcacacctgtaatcccagcactttgggaggccaaggcgggtggattacctgaggtcaggagttcgaaaccagcctgactaatacggtgaaaccccatctactaaaaatacaaaaattagccaggtggggtgatgctgtaatcccagctagtcaggaggctgaggcagaggttgtggtgaggggagatcatgccattgcactccagcctgggcaacaagagcaaaactccgtctcaaaaaaaaaaaaatcaatt

SEQ ID NO: 5855 - DNA, 3260 bp, Homo sapiens
  source 1..3260: mol_type = unassigned DNA; mol_type = unassigned DNA
cgcagctgcaggaggcgcccggcccggcggagcagccctagccgccaccgtcgctctcgcagctctcgtcgccactgccaccgccgccgccgtcactgcgtcctggctccggctcccgcgccctcccggccggccatgcagccccgccgcgcccaggcgcccggtgcgcagctgctgcccgcgctggccctgctgctgctgctgctcggagcggggccccgaggcagctccctggccaacccggtgcccgccgcgcccctgtctgcgcccgggccgtgcgccgcgcagccctgccggaatgggggtgtgtgcacctcgcgccctgagccggacccgcagcacccggcccccgccggcgagcctggctacagctgcacctgccccgccgggatctccggcgccaactgccagcttgttgcagatccttgtgccagcaacccttgtcaccatggcaactgcagcagcagcagcagcagcagcagcgatggctacctctgcatttgcaatgaaggctatgaaggtcccaactgtgaacaggcacttcccagtctcccagccactggctggaccgaatccatggcaccccgacagcttcagcctgttcctgctactcaggagcctgacaaaatcctgcctcgctctcaggcaacggtgacactgcctacctggcagccgaaaacagggcagaaagttgtagaaatgaaatgggatcaagtggaggtgatcccagatattgcctgtgggaatgccagttctaacagctctgcgggtggccgcctggtatcctttgaagtgccacagaacacctcagtcaagattcggcaagatgccactgcctcactgattttgctctggaaggtcacggccacaggattccaacagtgctccctcatagatggacgaagtgtgaccccccttcaggcttcagggggactggtcctcctggaggagatgctcgccttggggaataatcactttattggttttgtgaatgattctgtgactaagtctattgtggctttgcgcttaactctggtggtgaaggtcagcacctgtgtgccgggggagagtcacgcaaatgacttggagtgttcaggaaaaggaaaatgcaccacgaagccgtcagaggcaactttttcctgtacctgtgaggagcagtacgtgggtactttctgtgaagaatacgatgcttgccagaggaaaccttgccaaaacaacgcgagctgtattgatgcaaatgaaaagcaagatgggagcaatttcacctgtgtttgccttcctggttatactggagagctttgccagtccaagattgattactgcatcctagacccatgcagaaatggagcaacatgcatttccagtctcagtggattcacctgccagtgtccagaaggatacttcggatctgcttgtgaagaaaaggtggacccctgcgcctcgtctccgtgccagaacaacggcacctgctatgtggacggggtacactttacctgcaactgcagcccgggcttcacagggccgacctgtgcccagcttattgacttctgtgccctcagcccctgtgctcatggcacgtgccgcagcgtgggcaccagctacaaatgcctctgtgatccaggttaccatggcctctactgtgaggaggaatataatgagtgcctctccgctccatgcctgaatgcagccacctgcagggacctcgttaatggctatgagtgtgtgtgcctggcagaatacaaaggaacacactgtgaattgtacaaggatccctgcgctaacgtcagctgtctgaacggagccacctgtgacagcgacggcctgaatggcacgtgcatctgtgcacccgggtttacaggtgaagagtgcgacattgacataaatgaatgtgacagtaacccctgccaccatggtgggagctgcctggaccagcccaatggttataactgccactgcccgcatggttgggtgggagcaaactgtgagatccacctccaatggaagtccgggcacatggcggagagcctcaccaacatgccacggcactccctctacatcatcattggagccctctgcgtggccttcatccttatgctgatcatcctgatcgtggggatttgccgcatcagccgcattgaataccagggttcttccaggccagcctatgaggagttctacaactgccgcagcatcgacagcgagttcagcaatgccattgcatccatccggcatgccaggtttggaaagaaatcccggcctgcaatgtatgatgtgagccccatcgcctatgaagattacagtcctgatgacaaacccttggtcacactgattaaaactaaagatttgtaatctttttttggattatttttcaaaaagatgagatactacactcatttaaatatttttaagaaaataaaaagcttaagaaatttaaaatgctagctgctcaagagttttcagtagaatatttaagaactaattttctgcagcttttagtttggaaaaaatattttaaaaacaaaatttgtgaaacctatagacgatgttttaatgtaccttcagctctctaaactgtgtgcttctactagtgtgtgctcttttcactgtagacactatcacgagacccagattaatttctgtggttgttacagaataagtctaatcaaggagaagtttctgtttgacgtttgagtgccggctttctgagtagagttaggaaaaccacgtaacgtagcatatgatgtataatagagtatacccgttacttaaaaagaagtctgaaatgttcgttttgtggaaaagaaactagttaaatttactattcctaacccgaatgaaattagcctttgccttattctgtgcatgggtaagtaacttatttctgcactgttttgttgaactttgtggaaacattctttcgagtttgtttttgtcattttcgtaacagtcgtcgaactaggcctcaaaaacatacgtaacgaaaaggcctagcgaggcaaattctgattgatttgaatctatatttttctttaaaaagtcaagggttctatattgtgagtaaattaaatttacatttgagttgtttgttgctaagaggtagtaaatgtaagagagtactggttccttcagtagtgagtatttctcatagtgcagctttatttatctccaggatgtttttgtggctgtatttgattgatatgtgcttcttctgattcttgctaatttccaaccatattgaataaatgtgatcaagtcaagga

SEQ ID NO: 5856 - DNA, 842 bp, Homo sapiens
  source 1..842: mol_type = unassigned DNA; mol_type = unassigned DNA
atctctcggccctttcttgtctagatcatattatcttaccttgataaacctttccaaattttctggtcttctatctcgttaaatgcttttgtttttttcctctcaacaaacctgccattctctgagactcccttaagctgcagaacgggaccgaattagcagagtctgactcagacgaagtgagatgggagtgccgaatgacctgagggcactgaattcacttgtgggggttactagctccttacgctttcatttcctcatgaatttagtcactgatcaaagctttactgagcccctgctgcacgccaggagccctgtgctgggggagcggatctgtgcggagtctactgtgatcttctccaggagcactggggagaatgggcagctgttgggatgttgggaagtggtcaggagtctctgggaagaggtaatatgtgggctaggaacacatttccaaggtggagaaggagacaaagcttgggaggattcggcaagatgccactgcctcactgattttgctctggaaggtcacggccacaggattccaacagtgctccctcatagatggacgaagtgtgaccccccttcaggcttcagggggactggtcctcctggaggagatgctcgccttggggaataatcactttattggtccactgtaacttcaaaggggtgaatggtacaacccatggctgataagaatgtccttgttggagctgaggtcatttcttcaggattatagccatcaaattaaccatggaaccctggaaatcaacaatttgcaggtctttctaattgacgtcttaactggattagaaggtttcccagtcagcccatgactc

SEQ ID NO: 5857 - DNA, 4178 bp, Homo sapiens
  source 1..4178: mol_type = unassigned DNA; mol_type = unassigned DNA
ggggaaatgccgaccctattcaaaggagtttggggggttgtggagcattccagagctctgggaagattctgtcccgcctgcttaccctcaggcccacacctccacacacagccagctctgggcactgcagaaatgacgctcctctcctcccagtcttcatcactggtggccccttctgggtctgtgtctgccgaaaatccagagcagaggatgctggagaagagagccaaggtcatagaagaacttcttcagacagaaagagactacattcgggatctggaaatgtgtattgagcggatcatggtacccatgcagcaggcacaggtaccaaacattgattttgagggactttttggaaatatgcagatggtgattaaggtctcgaagcaattattggctgctctggaaatcagcgatgctgtaggacctgtgtttcttggtcaccgggatgagcttgagggaacatacaagatttactgccagaatcatgatgaggccattgcgctgcttgaaatctacgagaaggatgagaagatccagaagcatcttcaggactccttggcagatctgaagagcctatacaacgaatggggatgcacaaattatattaacctgggctccttcctcatcaaaccagtacagagagtaatgcgttacccgctgttgctaatggagttgctgaattccaccccagaatcccacccagataaagtgcctttaaccaatgcagtccttgcggtcaaggaaatcaacgttaacattaatgaatataaacggcgaaaggacctggtcctcaagtaccgtaagggtgatgaagatagccttatggagaaaatttccaaactgaacatccactccatcatcaagaaatccaaccgagttagcagtcacctgaagcatctcactggctttgctcctcagataaaagatgaagtatttgaagaaacagaaaaaaacttccgaatgcaagaaagattgattaagtcttttatccgagacctgtctctctacctccagcacatccgggagtccgcatgtgtgaaagtggtggctgctgtgagcatgtgggatgtgtgcatggagagaggacaccgggacctggagcagtttgagagggtgcatcgctacatcagtgaccagctcttcacaaactttaaggagaggacagagcggcttgtcatctcccccttaaatcagttactgagcatgtttacagggccccataagctggtacagaaacgctttgacaagctcctggacttctataactgtacagaacgggcagaaaagctaaaggacaagaagaccctggaggagctgcagtcggcccggaacaactatgaggccctgaatgcacagctgctggatgagctgcccaagttccaccagtacgcccagggcctcttcaccaactgtgtccacggctatgctgaagcccactgtgactttgtgcaccaggctctggagcaattaaagccactgctttcgttactcaaagtggctggcagagagggaaaccttattgccatcttccacgaagagcacagcagagttctgcagcaactccaggtttttaccttcttcccggagtctcttccagctaccaagaagccatttgagaggaaaaccattgaccgccagtctgctcgaaagccactcctgggcctgccaagttacatgctacagtcagaagaactccgggcctccctcctggccaggtatccccctgaaaaactcttccaggcagaacggaacttcaatgctgctcaagacttggatgtctcacttttggaaggtgacctggtgggtgtgattaagaaaaaagaccccatgggcagccagaaccgctggctgattgacaatggagtcaccaaaggcttcgtgtacagctctttcctaaagccctacaatcctcgccgcagccactccgatgcctccgtgggtagccactcctccacagagtctgagcacggcagctcctcccccaggttcccacgccagaacagcggcagcaccctgaccttcaaccccagcagcatggctgtatcctttacctcggggtcttgccagaagcagcctcaagatgcatctcctccgccaaaagaatgtgaccaaggaactctcagtgcatccctaaatccgagtaattcagagagtagtccttccagatgcccttcagacccagactccacctcccagccaaggtcaggggactctgcagatgtagctagagatgtaaagcaacccactgccacgccgaggagctaccggaacttcaggcatccagaaatagttggctactccgtaccaggacgaaatgggcaaagtcaagacctcgtcaaaggatgtgcaagaacagcccaggctccggaagacagaagtacagagccagatggcagtgaggcagaaggcaaccaggtctattttgctgtctacaccttcaaggcacgaaacccaaatgagctgagcgtgtcagccaatcagaaactcaagatcctcgagtttaaagatgttacaggaaatacagagtggtggttagctgaggttaacgggaagaagggctacgttccctccaattatatccgcaaaaccgagtacacctgagcccacgttgcctgccacccagccttgctgcctttgctttcagtccgccgagggttctggcggcccaccgagagggcgcctgctcctgagacacaggccctgtctgcgttgcttaaccatggcatggtggagcacaccacagatcttgttctcctcgattgggttgtaaaccttgatgctcactagaatctctagaatttgaaatggaccctggggctttgcaaatgacttagtgactatgagaagagagacaagtcttagagctggcttttggaaaggagaaacttgcagtcagaagcccagtgtcctatgtatgcaggaagctgtgctctagcaatagacagtgttggtaatggttgtgctgtacggcgtttggggtggccccatgttccatgctcagctgaccggatgccaactcagatgaaaagaattcatggctctgggcaccccgtgaggcagtgcttgcacatggctgggagtttgtcgggattgaaccaaacctagtgcttcaaagctcctgggacacctccagtgtccagcacacattctcatacatactgcccctaatttctaaagtccctaaagcactacattctgtaaccttgtttcttttactccattcccagattagttatgcaaaattcaactgcgttctacttttagaagtgtttagggtctttattttctgttgacccttcatctgaaagattctcttcccttgttaggtacaatcactgcccccccgcttttttttttgagatggggtcttgctatgttgcccaggctggtcttaaacgcctgggctcaagcaaccctcccgcctccctgctgagattacaggtgtaagccaccataccgcaacctcaatgacacctttctgatggtctttacacagtctgtgatgtctggtggcccccctgccctggactcaataattgatagattttcctagagtaacagtatgagagctccagccattccattaaaagtattagttctgctttgagctgaaaccagttgagcctaatggaagactggatgtctttcttcttcatccaagcaccctaatgactgtttagttacatccatagatgcagacaacataacacctgtgacttacttgaattgggataagccattccagaagtagcttatcctagacttggaaataagatttttttcaccactaacttccatgcttcagagatgacattcaaagccagattcccaagtgcctgatcatacctcccagtctcaggaagatatttgcttaccccttagaccaagaatcttaagatcttccccagctatgaagcctatcttggaatgggaaaccatgaaatttgtcttttaaaagaaagggaagaaatagccttacagcccctgttcctccaagtgcacatttagccttaaaatcctgggagtcgggagacaccgtggagtcctaacatccacagtgtctgctggtcgtggtcagaaggcagtaatgcaagagtccttttgtgaagagtgtttctatgtagagatgtttatatttaagtagttcttttataaataaaagcatttctaatggc

SEQ ID NO: 5858 - DNA, 5437 bp, Homo sapiens
  source 1..5437: mol_type = unassigned DNA; mol_type = unassigned DNA
attatcttctggcctctggagaaagatagagtagctcgctgattggatcctgaggttgaaataactccacatctcactgcgctccgactagagcaacgagaagagtgtctggaatggttgggagacattttaagcaggacaaatccagccttaggctagactgcacctgtccacagcccagcccaggcccatggaaaagaatagtaaaacctttgtctttaagcacatagaatatgtgtgaaacccagaaggctagaaaagaaagggaagtggaggagaaaaggcactgggactccagctgggagtatgaagactacgggagtgtacggaaaaggaaccttacagtgctggatggactctacagagaaaatgacttggatcccaggtactgggccaagggacagcatcagccctacagaaaaagggattgtggatactgggattttgaacagagtgaaccaagctatatggactgtggggaagcacatgaaagtggaaagggctgtgtgtaccacggaggtcatgatggttataggagtccagaaaatgtagattatgagagtctcagccctgggacgaaggataattcacctacgagaagcccagatgtgacctcgaaagctggtggatacggggaggcaaatggctactcagactgtaagaatctgaattataatcctgaggactctaaaaaagctgaacagttgactgactgtaggggtttggatgattcttcagcgaatttaggtcaacctcagttgtggtatatagaccatgagaatgttaaccataatcttgaggattgttgggcaactaatttttattgtagagaacacagcaatttatatcatgttcctgggagttatcctgatggtcagcctgtgagcttttcagattcgaatggtgtcaatgaagataaggaatttatcaaataccatgaaggggacaggaatgttcatcaaaatgacaacatgtatcccaaagcaaagactcatattatggatcagggtgattttgatacagaaaataaaggctatgatgctttatttgcaaactgtgcatataaatctcgtaattccagagggacagattctctccatcaaatggagaatttggagtataatggcactgacataccaagaacaaaggcacatgggggcagcaggatccttctggatggtctgcagactcagtgtaccaggggagaacaaggaggacatcatttggggattcctcagagctcgtcattagagaagaacatctggcatttagaggaagagaaaaaattaaatggcccagagacttggagaaggaatagttgcctccgccgcacagcacccagcaccctgaggcgctcagagttcgtgcaaaacagcaagaaaacccaagaaatgacgctcctctcctcccagtcttcatcactggtggccccttctgggtctgtgtctgccgaaaatccagagcagaggatgctggagaagagagccaaggtcatagaagaacttcttcagacagaaagagactacattcgggatctggaaatgtgtattgagcggatcatggtacccatgcagcaggcacaggtaccaaacattgattttgagggactttttggaaatatgcagatggtgattaaggtctcgaagcaattattggctgctctggaaatcagcgatgctgtaggacctgtgtttcttggtcaccgggatgagcttgagggaacatacaagatttactgccagaatcatgatgaggccattgcgctgcttgaaatctacgagaaggatgagaagatccagaagcatcttcaggactccttggcagatctgaagagcctatacaacgaatggggatgcacaaattatattaacctgggctccttcctcatcaaaccagtacagagagtaatgcgttacccgctgttgctaatggagttgctgaattccaccccagaatcccacccagataaagtgcctttaaccaatgcagtccttgcggtcaaggaaatcaacgttaacattaatgaatataaacggcgaaaggacctggtcctcaagtaccgtaagggtgatgaagatagccttatggagaaaatttccaaactgaacatccactccatcatcaagaaatccaaccgagttagcagtcacctgaagcatctcactggctttgctcctcagataaaagatgaagtatttgaagaaacagaaaaaaacttccgaatgcaagaaagattgattaagtcttttatccgagacctgtctctctacctccagcacatccgggagtccgcatgtgtgaaagtggtggctgctgtgagcatgtgggatgtgtgcatggagagaggacaccgggacctggagcagtttgagagggtgcatcgctacatcagtgaccagctcttcacaaactttaaggagaggacagagcggcttgtcatctcccccttaaatcagttactgagcatgtttacagggccccataagctggtacagaaacgctttgacaagctcctggacttctataactgtacagaacgggcagaaaagctaaaggacaagaagaccctggaggagctgcagtcggcccggaacaactatgaggccctgaatgcacagctgctggatgagctgcccaagttccaccagtacgcccagggcctcttcaccaactgtgtccacggctatgctgaagcccactgtgactttgtgcaccaggctctggagcaattaaagccactgctttcgttactcaaagtggctggcagagagggaaaccttattgccatcttccacgaagagcacagcagagttctgcagcaactccaggtttttaccttcttcccggagtctcttccagctaccaagaagccatttgagaggaaaaccattgaccgccagtctgctcgaaagccactcctgggcctgccaagttacatgctacagtcagaagaactccgggcctccctcctggccaggtatccccctgaaaaactcttccaggcagaacggaacttcaatgctgctcaagacttggatgtctcacttttggaaggtgacctggtgggtgtgattaagaaaaaagaccccatgggcagccagaaccgctggctgattgacaatggagtcaccaaaggcttcgtgtacagctctttcctaaagccctacaatcctcgccgcagccactccgatgcctccgtgggtagccactcctccacagagtctgagcacggcagctcctcccccaggttcccacgccagaacagcggcagcaccctgaccttcaaccccagcagcatggctgtatcctttacctcggggtcttgccagaagcagcctcaagatgcatctcctccgccaaaagaatgtgaccaaggaactctcagtgcatccctaaatccgagtaattcagagagtagtccttccagatgcccttcagacccagactccacctcccagccaaggtcaggggactctgcagatgtagctagagatgtaaagcaacccactgccacgccgaggagctaccggaacttcaggcatccagaaatagttggctactccgtaccaggacgaaatgggcaaagtcaagacctcgtcaaaggatgtgcaagaacagcccaggctccggaagacagaagtacagagccagatggcagtgaggcagaaggcaaccaggtctattttgctgtctacaccttcaaggcacgaaacccaaatgagctgagcgtgtcagccaatcagaaactcaagatcctcgagtttaaagatgttacaggaaatacagagtggtggttagctgaggttaacgggaagaagggctacgttccctccaattatatccgcaaaaccgagtacacctgagcccacgttgcctgccacccagccttgctgcctttgctttcagtccgccgagggttctggcggcccaccgagagggcgcctgctcctgagacacaggccctgtctgcgttgcttaaccatggcatggtggagcacaccacagatcttgttctcctcgattgggttgtaaaccttgatgctcactagaatctctagaatttgaaatggaccctggggctttgcaaatgacttagtgactatgagaagagagacaagtcttagagctggcttttggaaaggagaaacttgcagtcagaagcccagtgtcctatgtatgcaggaagctgtgctctagcaatagacagtgttggtaatggttgtgctgtacggcgtttggggtggccccatgttccatgctcagctgaccggatgccaactcagatgaaaagaattcatggctctgggcaccccgtgaggcagtgcttgcacatggctgggagtttgtcgggattgaaccaaacctagtgcttcaaagctcctgggacacctccagtgtccagcacacattctcatacatactgcccctaatttctaaagtccctaaagcactacattctgtaaccttgtttcttttactccattcccagattagttatgcaaaattcaactgcgttctacttttagaagtgtttagggtctttattttctgttgacccttcatctgaaagattctcttcccttgttaggtacaatcactgcccccccgcttttttttttgagatggggtcttgctatgttgcccaggctggtcttaaacgcctgggctcaagcaaccctcccgcctccctgctgagattacaggtgtaagccaccataccgcaacctcaatgacacctttctgatggtctttacacagtctgtgatgtctggtggcccccctgccctggactcaataattgatagattttcctagagtaacagtatgagagctccagccattccattaaaagtattagttctgctttgagctgaaaccagttgagcctaatggaagactggatgtctttcttcttcatccaagcaccctaatgactgtttagttacatccatagatgcagacaacataacacctgtgacttacttgaattgggataagccattccagaagtagcttatcctagacttggaaataagatttttttcaccactaacttccatgcttcagagatgacattcaaagccagattcccaagtgcctgatcatacctcccagtctcaggaagatatttgcttaccccttagaccaagaatcttaagatcttccccagctatgaagcctatcttggaatgggaaaccatgaaatttgtcttttaaaagaaagggaagaaatagccttacagcccctgttcctccaagtgcacatttagccttaaaatcctgggagtcgggagacaccgtggagtcctaacatccacagtgtctgctggtcgtggtcagaaggcagtaatgcaagagtccttttgtgaagagtgtttctatgtagagatgtttatatttaagtagttcttttataaataaaagcatttctaatggc

SEQ ID NO: 5859 - DNA, 6400 bp, Homo sapiens
  source 1..6400: mol_type = unassigned DNA; mol_type = unassigned DNA
aggggcggaggtgacagcgggctggggactggcggctgcaactgcctgccgcgccgagggaccgccgggcggcggaaagcaggttataaaacatggaggctggctcagtggttcgagccatttttgacttctgccctagcgtatcagaagaactgccgctctttgtgggagatattattgaggtgctggcagtggtggatgaattttggcttctaggaaagaaggaggatgttacaggacaattccccagcagttttgtggaaattgtgaccattcccagtctaaaagagggagagaggctgtttgtgtgcatttgtgaattcacatcccaagagttggataatcttcccctccatcgaggtgacctggtgattctcgatggcattcccactgcaggctggctgcagggccgaagctgctggggcgcacggggcttcttcccatcttcatgtgtccgcgagctctgcctctcctcacagagccggcagtggcactcccagagcgccctgtttcagattccggaatattccatgggacaagcccgggccctaatggggctttctgctcagctggatgaagagctggacttcagggaaggggatgtgatcaccattattggagttcctgaaccaggctggtttgaaggggagttagagggccgaagaggcatttttccagaaggttttgtagagctgttggggcccctgaggactgtggatgagtcagtaagttctggaaatcaagatgactgcattgttaatggtgaagtagatacccctgtaggagaagaagagatagggccggatgaggatgaggaggagccagggacctatggggtcgccctgtacagattccaagccctggagccaaatgagctggatttcgaggtcggggataaaatccgaattctggcgaccttggaagatggctggctggaaggatccctgaagggcaggacaggcatctttccttaccggtttgtgaaattatgtcctgacacacgggtggaggaaaccatggctctgccccaggaaggcagccttgccaggatcccggaaacttctttggattgtttggagaacaccttaggagtagaggaacaaagacatgaaaccagtgaccatgaggccgaggagcctgactgcattatttctgaagcacccacttctcccctcggtcatctgacttcagagtatgacacagacagaaactcttatcaggacgaggacaccgcaggagggcccccgagaagcccaggcgtggagtgggaaatgcctcttgccacagactctcccacatctgaccctacagaagtagtcaatggtatttcctcccaacctcaggtcccttttcatcccaacttgcagaaaagccagtattattctacagtgggagggagccacccgcactcagaacagtaccccgaccttcttcccctagaagcaaggactagagactatgccagcctacctcccaaaagaatgtattcccagctaaaaactcttcagaagccagtgctccctctttacaggggctcttctgtttcagcttcaagggtagtcaaacccagacaatcaagtcctcagctccacaacctagcaagttatactaaaaagcaccacacgtccagtgtttactccatctcagagagattggagatgaagcctggtccgcaagcccaagggcttgttatggaagcagcaacacattcacagggagacggcagcactgacctggactcgaagctgacacaacagctgatcgagtttgagaagagcttggcagggcccggcacagagccagataaaattttacgccacttttcaatcatggactttaactctgagaaggatattgtccgaggttcctcaaagttaatcaccgagcaggagctgccggaaaggagaaaggccctaaggccaccgccacctcgtccctgtactccggtatccacttctccccatttgctggttgaccagaacctaaaacctgcaccacccttggtggtgcgaccctctcgcccagctcccctgcctccctcagcacagcagagaacgaatgcggtatcccccaagctcctatctcgacaccgtcctacctgtgagaccttagaaaaggagggccctggtcatatgggaaggagtctggaccagacctccccatgccccttagtgctggtgaggattgaggaaatggagcgggacttggatatgtacagtagagctcaagaagagctaaacctcatgctggaggagaagcaggatgaatcatcaagagcagagaccctcgaggatctcaagttctgtgaaagtaacattgaaagtttgaatatggaactccagcaactaagagaaatgacgctcctctcctcccagtcttcatcactggtggccccttctgggtctgtgtctgccgaaaatccagagcagaggatgctggagaagagagccaaggtcatagaagaacttcttcagacagaaagagactacattcgggatctggaaatgtgtattgagcggatcatggtacccatgcagcaggcacaggtaccaaacattgattttgagggactttttggaaatatgcagatggtgattaaggtctcgaagcaattattggctgctctggaaatcagcgatgctgtaggacctgtgtttcttggtcaccgggatgagcttgagggaacatacaagatttactgccagaatcatgatgaggccattgcgctgcttgaaatctacgagaaggatgagaagatccagaagcatcttcaggactccttggcagatctgaagagcctatacaacgaatggggatgcacaaattatattaacctgggctccttcctcatcaaaccagtacagagagtaatgcgttacccgctgttgctaatggagttgctgaattccaccccagaatcccacccagataaagtgcctttaaccaatgcagtccttgcggtcaaggaaatcaacgttaacattaatgaatataaacggcgaaaggacctggtcctcaagtaccgtaagggtgatgaagatagccttatggagaaaatttccaaactgaacatccactccatcatcaagaaatccaaccgagttagcagtcacctgaagcatctcactggctttgctcctcagataaaagatgaagtatttgaagaaacagaaaaaaacttccgaatgcaagaaagattgattaagtcttttatccgagacctgtctctctacctccagcacatccgggagtccgcatgtgtgaaagtggtggctgctgtgagcatgtgggatgtgtgcatggagagaggacaccgggacctggagcagtttgagagggtgcatcgctacatcagtgaccagctcttcacaaactttaaggagaggacagagcggcttgtcatctcccccttaaatcagttactgagcatgtttacagggccccataagctggtacagaaacgctttgacaagctcctggacttctataactgtacagaacgggcagaaaagctaaaggacaagaagaccctggaggagctgcagtcggcccggaacaactatgaggccctgaatgcacagctgctggatgagctgcccaagttccaccagtacgcccagggcctcttcaccaactgtgtccacggctatgctgaagcccactgtgactttgtgcaccaggctctggagcaattaaagccactgctttcgttactcaaagtggctggcagagagggaaaccttattgccatcttccacgaagagcacagcagagttctgcagcaactccaggtttttaccttcttcccggagtctcttccagctaccaagaagccatttgagaggaaaaccattgaccgccagtctgctcgaaagccactcctgggcctgccaagttacatgctacagtcagaagaactccgggcctccctcctggccaggtatccccctgaaaaactcttccaggcagaacggaacttcaatgctgctcaagacttggatgtctcacttttggaaggtgacctggtgggtgtgattaagaaaaaagaccccatgggcagccagaaccgctggctgattgacaatggagtcaccaaaggcttcgtgtacagctctttcctaaagccctacaatcctcgccgcagccactccgatgcctccgtgggtagccactcctccacagagtctgagcacggcagctcctcccccaggttcccacgccagaacagcggcagcaccctgaccttcaaccccagcagcatggctgtatcctttacctcggggtcttgccagaagcagcctcaagatgcatctcctccgccaaaagaatgtgaccaaggaactctcagtgcatccctaaatccgagtaattcagagagtagtccttccagatgcccttcagacccagactccacctcccagccaaggtcaggggactctgcagatgtagctagagatgtaaagcaacccactgccacgccgaggagctaccggaacttcaggcatccagaaatagttggctactccgtaccaggacgaaatgggcaaagtcaagacctcgtcaaaggatgtgcaagaacagcccaggctccggaagacagaagtacagagccagatggcagtgaggcagaaggcaaccaggtctattttgctgtctacaccttcaaggcacgaaacccaaatgagctgagcgtgtcagccaatcagaaactcaagatcctcgagtttaaagatgttacaggaaatacagagtggtggttagctgaggttaacgggaagaagggctacgttccctccaattatatccgcaaaaccgagtacacctgagcccacgttgcctgccacccagccttgctgcctttgctttcagtccgccgagggttctggcggcccaccgagagggcgcctgctcctgagacacaggccctgtctgcgttgcttaaccatggcatggtggagcacaccacagatcttgttctcctcgattgggttgtaaaccttgatgctcactagaatctctagaatttgaaatggaccctggggctttgcaaatgacttagtgactatgagaagagagacaagtcttagagctggcttttggaaaggagaaacttgcagtcagaagcccagtgtcctatgtatgcaggaagctgtgctctagcaatagacagtgttggtaatggttgtgctgtacggcgtttggggtggccccatgttccatgctcagctgaccggatgccaactcagatgaaaagaattcatggctctgggcaccccgtgaggcagtgcttgcacatggctgggagtttgtcgggattgaaccaaacctagtgcttcaaagctcctgggacacctccagtgtccagcacacattctcatacatactgcccctaatttctaaagtccctaaagcactacattctgtaaccttgtttcttttactccattcccagattagttatgcaaaattcaactgcgttctacttttagaagtgtttagggtctttattttctgttgacccttcatctgaaagattctcttcccttgttaggtacaatcactgcccccccgcttttttttttgagatggggtcttgctatgttgcccaggctggtcttaaacgcctgggctcaagcaaccctcccgcctccctgctgagattacaggtgtaagccaccataccgcaacctcaatgacacctttctgatggtctttacacagtctgtgatgtctggtggcccccctgccctggactcaataattgatagattttcctagagtaacagtatgagagctccagccattccattaaaagtattagttctgctttgagctgaaaccagttgagcctaatggaagactggatgtctttcttcttcatccaagcaccctaatgactgtttagttacatccatagatgcagacaacataacacctgtgacttacttgaattgggataagccattccagaagtagcttatcctagacttggaaataagatttttttcaccactaacttccatgcttcagagatgacattcaaagccagattcccaagtgcctgatcatacctcccagtctcaggaagatatttgcttaccccttagaccaagaatcttaagatcttccccagctatgaagcctatcttggaatgggaaaccatgaaatttgtcttttaaaagaaagggaagaaatagccttacagcccctgttcctccaagtgcacatttagccttaaaatcctgggagtcgggagacaccgtggagtcctaacatccacagtgtctgctggtcgtggtcagaaggcagtaatgcaagagtccttttgtgaagagtgtttctatgtagagatgtttatatttaagtagttcttttataaataaaagcatttctaatggc

SEQ ID NO: 5860 - DNA, 900 bp, Homo sapiens
  source 1..900: mol_type = unassigned DNA; mol_type = unassigned DNA
tgacaataagcaagcattagtcaattctaatcatgtgagagagtatttttttgcaaagacaaaaaaaggaagcagcacagcaggagctattgggagtgccagggtcggatgggaaaccaggttttgaggatcagtaacatggcaggacagttgtctttgagatggcgacagcatgaaccaagacttgaggaaggagaggtgactggtcattatcgtaatcctataggaatcatcttggttctaatttgataatttgctttttggtaaattaagaaaccctattagggacataggggaatgctaaagagatgataaaagccctcaacagttttgttaagaattaaaagtcttagcctttctctgtgccccgtaagtcatagtttatgaaaatatgcttatttcaaagctaaaataccagactagttagaaaatttcaaattatggaactcatttttccaagactgctattcagtcttggaatgtatgacaaaagctggaaagttctgtctgttctgacttgtgtctgtcctaactggctccaggagtccgcatgtgtgaaagtggtggctgctgtgagcatgtgggatgtgtgcatggagagaggacaccgggacctggagcagtttgagagggtgcatcgctacatcagtgaccagctcttcacaaactttaaggagaggacagagcggcttgtcatctcccccttaaatcagttactgagcatgtttacagggccccataagctggtacagaaacgctttgacaagctcctggacttctataactgtacagaacgggcagaaaagctaaaggacaagaagaccctggaggagctgcagtcggcccggaacaactatgaggccctgaatgcacagctgctggatgagctgcccaagttcc

SEQ ID NO: 5861 - DNA, 6048 bp, Homo sapiens
  source 1..6048: mol_type = unassigned DNA
tccgcagcggagcgggcagcggccaagtcagggccgtccgggggcgcggccggcgatgcccgcagcccccgccgcgccccgccgggcctgctgagccgcccccgggccggggtcgcgccgggccgggccgcgcccggggcggggcggcgctgcctgcatgaccctccggcggcgcggggagaaggcgaccatcagcatccaggagcatatggccatcgacgtgtgccccggccccacccggcccatcaagcagatctccgactacttcccccgcttcccgcggggcctgcccccggacgccgggccccgagccgctgcacccccggacgcccccgcgcgcccggctgtggccggtgccggccgccgcagcccctccgacggcgcccgcgaggacgacgaggatgtggaccagctcttcggagcctacggctccagcccgggccccagcccgggtcccagccccgcgcggccgccagccaagccgccggaggacgagccggacgccgacggctacgagtcggacgactgcactgccctgggcacgctggacttcagcctgctgtatgaccaggagaacaacgccctccactgcaccatcaccaaggccaagggcctgaagccaatggaccacaatgggctggcagacccctacgtcaagctgcacctgctgccaggagccagtaaggcaaataagctcagaacaaaaactctccgtaacactctgaaccccacatggaacgagaccctcacttactacgggatcacagatgaagacatgatccgcaagaccctgcggatctctgtgtgtgacgaggacaaattccggcacaatgagttcatcggggagacacgtgtgcccctgaagaagctgaaacccaaccacaccaagaccttcagcatctgcctggagaagcagctgccggtggacaagactgaagacaagtccctggaggagcggggccgcatcctcatctccctcaagtacagctcacagaagcaaggcctgctggtaggcatcgtgcggtgcgcccacctggccgccatggacgccaacggctactcggacccctacgtgaaaacatacctgaggccagatgtggacaagaaatccaaacataagacagcggtgaagaaaaaaaccctgaacccggagtttaatgaggagttctgttacgagatcaagcatggggacctggccaagaagtccctggaggtcaccgtttgggattacgacattggaaaatccaacgatttcattggtggtgtggttctgggcatccacgccaagggggagcgcctgaagcactggtttgactgcctgaagaacaaggacaagcgcatcgagcgctggcacacgctcaccagcgagctcccaggggctgtgctcagcgactgacgcccacccgccactgctacccctgccgccacctgcgcccagcacggccggccccgggcttccccagcagccaccaaggcctgtggcccccacactgggggagatccagaacccctgcttggacacagagccactgcagtccccgctcggaggatgtggagggctcagccactctgggacggggagggcaaggagctggggtggggggctctcagctctctggggcccaagaggccggtggtggaaagagacctcagcacctgcccaggggaaggggacacgcccatctgggagcaaagacccttctagaggccagccccggctgagaggacaggagtgtgggggcgccttggcggacagtgggaacagaggagggaggtggtgagcagacagacaggtggaggatgggaccttgaagactggctgctccagcccaagaaagcctaactgcatccctcatctccttcgctgctggacagatggaagaagcgggcctgccggccgaaagtctgccagagttcccggaggctcctgatgatgggtaaattggcacatgcttcactcaatgattccacaagccctgggggtgaatgagacacagggcctgccctcagggagttcccatctagtcaggaagctgggaacaaaccattccaactggggtgagaaataccaagaccagcttggccagtctgcaagtaccgtgggctctgctgactctgccgggaggtcagggacggcttcctggaggaggcggtgcttccgtaaggccttggagggtgagtgagggcttctaaaagcagtccaggcagtgggagtggtctaaaacgcctggagagagaaagccaatggggccggggtgctgtggacccagggtctcctctccaggggagggtttgttaggaaggtgtgaggctcgaggcaggaggtgggggacgtgatggaaacaccatggagaaactggtgtaggctcaagttcagacctcagacccaagtctcccactctgatctctttctactcctgagggacctcaaggacggagcccgcccctcctccttcctggcataagcatcaggtcagctgcagtggagaaaagggtcccttgtgcttgggaaaaaaagcaagcattcctacacgtcctgactctgccctttcccctcccctccactccatggctcacactgggggcctccgggtgcttgctcgtggcatcttggtcccactaccgccacagatgtcccttttgggagtaatcagtggccgtccagggccttgtctctggggaggcctgtggggccagctccaccctccaggagctgagcaagaatcaccctggctggtgggcctgtctgctcccctgagtgagactccccaggaggcttgagagtatctgaatcttggggcccatgcctgaagcccacaaactttctctgcctaccaagggcccctcaggaacgctgggtgaacaaatgcagagccaaggagttgcacagccagagtcccagtgtgctcagcccatcagtgtgtgatggaaacaggcccagagaggtcaggtgacctgcccagggccttccaggccccacacagctggaaccaggatccacagcccccagcccagagtgctggacaccacgcttcaggggaattggcgtgctgagctcacaccagagaggtcctgctagctgccagcctggggctcccccgcctgctgcccaccccttcaacaccgatagagggactcacaggcacgacggtgggaccttccactgcagacacaaagcacaccaccacctgaggtccagggttatgatttgaatcctaccaagtgcccatcaggcctttcccaggttgcggggaaaacaggaccccagcccccacacagtccctggccacctgctgctcctggagacttgtctccctgcctttaggaagggtttttgtgtgaaggtttttgcatgcactggtctgaacgcatgttcacagccctgcaaggtgggtttgattctcatccccatcttgcaggtgaaacaggttcccagagtctgagtagtttgccaaggccacacagccaggaaggggtgaaccaggactcaaacccaggtcctctgactgccgctttctctctctgggggtcggtacccccagtcccttccctcttggtctgtcggagactcagcagagacaccaggtgaaggctcagtaagctcaggtgcatgatggagacctggggtcttgtcactgtcctgccacctcatccgctggctttgaaaccatccgtgctacttcaggcttccccagaggtgtctaacctggccccaaaactcagccaccccaccctagcctctgggggctgaggcaagggctcctcttttctccacacagaatgggcaccctctgggggcctaaggtaagaggtggtctatttctaaaaggcctggtgtctagttaagctctgggtatcttcttagctttgcttttttgggggtctcattcagagaggagatttgacagcctctctgaagacacagaagtgaatggcaaagcgagaagaggctgtaccccccacctaccatgacttccttattaggcacatggggaatgtgaggcccagtgggtgaaaggggcctgaaggggcacagctgggacaagaacccagaactccagccccccagtccagggccctctactgcccaggctgtgcaaatggggctgggaccgaaagatggggacagtcaggctgggaggcgggcttactggccagccagcccaggggcagcacaggcactcgggcaggaactccccaggaagtttggatccttccttccctaggatctcagcacccttttagatcccgtgcagattgtctttctgttaaagcgttttgaggcacgatggctcacgcctgtaattgcagcactttgggaggccgaggctggcggatcacctgaggtcaggagttcgaaacccgcctggccaacagggcgaaaccccatctctactaaaaatacaaaaattagccgggtgtggtggcgcacgcctgtagtcccagctactcagggaggctgaggcacgagaatcgcttgaacccgggaggtgaaggctgcagtgagccaagatcgcggcactgcactccagcctgggcgacagagcaagactccgtctcagaaaaaaaacaaacaaacaacgctttgagaagctgcagaagcggctctgcctttgaccccgaatgggcatctttactcgggtccatcatccccacaaagacaggaaatctgatgccaaaaaaaaaaagtcattccaggtgtcagtaaccaggcgctgcctccagcgccgccccgcccgccgccccgcccgccgccccgcccgccgcctgcgccaatccccgacgggcccgtcttccagccccgaagcggtcacctcctgacctctagtggcgagcgcggggaactgcgccccggcccgtccgcccgccgagcccgggccgtgcatgccgagcccgttgttccttcgcaaaccgagtgaacctcccgatgcatggactctggctgtcgtcgacgcagactctcgtgcactgcttaaccccgttttgctgccatgtgacggctgcagacactgtcctcaaactgcagtcccacagacaagttttgtattttggtctgacctacccgaaggtgtcctttttaagtcttatttgttaatatttataatgacatataatccaaagtaaatggaaacgtcatattgcgatctcattgccttggcgagactctcaccttttaatagatttgaaggggtgggggcggtggctcacgcctgtaagtcctagcacttttggaggtcgaggtgggagaattgcttgaggcctggagttcgagaccagcctggtcaacatggagaaaccacgcctctacacacacagagacacacacaatgacaattagcctagcgtggtggcacacacctgtagccccagcttttcaggaggctgaggtaggaggaggaggatcgcttgagcctggaaagtggggattgcagtgagccgagatcacgccaccgcactccagcctgggcaacagagggagaccttgtcaaaaaaaaaaaaaaaagatttggaagggtaggaggggagggtggaaagacggaggaaaaggcaactgaaacctactccggatatagtcttgttactcttcaccagggacccatttgaggtaggccctcaagttacagatggggaaactaaggcccagagaggttaaaatacttttacagaatcacacggctggtcgatggcagaagcaggattcaaactgaggcagcccaagacattttgcaccaggacctgtcgaccatgctgttgtccactcatccaacaaacagccgtggagtattgactaacgccagcccgtctgaggctccaagagtcttacgttttggaaggtaatttaagacatgtactgcttaggtttggagggaaaaaaataaaccttcctaaccacagattagtgtattaggactagtagcaatccccacactttatattttcattccaccttgttagaaaatgttgatcaattgttgaatacagtttattgtacatcattctttaggtcagaaatttctcgagataaaagcctttgctttctaacatcga

SEQ ID NO: 5862 - DNA, 578 bp, Homo sapiens
  source 1..578: mol_type = unassigned DNA
aaaactctccgtaacactctgaaccccacatggaacgagaccctcacttactacgggatcacagatgaagacatgatccgcaagaccctgcggatctctgtgtgtgacgaggacaaattccggcacaatgagttcatcggggagacacgtgtgcccctgaagaagctgaaacccaaccacaccaagaccttcagcatctgcctggagaagcagctgccggtggacaagactgaagacaagtccctggaggagcggggccgcatcctcatctccctcaagtacagctcacagaagcaaggcctgctggtaggcatcgtgcggtgcgcccacctggccgccatggacgccaacggctactcggacccctacgtgaaaacgtgagtgtgccgtgcgcgtgaccacctgccacgtcttcacctccaaggacgggggtccgtgtgccggctccgtggtcccaggtggcaggcacccagggagtgcctgaggtacaggggcgctgtgttccctgatgggctaccttggcaactccaggggttaagcatggccagcccatttcacagatggggaaactgagggac

SEQ ID NO: 5863 - DNA, 418 bp, Homo sapiens
  source 1..418: mol_type = unassigned DNA
cggccgccagccaagccgccggaggacgagccggacgccgacggctacgagtcggacgactgcactgccctgggcacgctggacttcagcctgctgtatgaccaggagaacaacgccctccactgcaccatcaccaaggccaagggcctgaagccaatggaccacaatgggctggcagacccctacgtcaagctgcacctgctgccaggagccagtaaggacttctcagagcatctaacgtgttgatgggctgttccctgactctccgcaagggggatgaagtgggcagaatctgcccctcattcctacgccggatgacccaagcgtccgaccacacatgtgctcagggcaccagcacaacaggtgcatctcggacaggagagagaaaaattgctgttaaataaaagcatcaaggtga

SEQ ID NO: 5864 - DNA, 6048 bp, Homo sapiens
  source 1..6048: mol_type = unassigned DNA
tccgcagcggagcgggcagcggccaagtcagggccgtccgggggcgcggccggcgatgcccgcagcccccgccgcgccccgccgggcctgctgagccgcccccgggccggggtcgcgccgggccgggccgcgcccggggcggggcggcgctgcctgcatgaccctccggcggcgcggggagaaggcgaccatcagcatccaggagcatatggccatcgacgtgtgccccggccccatccgtcccatcaagcagatctccgactacttcccccgcttcccgcggggcctgcccccggacgccgggccccgagccgctgcacccccggacgcccccgcgcgcccggctgtggccggtgccggccgccgcagcccctccgacggcgcccgcgaggacgacgaggatgtggaccagctcttcggagcctacggctccagcccgggccccagcccgggtcccagccccgcgcggccgccagccaagccgccggaggacgagccggacgccgacggctacgagtcggacgactgcactgccctgggcacgctggacttcagcctgctgtatgaccaggagaacaacgccctccactgcaccatcaccaaggccaagggcctgaagccaatggaccacaatgggctggcagacccctacgtcaagctgcacctgctgccaggagccagtaaggcaaataagctcagaacaaaaactctccgtaacactctgaaccccacatggaacgagaccctcacttactacgggatcacagatgaagacatgatccgcaagaccctgcggatctctgtgtgtgacgaggacaaattccggcacaatgagttcatcggggagacacgtgtgcccctgaagaagctgaaacccaaccacaccaagaccttcagcatctgcctggagaagcagctgccggtggacaagactgaagacaagtccctggaggagcggggccgcatcctcatctccctcaagtacagctcacagaagcaaggcctgctggtaggcatcgtgcggtgcgcccacctggccgccatggacgccaacggctactcggacccctacgtgaaaacatacctgaggccagatgtggacaagaaatccaaacataagacagcggtgaagaaaaaaaccctgaacccggagtttaatgaggagttctgttacgagatcaagcatggggacctggccaagaagtccctggaggtcaccgtttgggattacgacattggaaaatccaacgatttcattggtggtgtggttctgggcatccacgccaagggggagcgcctgaagcactggtttgactgcctgaagaacaaggacaagcgcatcgagcgctggcacacgctcaccagcgagctcccaggggctgtgctcagcgactgacgcccacccgccactgctacccctgccgccacctgcgcccagcacggccggccccgggcttccccagcagccaccaaggcctgtggcccccacactgggggagatccagaacccctgcttggacacagagccactgcagtccccgctcggaggatgtggagggctcagccactctgggacggggagggcaaggagctggggtggggggctctcagctctctggggcccaagaggccggtggtggaaagagacctcagcacctgcccaggggaaggggacacgcccatctgggagcaaagacccttctagaggccagccccggctgagaggacaggagtgtgggggcgccttggcggacagtgggaacagaggagggaggtggtgagcagacagacaggtggaggatgggaccttgaagactggctgctccagcccaagaaagcctaactgcatccctcatctccttcgctgctggacagatggaagaagcgggcctgccggccgaaagtctgccagagttcccggaggctcctgatgatgggtaaattggcacatgcttcactcaatgattccacaagccctgggggtgaatgagacacagggcctgccctcagggagttcccatctagtcaggaagctgggaacaaaccattccaactggggtgagaaataccaagaccagcttggccagtctgcaagtaccgtgggctctgctgactctgccgggaggtcagggacggcttcctggaggaggcggtgcttccgtaaggccttggagggtgagtgagggcttctaaaagcagtccaggcagtgggagtggtctaaaacgcctggagagagaaagccaatggggccggggtgctgtggacccagggtctcctctccaggggagggtttgttaggaaggtgtgaggctcgaggcaggaggtgggggacgtgatggaaacaccatggagaaactggtgtaggctcaagttcagacctcagacccaagtctcccactctgatctctttctactcctgagggacctcaaggacggagcccgcccctcctccttcctggcataagcatcaggtcagctgcagtggagaaaagggtcccttgtgcttgggaaaaaaagcaagcattcctacacgtcctgactctgccctttcccctcccctccactccatggctcacactgggggcctccgggtgcttgctcgtggcatcttggtcccactaccgccacagatgtcccttttgggagtaatcagtggccgtccagggccttgtctctggggaggcctgtggggccagctccaccctccaggagctgagcaagaatcaccctggctggtgggcctgtctgctcccctgagtgagactccccaggaggcttgagagtatctgaatcttggggcccatgcctgaagcccacaaactttctctgcctaccaagggcccctcaggaacgctgggtgaacaaatgcagagccaaggagttgcacagccagagtcccagtgtgctcagcccatcagtgtgtgatggaaacaggcccagagaggtcaggtgacctgcccagggccttccaggccccacacagctggaaccaggatccacagcccccagcccagagtgctggacaccacgcttcaggggaattggcgtgctgagctcacaccagagaggtcctgctagctgccagcctggggctcccccgcctgctgcccaccccttcaacaccgatagagggactcacaggcacgacggtgggaccttccactgcagacacaaagcacaccaccacctgaggtccagggttatgatttgaatcctaccaagtgcccatcaggcctttcccaggttgcggggaaaacaggaccccagcccccacacagtccctggccacctgctgctcctggagacttgtctccctgcctttaggaagggtttttgtgtgaaggtttttgcatgcactggtctgaacgcatgttcacagccctgcaaggtgggtttgattctcatccccatcttgcaggtgaaacaggttcccagagtctgagtagtttgccaaggccacacagccaggaaggggtgaaccaggactcaaacccaggtcctctgactgccgctttctctctctgggggtcggtacccccagtcccttccctcttggtctgtcggagactcagcagagacaccaggtgaaggctcagtaagctcaggtgcatgatggagacctggggtcttgtcactgtcctgccacctcatccgctggctttgaaaccatccgtgctacttcaggcttccccagaggtgtctaacctggccccaaaactcagccaccccaccctagcctctgggggctgaggcaagggctcctcttttctccacacagaatgggcaccctctgggggcctaaggtaagaggtggtctatttctaaaaggcctggtgtctagttaagctctgggtatcttcttagctttgcttttttgggggtctcattcagagaggagatttgacagcctctctgaagacacagaagtgaatggcaaagcgagaagaggctgtaccccccacctaccatgacttccttattaggcacatggggaatgtgaggcccagtgggtgaaaggggcctgaaggggcacagctgggacaagaacccagaactccagccccccagtccagggccctctactgcccaggctgtgcaaatggggctgggaccgaaagatggggacagtcaggctgggaggcgggcttactggccagccagcccaggggcagcacaggcactcgggcaggaactccccaggaagtttggatccttccttccctaggatctcagcacccttttagatcccgtgcagattgtctttctgttaaagcgttttgaggcacgatggctcacgcctgtaattgcagcactttgggaggccgaggctggcggatcacctgaggtcaggagttcgaaacccgcctggccaacagggcgaaaccccatctctactaaaaatacaaaaattagccgggtgtggtggcgcacgcctgtagtcccagctactcagggaggctgaggcacgagaatcgcttgaacccgggaggtgaaggctgcagtgagccaagatcgcggcactgcactccagcctgggcgacagagcaagactccgtctcagaaaaaaaacaaacaaacaacgctttgagaagctgcagaagcggctctgcctttgaccccgaatgggcatctttactcgggtccatcatccccacaaagacaggaaatctgatgccaaaaaaaaaaagtcattccaggtgtcagtaaccaggcgctgcctccagcgccgccccgcccgccgccccgcccgccgccccgcccgccgcctgcgccaatccccgacgggcccgtcttccagccccgaagcggtcacctcctgacctctagtggcgagcgcggggaactgcgccccggcccgtccgcccgccgagcccgggccgtgcatgccgagcccgttgttccttcgcaaaccgagtgaacctcccgatgcatggactctggctgtcgtcgacgcagactctcgtgcactgcttaaccccgttttgctgccatgtgacggctgcagacactgtcctcaaactgcagtcccacagacaagttttgtattttggtctgacctacccgaaggtgtcctttttaagtcttatttgttaatatttataatgacatataatccaaagtaaatggaaacgtcatattgcgatctcattgccttggcgagactctcaccttttaatagatttgaaggggtgggggcggtggctcacgcctgtaagtcctagcacttttggaggtcgaggtgggagaattgcttgaggcctggagttcgagaccagcctggtcaacatggagaaaccacgcctctacacacacagagacacacacaatgacaattagcctagcgtggtggcacacacctgtagccccagcttttcaggaggctgaggtaggaggaggaggatcgcttgagcctggaaagtggggattgcagtgagccgagatcacgccaccgcactccagcctgggcaacagagggagaccttgtcaaaaaaaaaaaaaaaagatttggaagggtaggaggggagggtggaaagacggaggaaaaggcaactgaaacctactccggatatagtcttgttactcttcaccagggacccatttgaggtaggccctcaagttacagatggggaaactaaggcccagagaggttaaaatacttttacagaatcacacggctggtcgatggcagaagcaggattcaaactgaggcagcccaagacattttgcaccaggacctgtcgaccatgctgttgtccactcatccaacaaacagccgtggagtattgactaacgccagcccgtctgaggctccaagagtcttacgttttggaaggtaatttaagacatgtactgcttaggtttggagggaaaaaaataaaccttcctaaccacagattagtgtattaggactagtagcaatccccacactttatattttcattccaccttgttagaaaatgttgatcaattgttgaatacagtttattgtacatcattctttaggtcagaaatttctcgagataaaagcctttgctttctaacatcga

SEQ ID NO: 5865 - DNA, 578 bp, Homo sapiens; identical to SEQ ID NO: 5862
  source 1..578: mol_type = unassigned DNA

SEQ ID NO: 5866 - DNA, 418 bp, Homo sapiens; identical to SEQ ID NO: 5863
  source 1..418: mol_type = unassigned DNA

SEQ ID NO: 5867 - DNA, 6797 bp, Homo sapiens
  source 1..6797: mol_type = unassigned DNA
ctccgccgcaaactttttcctccccatcctgtcgcggctcgaaaggaatggaaaatggcggcctagacgcggagtttcctgcccgacccgcggcggctccggcggcgccatgacgcgctgggtgcccaccaagcgcgaggagaagtacggcgtggctttttataactatgatgccagaggagcggatgaactttctttacagatcggagacactgtgcacatcttagaaacatatgaagggtggtaccgaggttacacgttacgaaaaaagtctaagaagggtatatttcctgcttcatatattcatcttaaagaagcgatagttgaaggaaaagggcaacatgaaacagtcatcccgggtgacctccccctcatccaggaagtcaccacgacactccgagagtggtccaccatctggaggcagctctacgtgcaagataacagggagatgtttcgaagtgtgcggcacatgatctatgaccttattgaatggcgatcacaaattctttctggaactctgcctcaggatgaactcaaagaactgaagaagaaggtcacagccaaaattgattatggaaacagaattctagatttggacctggtggttagagatgaagatgggaatattttggatccagaattaactagcacgattagtctcttcagagctcatgaaatagcttctaaacaagtggaggaaaggttacaagaggaaaaatctcaaaagcagaacatagatattaacagacaagccaagtttgctgcaaccccttctctggccttgtttgtgaacctcaaaaatgtggtttgtaaaataggagaagatgctgaagtcctcatgtctctatatgaccctgtggagtccaaattcatcagtgagaactacctggttcgctggtccagttcaggattacctaaagacatagacagattacataatttgcgagccgtgtttactgacctcggaagcaaagacctgaaaagggagaaaatcagttttgtctgtcagattgttcgcgtgggtcgcatggagctgagggacaacaacaccaggaaactgacctcggggttgcggcgaccttttggagtggctgtgatggatgtaacagatataataaatggaaaagtagatgatgaagataagcagcatttcattccctttcagccggtggcaggggagaatgacttccttcagactgttataaacaaagtcatcgctgccaaagaagtcaaccacaaggggcagggtttgtgggtaacattgaaattacttcctggagatatccatcagatccgaaaagagtttccgcatttagtggacaggaccacagctgtggctcgaaaaacagggtttccggagataatcatgcctggtgatgttcgaaatgatatctatgtaacattagttcaaggagattttgataaaggaagcaaaacaacagcgaagaacgtggaggtcacggtgtctgtgtacgatgaggatgggaaacgattagagcatgtgattttcccgggtgctggtgatgaagcgatttcagagtacaaatctgtgatttactaccaagtaaagcagccacgctggtttgagactgttaaggtggccattcccatcgaggacgttaaccgcagtcaccttcggtttaccttccgccacaggtcatcacaggactctaaggataaatctgagaaaatatttgcactagcatttgtcaagctgatgagatacgatggtaccaccctgcgagacggagagcacgatcttatcgtctataaggccgaagcaaagaagctggaagatgctgccacgtacttgagtctgccctccacgaaggcagagttggaagaaaagggccactcggccaccggcaagagcatgcagagccttgggagctgcaccattagcaaggactccttccagatctccacgctcgtgtgctccaccaaactgactcagaacgtggaccttctggggctcttgaaatggcgctccaacaccagcctgctgcagcagaacttgaggcagctgatgaaagtcgatggtggtgaagtagtgaagtttcttcaggacacgttggatgccctcttcaacatcatgatggagaactcagagagtgagacttttgacacgttagtctttgatgctctggtatttatcattggactgattgctgatagaaaatttcagcattttaatcctgttttggaaacttacattaagaaacactttagtgcaacgttagcctacacgaagttgacaaaagtgttgaagaactacgtggacggtgctgagaagccgggagtaaatgagcagctgtacaaagccatgaaagcgctagaatccatcttcaagttcatcgtgcgctccaggatcctgttcaatcaactgtatgaaaacaagggagaggctgacttcgtggaatctttgctgcagctcttcaggtccatcaatgacatgatgagcagcatgtcagaccagaccgtccgggtgaagggggcagcactgaaatacttaccaacgatcgtcaacgatgtgaaattggtgtttgatcccaaagagctcagcaaaatgtttactgaattcatcctcaatgttcccatgggcttgctgaccatccagaaactctactgcttgatcgaaatcgtccacagtgacctcttcacacagcatgactgcagagagatcctgcttcccatgatgaccgatcagctcaagtaccatctggagagacaggaggacctggaggcctgctgtcagctgctcagccacatcctggaggtgctgtacaggaaggacgtggggccaacccagaggcacgtccagattatcatggagaaacttctccggaccgtgaaccgaaccgtcatttccatgggacgagattctgaactcattggaaacttcgtggcttgcatgacagctattttacgacaaatggaagattaccattatgcccacttgatcaagacttttgggaaaatgaggactgatgtggtagatttcctaatggaaacattcatcatgtttaagaacctcattggaaagaacgtttaccccttcgactgggtgatcatgaacatggtgcaaaataaagtcttcctgcgagcaattaatcagtatgcagatatgctgaacaaaaaatttctggatcaagccaactttgagctacagctgtggaacaactactttcacctggctgttgctttccttactcaagagtccctgcaactggagaatttttcaagtgccaagagagccaaaatccttaacaagtacggagatatgaggagacagattggctttgaaatcagagacatgtggtacaaccttggtcaacacaagataaagttcattccagaaatggtgggcccaatattagaaatgacattaattcccgagacggagctgcgcaaagccaccatccccatcttctttgatatgatgcagtgtgaattccattcgacccgaagcttccaaatgtttgaaaatgagatcatcaccaagctggatcatgaagtcgaaggaggcagaggagacgaacagtacaaagtgttatttgataaaatccttctggaacactgcaggaagcacaaatacctcgccaaaacaggagaaacttttgtaaaactcgttgtgcgcttaatggaaaggcttttggattatagaaccatcatgcacgacgagaacaaagaaaaccgcatgagctgcaccgtcaatgtgctgaatttctacaaagaaattgaaagagaagaaatgtatataaggtatttgtacaagctctgtgacctgcacaaggagtgtgataactacaccgaagcggcttacaccttgcttctccatgcaaagcttcttaagtggtcggaggatgtgtgtgtggcccacctcacccagcgggacgggtaccaggccaccacgcagggacagctgaaggagcagctctaccaggaaatcatccactacttcgacaaaggcaagatgtgggaggaggccattgccttgggcaaggagctagccgagcagtatgagaacgaaatgtttgattatgagcaactcagcgaattgctgaaaaaacaggctcagttttatgaaaacatcgtcaaagtgatcaggcccaagcctgactattttgctgttggctactacggacaagggttccccacattcctgcggggaaaagttttcatttaccgagggaaagagtatgagcgccgggaagattttgaggctcggctcttaactcagtttccaaacgccgagaaaatgaagacaacatctccaccaggcgacgatattaaaaactctcctggccagtatattcagtgcttcacagtgaagcccaaactcgatctgcctcctaagtttcacaggccagtgtcagagcagattgtaagtttttacagggtgaacgaggtccagcgatttgaatattctcggccaatccggaagggagagaaaaacccagacaatgaatttgcgaatatgtggatcgagagaaccatatatacaactgcatataaattacctggaattttaaggtggtttgaggtcaagtctgttttcatggtggaaatcagccccctggagaatgccattgagaccatgcagctgacgaacgacaagatcaacagcatggtgcagcagcacctggatgaccccagcctgcccatcaacccgctctccatgctcctgaacggcatcgtggacccagctgtcatggggggcttcgcaaactacgaaaaggccttctttacagaccggtacctgcaggagcaccctgaggcccatgaaaagatcgagaagctcaaggacctgattgcttggcagattccttttctggccgaagggatcagaatccatggagacaaagtcacggaggcactgaggccgttccacgagaggatggaggcctgtttcaaacagctgaaggaaaaggtggagaaagagtacggcgtccgaatcatgccctcaagtctggatgatagaagaggcagccgcccccggtccatggtgcggtccttcacgatgccttcctcatcccgccctctgtctgtggcctctgtctcttccctctcatcggacagcaccccttccagaccaggctccgacgggtttgccctggagcctctcctgccaaagaaaatgcactccaggtcccaggacaagctggacaaggatgacctggagaaggagaagaaggacaagaagaaggaaaaaaggaacagcaaacatcaagagatatttgagaaagaatttaaacccaccgacatttccctgcagcagtctgaggctgtgatcctttcggaaacgataagtcccctgcggccccagagaccgaagagccaggtgatgaacgtcattggaagcgaaaggcgcttctcggtgtccccctcgtcaccgtcctcccagcaaacaccccctccagttacaccaagggccaagctcagcttcagcatgcagtcgagcttggagctgaacggcatgacgggggcggacgtggccgatgtcccaccccctctgcctctcaaaggcagcgtggcagattacgggaatttgatggaaaaccaggacttgctgggctcgccaacacctccacctccccctccacaccagaggcatctgccacctccactgcccagcaaaactccgcctcctccccctccaaagacaactcgcaagcaggcatcggtggactccgggatcgtgcagtgacgtcgcaagcctctctggaaagagtgtgctgcccctccccatctccatgccctctccttctgtgtcccctgagtctgctgtttacctcattgggcctgtgatgttaacatttcgtgcgactgctttttcttcaaaggagttcagttctcaccatggagtgagtggcctttagcgtcatggagcaaggtgggtctgggaggtagatatgggtccgggatgtgctatcgtagttatcagagttgggggcctctgagtgtgtctggctctgagagagtctgagtcttgcccaaacattctttctttttgtgccaaatgacttgcatttgcaaagagctcaattgctctgagctcagccaagtaggagaggctaggccatcactcttaggaagctgtgtagtgatgatgtataagaatcctcctcactgtcatgggatgttgtatccagcccctccttgttccagccggtggtgtgacttcgttggttgaggtgtgtctccaacctacatcagaccatgaagttcaacccctccagggaagctcctgatttcccctgcataattgaaaataggatatttctcagctattgaacagttactaatttatggggtggaaacagcattaagaatactgaatcaaatggaaaaacaaatgaatacaggaagataagtgttcgttcttttctgaaaaagagtatgtgtaccacaagagctggttttaattgggtgaattgtttttgtcctcattctgtacagaaatttgtatatatgatggttcttagaacttgttttaatttttgtggtccttccgtttattataataggcgtccaccaatgattatccatatgtgttcttaatttttaactgctggaagtgttaaaacacacacacacacacacacacattttttttttgagaactccaaagtcctgaaaattttggtggacaatgatttttaaaaaactaactttgtataacctaatatttgtattctctcatctatatttttttattcactataatcatgatactcttctaatagacttaaaagttaatcattgacaacgaaaaataaaatgttattttaaaagac

SEQ ID NO: 5868 - DNA, 5761 bp, Homo sapiens
  source 1..5761: mol_type = unassigned DNA
atggaaaatggcggcctagacgcggagtttcctgcccgacccgcggcggctccggcggcgccatgacgcgctgggtgcccaccaagcgcgaggagaagtacggcgtggctttttataactatgatgccagaggagcggatgaactttctttacagatcggagacactgtgcacatcttagaaacatatgaagggtggtaccgaggttacacgttacgaaaaaagtctaagaagggtatatttcctgcttcatatattcatcttaaagaagcgatagttgaaggaaaagggcaacatgaaacagtcatcccgggtgacctccccctcatccaggaagtcaccacgacactccgagagtggtccaccatctggaggcagctctacgtgcaagataacagggagatgtttcgaagtgtgcggcacatgatctatgaccttattgaatggcgatcacaaattctttctggaactctgcctcaggatgaactcaaagaactgaagaagaaggtcacagccaaaattgattatggaaacagaattctagatttggacctggtggttagagatgaagatgggaatattttggatccagaattaactagcacgattagtctcttcagagctcatgaaatagcttctaaacaagtggaggaaaggttacaagaggaaaaatctcaaaagcagaacatagatattaacagacaagccaagtttgctgcaaccccttctctggccttgtttgtgaacctcaaaaatgtggtttgtaaaataggagaagatgctgaagtcctcatgtctctatatgaccctgtggagtccaaattcatcagtgagaactacctggttcgctggtccagttcaggattacctaaagacatagacagattacataatttgcgagccgtgtttactgacctcggaagcaaagacctgaaaagggagaaaatcagttttgtctgtcagattgttcgcgtgggtcgcatggagctgagggacaacaacaccaggaaactgacctcggggttgcggcgaccttttggagtggctgtgatggatgtaacagatataataaatggaaaagtagatgatgaagataagcagcatttcattccctttcagccgctcgcgttggacgacgccattcgacacaagccgctgaacatgtcatcccgtttttcacccagggtggcaggggagaatgacttccttcagactgttataaacaaagtcatcgctgccaaagaagtcaaccacaaggggcagggtttgtgggtaacattgaaattacttcctggagatatccatcagatccgaaaagagtttccgcatttagtggacaggaccacagctgtggctcgaaaaacagggtttccggagataatcatgcctggtgatgttcgaaatgatatctatgtaacattagttcaaggagattttgataaaggaagcaaaacaacagcgaagaacgtggaggtcacggtgtctgtgtacgatgaggatgggaaacgattagagcatgtgattttcccgggtgctggtgatgaagcgatttcagagtacaaatctgtgatttactaccaagtaaagcagccacgctggtttgagactgttaaggtggccattcccatcgaggacgttaaccgcagtcaccttcggtttaccttccgccacaggtcatcacaggactctaaggataaatctgagaaaatatttgcactagcatttgtcaagctgatgagatacgatggtaccaccctgcgagacggagagcacgatcttatcgtctataaggccgaagcaaagaagctggaagatgctgccacgtacttgagtctgccctccacgaaggcagagttggaagaaaagggccactcggccaccggcaagagcatgcagagccttgggagctgcaccattagcaaggactccttccagatctccacgctcgtgtgctccaccaaactgactcagaacgtggaccttctggggctcttgaaatggcgctccaacaccagcctgctgcagcagaacttgaggcagctgatgaaagtcgatggtggtgaagtagtgaagtttcttcaggacacgttggatgccctcttcaacatcatgatggagaactcagagagtgagacttttgacacgttagtctttgatgctctggtatttatcattggactgattgctgatagaaaatttcagcattttaatcctgttttggaaacttacattaagaaacactttagtgcaacgttagcctacacgaagttgacaaaagtgttgaagaactacgtggacggtgctgagaagccgggagtaaatgagcagctgtacaaagccatgaaagcgctagaatccatcttcaagttcatcgtgcgctccaggatcctgttcaatcaactgtatgaaaacaagggagaggctgacttcgtggaatctttgctgcagctcttcaggtccatcaatgacatgatgagcagcatgtcagaccagaccgtccgggtgaagggggcagcactgaaatacttaccaacgatcgtcaacgatgtgaaattggtgtttgatcccaaagagctcagcaaaatgtttactgaattcatcctcaatgttcccatgggcttgctgaccatccagaaactctactgcttgatcgaaatcgtccacagtgacctcttcacacagcatgactgcagagagatcctgcttcccatgatgaccgatcagctcaagtaccatctggagagacaggaggacctggaggcctgctgtcagctgctcagccacatcctggaggtgctgtacaggaaggacgtggggccaacccagaggcacgtccagattatcatggagaaacttctccggaccgtgaaccgaaccgtcatttccatgggacgagattctgaactcattggaaacttcgtggcttgcatgacagctattttacgacaaatggaagattaccattatgcccacttgatcaagacttttgggaaaatgaggactgatgtggtagatttcctaatggaaacattcatcatgtttaagaacctcattggaaagaacgtttaccccttcgactgggtgatcatgaacatggtgcaaaataaagtcttcctgcgagcaattaatcagtatgcagatatgctgaacaaaaaatttctggatcaagccaactttgagctacagctgtggaacaactactttcacctggctgttgctttccttactcaagagtccctgcaactggagaatttttcaagtgccaagagagccaaaatccttaacaagtacggagatatgaggagacagattggctttgaaatcagagacatgtggtacaaccttggtcaacacaagataaagttcattccagaaatggtgggcccaatattagaaatgacattaattcccgagacggagctgcgcaaagccaccatccccatcttctttgatatgatgcagtgtgaattccattcgacccgaagcttccaaatgtttgaaaatgagatcatcaccaagctggatcatgaagtcgaaggaggcagaggagacgaacagtacaaagtgttatttgataaaatccttctggaacactgcaggaagcacaaatacctcgccaaaacaggagaaacttttgtaaaactcgttgtgcgcttaatggaaaggcttttggattatagaaccatcatgcacgacgagaacaaagaaaaccgcatgagctgcaccgtcaatgtgctgaatttctacaaagaaattgaaagagaagaaatgtatataaggtatttgtacaagctctgtgacctgcacaaggagtgtgataactacaccgaagcggcttacaccttgcttctccatgcaaagcttcttaagtggtcggaggatgtgtgtgtggcccacctcacccagcgggacgggtaccaggccaccacgcagggacagctgaaggagcagctctaccaggaaatcatccactacttcgacaaaggcaagatgtgggaggaggccattgccttgggcaaggagctagccgagcagtatgagaacgaaatgtttgattatgagcaactcagcgaattgctgaaaaaacaggctcagttttatgaaaacatcgtcaaagtgatcaggcccaagcctgactattttgctgttggctactacggacaagggttccccacattcctgcggggaaaagttttcatttaccgagggaaagagtatgagcgccgggaagattttgaggctcggctcttaactcagtttccaaacgccgagaaaatgaagacaacatctccaccaggcgacgatattaaaaactctcctggccagtatattcagtgcttcacagtgaagcccaaactcgatctgcctcctaagtttcacaggccagtgtcagagcagattgtaagtttttacagggtgaacgaggtccagcgatttgaatattctcggccaatccggaagggagagaaaaacccagacaatgaatttgcgaatatgtggatcgagagaaccatatatacaactgcatataaattacctggaattttaaggtggtttgaggtcaagtctgttttcatggtggaaatcagccccctggagaatgccattgagaccatgcagctgacgaacgacaagatcaacagcatggtgcagcagcacctggatgaccccagcctgcccatcaacccgctctccatgctcctgaacggcatcgtggacccagctgtcatggggggcttcgcaaactacgaaaaggccttctttacagaccggtacctgcaggagcaccctgaggcccatgaaaagatcgagaagctcaaggacctgattgcttggcagattccttttctggccgaagggatcagaatccatggagacaaagtcacggaggcactgaggccgttccacgagaggatggaggcctgtttcaaacagctgaaggaaaaggtggagaaagagtacggcgtccgaatcatgccctcaagtctggatgatagaagaggcagccgcccccggtccatggtgcggtccttcacgatgccttcctcatcccgccctctgtctgtggcctctgtctcttccctctcatcggacagcaccccttccagaccaggctccgacgggtttgccctggagcctctcctgccaaagaaaatgcactccaggtcccaggacaagctggacaaggatgacctggagaaggagaagaaggacaagaagaaggaaaaaaggaacagcaaacatcaagagatatttgagaaagaatttaaacccaccgacatttccctgcagcagtctgaggctgtgatcctttcggaaacgataagtcccctgcggccccagagaccgaagagccaggtgatgaacgtcattggaagcgaaaggcgcttctcggtgtccccctcgtcaccgtcctcccagcaaacaccccctccagttacaccaagggccaagctcagcttcagcatgcagtcgagcttggagctgaacggcatgacgggggcggacgtggccgatgtcccaccccctctgcctctcaaaggcagcgtggcagattacgggaatttgatggaaaaccaggacttgctgggctcgccaacacctccacctccccctccacaccagaggcatctgccacctccactgcccagcaaaactccgcctcctccccctccaaagacaactcgcaagcaggcatcggtggactccgggatcgtgcagtgacgtcgcaagcctctctggaaagagtgtgctgcccctcc

SEQ ID NO: 5869 - DNA, 666 bp, Homo sapiens
  source 1..666: mol_type = unassigned DNA
cagcaaaatgtttactgaattcatcctcaatgttcccatgggcttgctgaccatccagaaactctactgcttgatcgaaatcgtccacagtgacctcttcacacagcatgactgcagagagatcctgcttcccatgatgaccgatcagctcaagtaccatctggagagacaggaggacctggaggcctgctgtcagctgctcagccacatcctggaggtgctgtacaggaaggacgtggggccaacccagaggcacgtccagattatcatggagaaacttctccggaccgtgaaccgaaccgtcatttccatgggacgagattctgaactcattgtaagtgcttggtgacatatgtttggatatttaactggggctgacagcatccttctccaactgctgtttgaacatagcttattatactgcaatgtagtgagcagttgagatacagcttggtatataaaatgtcctcattttccaaatgaatgtcaaagttgaagggtaagcaaaccaactttaaagatggaaacatttggctcttgttttctcattacttacttatagcaaaagacatgtattttctgctgagtcgtcattcttctggcagtttctccatagtgtttacacttaaggtgccattaataaaattttatgaaggaccctaaaaa

SEQ ID NO: 5870 - DNA, 779 bp, Homo sapiens
  source 1..779: mol_type = unassigned DNA
ggaaacttcgtggcttgcatgacagctattttacgacaaatggaagattaccattatgcccacttgatcaagacttttgggaaaatgaggactgatgtggtagatttcctaatggaaacattcatcatgtttaagaacctcattggaaagaacgtttaccccttcgactgggtgatcatgaacatggtgcaaaataaagtcttcctgcgagcaattaatcagtatgcagatatgctgaacaaaaaatttctggatcaagccaactttgagctacagctgtggaacaactactttcacctggctgttgctttccttactcaagagtccctgcaactggagaatttttcaagtgccaagagagccaaaatccttaacaagagctttgaatggactgaagcggcaccttctatcattgtaaataaacctctccaaagctccatgaaagccgagatccttgccggcccctccagctctgtaaccccagtttgcatcatgcaccgctcatgactcagtatcaagaagcaccattgttgcatgggtttccttcccctgtttggacacccggagggtcttgcttcgtctctttctgcctccgtttcactaatttctcactgctgtcggtgttcctttcataagtccttttgagaagagttctgaaattgcattggtgttgccacgtcatcagtctctgtttgtcattttataaatacctctgcaatatctcgactgttctaaggcttggccaactccatgctgctagctgaggttagagattccag

SEQ ID NO: 5871 - DNA, 539 bp, Homo sapiens
  source 1..539: mol_type = unassigned DNA
catgacagctattttacgacaaatggaagattaccattatgcccacttgatcaagacttttgggaaaatgaggactgatgtggtagatttcctaatggaaacattcatcatgtttaagaacctcattggaaagaacgtttaccccttcgactgggtgatcatgaacatggtgcaaaataagtaagtgtggggaaaacggctctcaccttttctatggctcccaattcatgtctgctgggaacagtggtgttgcctggagaccaagctggcttcaataaaatgctctgcaaacgctgttcctaattctgtgctgcagacagttctagggagacagggactctgagtttgtggtgacttccttatgacaacacagggctctggctctaagaacttgagctccgtcccctggagaaaaacagcctgaagctggatctcccctagctgtcatcatgggcacaggggttctgctcgacgtcgctctgcgctctcatgttacccacatatttgtatcagccctaggcactgtcagctccatgcaa

SEQ ID NO: 5872 - DNA, 323 bp, Homo sapiens
  source 1..323: mol_type = unassigned DNA
cacttgatcaagacttttgggaaaatgaggactgatgtggtagatttcctaatggaaacattcatcatgtttaagaacctcattggaaagaacgtttaccccttcgactgggtgatcatgaacatggtgcaaaataaccaactgcatgacatcagttccatcacaactgcaggaggatggaggaaggctgctgtgcacgattacttgctgttttgtggtcaacctttcccataagacttcagagaaggtttttacttaatactgtacctgtcaaattcccagagctgcaagtaaattgaagatacaaattatgttgtaaagtg

SEQ ID NO: 5873 - DNA, 786 bp, Homo sapiens
  source 1..786: mol_type = unassigned DNA
gcgggcggcgcgggcacgggcacgggcgcgggcggcgcggcgaggaggcggcccgcggagtccagcgaagtttggcggaacatggcggaagcgtctggggcacgcaggagcgcggggcggcggcggccggagcccgaggagctgtagcagccttagtcgccgccgccgcggggcgaggtcgccgccatggcccgctggatcccgaccaagaggcagaagtacggggttgcgatctataactacaatgcttctcaagatgtggagctctccttgcagatcggtgacacagttcacatcctggagatgtacgagggttggtacagaggatataccctccaaaataaatctaaaaaggcaattggttccaggacccccacaataccgaaatccatggatgctcaagtctctgatataaaatggcatagtatttgcatataacctctgcatttcctcccgtgtactttaaatcatgtctagattatttataatacctaatacaatgtaaatgctatgtaagtagttattataccgtattgtttagggaataatgacaaggaaataaacctctgcttactttttttttctatatttttaatcatcagttggttgaacccatgatatggagggccttgtgtatataaaaatcagtctagctaatagtgccattgttgttggctttgaacagtagatagatagggttcccccaggatctaaatgataaattctggattttttttaaatttttttgtgttcattaaagagtgcttaaaacctttaagcttaaaa

SEQ ID NO: 5874 - DNA, 2166 bp, Homo sapiens
  source 1..2166: mol_type = unassigned DNA
ggcccgcggagtccagcgaagtttggcggaacatggcggaagcgtctggggcacgcaggagcgcggggcggcggcggccggagcccgaggagctgtagcagccttagtcgccgccgccgcggggcgaggtcgccgccatggcccgctggatcccgaccaagaggcagaagtacggggttgcgatctataactacaatgcttctcaagatgtggagctctccttgcagatcggtgacacagttcacatcctggagatgtacgagggttggtacagaggatataccctccaaaataaatctaaaaagggcattttccctgaaacatatatccatttgaaagaggcaactgtggaagacctggggcagcatgaaaccgtgattcctggcgagctccccctggtgcaggagctcacgtccactctgcgagaatgggctgtcatctggcgaaagctctacgtgaacaacaagctcaccctcttccgccagctgcagcagatgacgtacagcctgatcgagtggcggtcccagatcctgtctgggacgctccccaaggatgaactggcagagctcaagaagaaagtcacagccaaaattgatcatgggaacagaatgctggggttagatctggtggtgcgagatgacaatgggaacatcctagaccctgacgaaaccagcaccattgccctcttcaaggcccatgaggtggcctccaaaaggattgaggaaaagatccaagaagagaagtcaatcctgcagaacctcgatttgcggggccagtccatcttcagtaccatccacacctatggcctctatgtgaacttcaagaactttgtctgcaacatcggggaagatgcagagttgtttatggccctctacgacccagaccagtccacttttatcagtgagaactatctaattcgttggggcagtaacgggatgcccaaggaaatagagaagctcaataacctccaagcagtgtttacagaccttagcagcatggacctcatccggccccgcgtcagccttgtgtgccagattgtccgcgtgggccatatggagctgaaggaaggcaagaagcacacctgtggactccgaagaccttttggagtggcagtgatggatattactgatatcatacatgggaaggtggatgatgaagaaaagcagcattttattccctttcagcagtaagtactttggcatgtgtcccaggtgacttgagacctggattagccattcaattgtcttttaacacagaaacaggtgttagaaaccattttctcagagaaggaaagattctaagctgcaagattgtcagataggagctgaacagaagactttattcaaagtccttgatgttggactcccattgaagagggtaaactgaactttcctgattctatagaaagcatcaaaggaatataaaagggcacatatctgtctgctctggaatgcagagagggtgccgtccttgtgtcagcaatgccaaaatatatgtgcagtctattgcatgaaacaggcatcatggatgacacggaatcacgtgggctagcatagggcttctcagactgcatcatgcatatgaatcaggggaacttgttaggctgcaggggagttctgcctctgacaagctcccaggtgatgctgatgtagctggtctgagggccacactgtctgtagcgagggtttaggagatgagagagtgaagggctgacccacccatgggccagtgttcctgcatgttgggggaaagccagcctgggagcatgtgaaaggatccttgcagagctttactgaggccctccatattgagctgcaggagctggagccatgggtaggccattgaggagctgttgggagcagattcaagccgtgtcactctgaagaagtgcaggtgtgaacgtcatgacctgctccagcacctgcacaggcagtggaggcctagtggaggccaagagcattgccgggaccaagtcccaccaggggccatcgtgccagtcagagggcatcatctcagctcacttgcagctgccactgcagacaagtagaacaaactgagaattccacaaaccagccagagtcatatatttgagttaatatatcactttttacaaatgatatcacaaattagtggagaaagatacattatgcaaaaaaaaaaaaaaaa

SEQ ID NO: 5875 - DNA, 10075 bp, Homo sapiens
  source 1..10075: mol_type = unassigned DNA
tgtagcagccttagtcgccgccgccgcggggcgaggtcgccgccatggcccgctggatcccgaccaagaggcagaagtacggggttgcgatctataactacaatgcttctcaagatgtggagctctccttgcagatcggtgacacagttcacatcctggagatgtacgagggttggtacagaggatataccctccaaaataaatctaaaaagggcattttccctgaaacatatatccatttgaaagaggcaactgtggaagacctggggcagcatgaaaccgtgattcctggcgagctccccctggtgcaggagctcacgtccactctgcgagaatgggctgtcatctggcgaaagctctacgtgaacaacaagctcaccctcttccgccagctgcagcagatgacgtacagcctgatcgagtggcggtcccagatcctgtctgggacgctccccaaggatgaactggcagagctcaagaagaaagtcacagccaaaattgatcatgggaacagaatgctggggttagatctggtggtgcgagatgacaatgggaacatcctagaccctgacgaaaccagcaccattgccctcttcaaggcccatgaggtggcctccaaaaggattgaggaaaagatccaagaagagaagtcaatcctgcagaacctcgatttgcggggccagtccatcttcagtaccatccacacctatggcctctatgtgaacttcaagaactttgtctgcaacatcggggaagatgcagagttgtttatggccctctacgacccagaccagtccacttttatcagtgagaactatctaattcgttggggcagtaacgggatgcccaaggaaatagagaagctcaataacctccaagcagtgtttacagaccttagcagcatggacctcatccggccccgcgtcagccttgtgtgccagattgtccgcgtgggccatatggagctgaaggaaggcaagaagcacacctgtggactccgaagaccttttggagtggcagtgatggatattactgatatcatacatgggaaggtggatgatgaagaaaagcagcattttattccctttcagcaaattgcgatggaaacctacatccgccagaggcagctcatcatgtcgcctttgataacatcacacgtgattggggagaatgagccactcacttcagtcttgaataaagtgattgcagcaaaggaagtgaatcacaaagggcaaggcctttgggtatccttgaagctcttgcccggtgacctcacccaggttcagaagaatttttcacacttggttgatagatcaacagcaatagcccggaagatgggctttcctgaaatcatactgccaggagatgttcggaatgacatttatgtcaccctgatccacggtgagtttgacaaagggaagaagaagacgccaaagaatgtggaggtgacgatgtctgtgcacgatgaggagggcaagctcttggagaaagcaattcaccctggtgctggatatgaaggcatttcagaatacaaatcagtagtctattaccaagtcaagcagccctgttggtatgagactgtcaaggtatccattgctatagaagaagtcacacgctgtcatataagatttaccttccgacacaggtcatctcaggaaaccagagataaatcggagcgagcatttggggtggccttcgtgaagctgatgaacccggatggcaccactctgcaggatgggaggcacgatctggtggtttataagggtgacaacaaaaaaatggaagatgctaaattctacctgaccctgcctggaaccaagatggagatggaagaaaaagagcttcaagcatccaaaaacctggtcaccttcaccccaagcaaggatagcactaaagacagctttcagattgccaccctcatctgctccacaaagctcacccagaatgttgacctgttaggcttgttaaattggcgttccaactcccagaacattaaacacaacctaaagaagttaatggaagtggatggaggagagattgttaagtttttgcaagatacactagatgcactctttaacataatgatggaaatgtcagacagtgaaacctatgacttccttgtgtttgacgcactggtatttattatttcactgataggagacatcaagttccagcattttaatcctgtacttgaaacctacatttacaagcacttcagcgccactttggcatatgtgaaactctccaaggtactgaacttctatgtggctaatgcagatgactccagcaagactgaactgctttttgctgcgttgaaagccttgaagtacttgtttagattcatcatccaatcccgagtgctctacttgagattttatgggcagagcaaagatggagatgagtttaataattcaattcgccagttatttcttgctttcaatatgctgatggacaggcctctggaggaagccgtcaagatcaagggggcagctttgaagtaccttcctagcataattaatgatgtcaaacttgtatttgatcctgttgagctcagcgtgctcttctgcaaattcattcaaagcattcctgacaaccagctggttcggcagaaacttaactgcatgaccaagatagtagagagcactctttttcgacagtcagagtgcagagaagtgctgctgccactgctgacagaccagctcagcggccagttagatgacaactccaacaagcctgaccacgaggcaagctcgcagcttctgagcaacatcctggaggtgctggacaggaaggatgtgggtgccactgcggtgcacattcagcttataatggaacggctgctgagaaggatcaaccggacagtgattgggatgaaccggcagtctccccacatcgggagttttgtggcttgcatgattgccctgctgcagcaaatggacgacagccactatagccactacatcagcactttcaaaaccagacaagacatcatcgacttcctcatggaaacttttatcatgttcaaggacctgattggaaagaatgtctatgccaaagattggatggtgatgaatatgactcaaaacagggtttttctccgtgctataaatcagtttgctgaagttctcacaagattcttcatggatcaggcaagctttgaacttcagctctggaacaattacttccatttggcagttgcatttctcacccatgagtcccttcagcttgaaaccttctcacaagccaagcgcaacaaaattgttaaaaaatatggggacatgagaaaggaaatcggctttagaatccgggacatgtggtataacctgggtccccacaaaatcaaattcatcccatccatggtgggtcccattctggaggtcactctgacccctgaagtagagctccggaaagccacaatccccattttctttgatatgatgcagtgtgagttcaatttcagtggaaatggcaatttccatatgtttgagaatgagctgatcacaaagctggaccaggaggtagaagggggcagaggagacgaacaatacaaggttcttctggaaaaactgctcctagaacattgccggaaacacaaatacctctccagctctggggaggtcttcgccctcctggtcagcagcctcttagagaacctgctggactatagaaccatcatcatgcaagatgagagcaaggagaaccgtatgagctgcactgtgaacgtgctgaacttttataaagaaaagaagagagaggacatatacataagatatctgtacaagcttcgagatttgcaccgagactgtgagaactacacagaagctgcctacacgcttctcttgcacgctgagcttctgcagtggtctgacaagccctgtgtgcctcatttgcttcagaaggacagttactatgtttatacccagcaagagcttaaagagaagctgtatcaagaaatcatatcatatttcgacaaaggcaaaatgtgggagaaggccatcaagctgagcaaagagttggctgagacttacgaaagcaaagtatttgactacgagggccttggcaacctcctgaaaaaaagggcctcattttatgagaacatcattaaggcaatgaggcctcagcctgaatactttgctgttggatactatggacagggctttccttctttcctacggaataaaatcttcatctatcggggaaaggagtatgagaggcgagaggacttcagcctgaggttgttaacccagttccccaatgcggagaagatgaccagtaccacgcctcctggggaagacatcaagtcgtcccccaagcagtacatgcagtgcttcactgtaaagccagtgatgagcttgccgcccagctacaaggataaacctgttccagagcagatcttaaactactacagagccaatgaagtgcagcagttcagatactcccggccgttccggaaaggagaaaaggatccagacaatgaatttgctacgatgtggattgaacggaccacgtatacgactgcatatacctttcctgggattctcaagtggtttgaagtcaaacagatttcaacagaagagatcagtcctctggagaatgccatcgaaaccatggagctgaccaacgagaggatcagcaactgtgttcagcagcatgcctgggaccggtccctctctgtgcaccctctctccatgctgctcagtggcatcgtggacccggccgtcatggggggcttctccaactatgaaaaggctttttttacagaaaagtacttgcaggagcatcctgaagaccaggagaaggttgagctgctaaagcgactaatagcattacagatgcccctgctaacagaagggatccgcatccatggggagaaactcacagagcagctgaagccgctgcatgagcggttgtcttcttgcttccgggaactcaaggagaaagtagaaaagcactatggggttataacactgccacccaacttgacggagaggaagcaaagccgcacggggtctattgtgctcccctacatcatgtcttccactctgcggaggttgtccatcacctcagtcacttcctctgtggtttccacctcttcaaactcgtctgacaatgctccttccagaccgggatctgatggctcaatcttggagccacttttggagcgcagggcctcgtcaggtgccagagttgaagatctgtcccttagagaggagaacagcgagaaccggatcagcaagtttaagagaaaagactggagtctgagcaagtcccaggtcattgcagagaaagcaccagaacccgatttgatgagcccaaccagaaaagcacaaaggccaaagagtctccagttgatggataatcggctatcaccatttcacggttcttcacctcctcagtcaacacccttgagcccacctccactcactcccaaagccaccaggaccctaagctccccatcgttgcagacagatggaatcgcggccactcctgtcccacctccacctccccccaaaagcaagccctatgaaggcagccagaggaactccactgagctcgctcccccactgcctgtccgaagagaagccaaagcaccaccccctccacctccaaaggctcggaagtctggcatccctacttccgagcctggatcccagtaaggatcttgccctccctgcaacaccgagtgccttagacagctgctgcctgagaactggcctccagccggtgtcctcattccatggggctccctgctgactgcatttcctgatctgggatgatgtttaccagcccaaaaccagtcatgttcttccaaaagcttctctttgatagaattttgaggccatgccacctcccttccagtccacatggaattccagaatcagtcacagcctctgattttttccaagaagagattgccttcaccattgttaaatgtcagcctgtacggcagagacatggtggtctgcacaagcctggacaagttcttccatattgatggtggagcaacccctgtaatctactccttggaaggattttttgctttgcttatgaaaagctgtgcttgagacttaggtacttttctcacgtggacacactgatcccatcccatattgcatcttggaagagatggatatcaagtacactttggtagctgaaataatcatatctttctgatgtctattgtatctcctttgaggaaaagaacacacatttttaatggagattggctgctttcaggtatgtgtgtctatcattgaaagagcatggactcaaacatcagccctgagttcttgagtccacccaactcccatcttcttgtggcacaggaaagctgccctctccctctcccaccacactcctgactaatggccttcactgcgtcgcagtcactccttccctacggacttctttgaagctcttccttttgcacatacggctttttttttttttttttttttttgtcctattacctcctctgagcgcaaatcactggctacaagggacttaccagtctggattcagcagtttcttttctaaaacccatttgggtgactcagcagccgcatctgctacctgattttatcctggagaatacagtgcaatatttctctttgattatttattcctcttgattgtggaattaatttgattgcttgctaatggtactagtagtactcctttcagaagaaaaaatggagcgatttaggtgaccaaatattacatacataaatagccacatgaagttttagacgtttggacttgaagcctcaaagatcaaccaaccagtccccttatttagtaaataaggaaattgaggctacacacagaaaattgtgctacagattattactaataacccagcttgctaaattaggctatacctaggtaatctctagaagacaactctgacagactctttaatatttacccctggttggaacaatatttgaaatgtcccagatatttctatgctacttagatatttgtggcaaagcagaaagctttttgactgtgaaggcagaggtcagcactgggggaaacttgctggtggtctctcccacaaccttgcccagagtcctttccactaaggaggtgaagagaacagagaaagagatttccatttctgctgccagagctggtatttgcctgcctgattctctgtgtttcctgtttcaccgccaccctttcaggagagaactacaccagttcatcatgagggtcagggaagcaaaagctctcagatgtgtccagggcgttacttaagaaatgagtatgcagattctggaaggggtgtggaaaaggtgatcctttacccccacccaggaaaacctgcattgtgctagcatggaagaatcatgggctttggaattaaacccatttggtggaattaaacccatttggtttcaaatcccagttatgacatctgttaactttgcaaactcacaaaaattatttgaaattatctgagttttcattttctcaccttccagaatggggataatgcctcctgcatcggttgttgtgaggtttcaatgagatgaaatatgggaaagaagaggtactcacctgatggtccctgctttcctctgctaggcctgagtaggaactggaactctctaagagcattactcatactttttttttcttccaaggtagtttggaatgtgagtgcaagttagttctgcacatacagcccttctccaaatggtggtttcctttgaggtcttttacatgattatttatgactagagacaaacttaataagaactcaagaggattttaaatggagagaactcaagctgtagagaaaggaggaggcaacagacaggatatgtaggggcttacctagagcctggcacgacttctgagaagtcacccagcagaccggctagaggggatttgtgtgccacactctacttgccgggctgccattaaaatagaaagatataaaactgggtcaccaaaaaaaccaaacctcaaggctatccttccagagcagtagaaatgagtcccacagcctggtctttgagcagaggctgggaagataggatacatcactgtctggataccttctctttttaatagaatatattccgtatgattccctttccaccttaatggaaataatagctctctcctgcctgaacaaaagggattccaggtagtattgtggctaagagattacagcggacgatggaaggttcattttttagggaaggtgttgggtaggaagagtcacatttgacagaattcataaataatgtgtcctgaagtcagaggatgactgcaaagaaacacctcatgattccattaaatataaagagataaggagcaaggaggaaaaaagagaaagaattggtctttatttttcttgctaagaactctctggagtattgaaagacattgaaattatccctaaaattgtcacaacttttgtgaatactggtatacggttggaggtgtttttaaatctttatttcctctctttctttgttctagtgacttgtcttgctttaagattttttttaaaggattgttttattcaacatatatcaagttcttatggaatgccagtcatggtactagccccttgggatgtagtggttgagtgtgttcaatggaaacagccccagtatacaaagacagttcactctggtgtgctgtaggattggaaagggagtggtaccagatgaaaatgaaaccctaaagaagactgctgggccatgagttgcttcctcctcctccaccttaaccctctgattccagaattgcagtcattttcttctgccaaggaaatccattaaaaactgcagccacactgcaatttcctaatgtagaacaagatataaagcaggctttgagacaacaacctacctttgtttactctttccaagctggaagagtccttctcctctagttgcccctaggtcactggctaatttattttaaaatttagatggaactcatgtatagttaagtgcacaaatcttagccgtgcagatgggtaattttcacatagctatttgcccacatccgtgcctctaagatagagacatacactgttttcagcaccccagaaagttcccacatgcccatggtgccattttgtgaaaggtatttataaggcccttcaaatttgtggcttcctttctcatacttctcaggtataatgaaagggggagaaaaaccccaccatcaacacaaaacaaggctataaagactgtgcaccttttaacaagtcaatttgtagtcagtccctgggcctgtctttttttttttttaattttgaagctacctgaggtttagaattccttcagccctagctgcttttattctgctttttatttaaacaaaaagagggggaggatctgaaggaaactagttttctgtacaaaggctttgaggtccatggactatacttgtcccatttatcatcccaggtggtgctttgaccctgccataccctggctattaagataaaaagatttgtggacattaaaattatgaatatgtcagtaataatccagcacacattgaaatattgacacagattaccataatttgtgcaacatcttataaacaatgtcatttccatagtagtctaaggcttcaccagcctggcccactgtatctagactttaggttcattttaataattatgctttccttctctgtatcatttgggaagttgataaatatcacttccttagataccttcattcagtgatatatctggcttttacaattaaattggaaaaggtaagtttctctttggtgggttgagagttggaccatcaattctaatctacaaaaggaaattcatgatttcactctgacgcctaggatctagccaaggctggtctgcagtatcagatgtccaaactcatctactattagccatattttgtgagtcgtttgtctaaactttgtcaaaaatgcctttgccatgattttgttgctatctggatttcaaacatggacagttaggaagatgtgcattgaagtaggaaaattttgttcagatttgctgttatttattttttaaattaaaaatggaaatgtattttaaagttta

SEQ ID NO: 5876 - DNA, 594 bp, Homo sapiens
  source 1..594: mol_type = unassigned DNA
cattgccctcttcaaggcccatgaggtggcctccaaaaggattgaggaaaagatccaagaagagaagtcaatcctgcagaacctcgatttgcggggccagtccatcttcagtaccatccacacctatggcctctatgtgaacttcaagaactttgtctgcaacatcggggaagatgcagagttgtttatggccctctacgacccagaccagtccacttttatcaggtagcagagacccacatcccctgctgctgacctaacaaagatacccagccttcccctgacccctacccgggcagctctttgccagatttgagaagagaaaatagggaagcatggaagatttctaagcagtagaatgtaaaatcatatggtctatgaagccttcatatgtcactactagaacaatgaggccagtttgtatactctctgggatttagagatcacataaaactcattagggcttggagatgggaacaaagaattcaaaacagtgtgtgggagggtgagaaagggatgaataggcagagcacagaggatttttagagcaacggcagtattctgtatgatgctatagtggtggatgcatgtcat

SEQ ID NO: 5877 - DNA, 5335 bp, Homo sapiens
  source 1..5335: mol_type = unassigned DNA
agtcaatcctgcagaacctcgatttgcggggccagtccatcttcagtaccatccacacctatggcctctatgtgaacttcaagaactttgtctgcaacatcggggaagatgcagagttgtttatggccctctacgacccagaccagtccacttttatcaggaccttagcagcatggacctcatccggccccgcgtcagccttgtgtgccagattgtccgcgtgggccatatggagctgaaggaaggcaagaagcacacctgtggactccgaagaccttttggagtggcagtgatggatattactgatatcatacatgggaaggtggatgatgaagaaaagcagcattttattccctttcagcaaattgcgatggaaacctacatccgccagaggcagctcatcatgtcgcctttgataacatcacacgtgattggggagaatgagccactcacttcagtcttgaataaagtgattgcagcaaaggaagtgaatcacaaagggcaaggcctttgggtatccttgaagctcttgcccggtgacctcacccaggttcagaagaatttttcacacttggttgatagatcaacagcaatagcccggaagatgggctttcctgaaatcatactgccaggagatgttcggaatgacatttatgtcaccctgatccacggtgagtttgacaaagggaagaagaagacgccaaagaatgtggaggtgacgatgtctgtgcacgatgaggagggcaagctcttggagaaagcaattcaccctggtgctggatatgaaggcatttcagaatacaaatcagtagtctattaccaagtcaagcagccctgttggtatgagactgtcaaggtatccattgctatagaagaagtcacacgctgtcatataagatttaccttccgacacaggtcatctcaggaaaccagagataaatcggagcgagcatttggggtggccttcgtgaagctgatgaacccggatggcaccactctgcaggatgggaggcacgatctggtggtttataagggtgacaacaaaaaaatggaagatgctaaattctacctgaccctgcctggaaccaagatggagatggaagaaaaagagcttcaagcatccaaaaacctggtcaccttcaccccaagcaaggatagcactaaagacagctttcagattgccaccctcatctgctccacaaagctcacccagaatgttgacctgttaggcttgttaaattggcgttccaactcccagaacattaaacacaacctaaagaagttaatggaagtggatggaggagagattgttaagtttttgcaagatacactagatgcactctttaacataatgatggaaatgtcagacagtgaaacctatgacttccttgtgtttgacgcactggtatttattatttcactgataggagacatcaagttccagcattttaatcctgtacttgaaacctacatttacaagcacttcagcgccactttggcatatgtgaaactctccaaggtactgaacttctatgtggctaatgcagatgactccagcaagactgaactgctttttgctgcgttgaaagccttgaagtacttgtttagattcatcatccaatcccgagtgctctacttgagattttatgggcagagcaaagatggagatgagtttaataattcaattcgccagttatttcttgctttcaatatgctgatggacaggcctctggaggaagccgtcaagatcaagggggcagctttgaagtaccttcctagcataattaatgatgtcaaacttgtatttgatcctgttgagctcagcgtgctcttctgcaaattcattcaaagcattcctgacaaccagctggttcggcagaaacttaactgcatgaccaagatagtagagagcactctttttcgacagtcagagtgcagagaagtgctgctgccactgctgacagaccagctcagcggccagttagatgacaactccaacaagcctgaccacgaggcaagctcgcagcttctgagcaacatcctggaggtgctggacaggaaggatgtgggtgccactgcggtgcacattcagcttataatggaacggctgctgagaaggatcaaccggacagtgattgggatgaaccggcagtctccccacatcgggagttttgtggcttgcatgattgccctgctgcagcaaatggacgacagccactatagccactacatcagcactttcaaaaccagacaagacatcatcgacttcctcatggaaacttttatcatgttcaaggacctgattggaaagaatgtctatgccaaagattggatggtgatgaatatgactcaaaacagggtttttctccgtgctataaatcagtttgctgaagttctcacaagattcttcatggatcaggcaagctttgaacttcagctctggaacaattacttccatttggcagttgcatttctcacccatgagtcccttcagcttgaaaccttctcacaagccaagcgcaacaaaattgttaaaaaatatggggacatgagaaaggaaatcggctttagaatccgggacatgtggtataacctgggtccccacaaaatcaaattcatcccatccatggtgggtcccattctggaggtcactctgacccctgaagtagagctccggaaagccacaatccccattttctttgatatgatgcagtgtgagttcaatttcagtggaaatggcaatttccatatgtttgagaatgagctgatcacaaagctggaccaggaggtagaagggggcagaggagacgaacaatacaaggttcttctggaaaaactgctcctagaacattgccggaaacacaaatacctctccagctctggggaggtcttcgccctcctggtcagcagcctcttagagaacctgctggactatagaaccatcatcatgcaagatgagagcaaggagaaccgtatgagctgcactgtgaacgtgctgaacttttataaagaaaagaagagagaggacatatacataagatatctgtacaagcttcgagatttgcaccgagactgtgagaactacacagaagctgcctacacgcttctcttgcacgctgagcttctgcaggtgaatggctcagagagcttgtttcaacagggtggagtacagtgtcctttcagactaaattctatacatttcatgattttgatgggaaagaactttattccaggaatatccttttatacaagtttttttagttctttctaaataggcacagctaatttgtagatcaagtatgggaaaatgtcagttatcttttatttaaaaatccttagaaagcagagcacgacttatgaacctttggtaattgacactctaattaaagcaataaaacacacattgatgaatacataaaaaaatttgtaaaactgcagaaaactgcagaaagatgagttataagtgaatatagtaccatagaagtactctatttttattctctccctaaataaatgtatgttgtggtttagatataaatacatctatatgttatgaatcccaagtaattatttctagccctgagcaccttctctaactttggatttacatataaactttgattggccaatatgcagctcaaactgaacaaggcggtaacaggaacctttatttctcactctttgctcctccccagcccatcctacctcactttgttaccatgttactaataacattcccatccatttagttgctcaggcaacctcatagtcatcttcaatttctctcttttactcaccacctcccacattctccacaagcgagagatgtggcccctctgttcagaacatgcccctaacttatccgcttttctttttctttctttatttttttttttaaagagatgagatcttgctatgtttcccaggctggtctcaaactcctgggctcaagcaatcctcccacttcagcctcccagagtactaggattacaggcatgagccaccatgctagccaatccacttttctttatctccctgactaccaccttggtccatcccgtaagcatgtcacaccttgagcactacagcagcctcctgtttggtgtctctgcctccagttttgttctcagctattaatattcttttacagtttatattttatactaaagtaatatatgggcattgtccgaacatatgagttaaaaataggattcctatgcctcaccacttcccaaaggaaattcacaattcatatttaagtttagggcattaaaaagcttattgtataatggactgggcctggtggctcacgcctgtaatcccagctctttgggaagctgaggccagcagatcacttggggtcaggagttcaagaccagcctggctaacatggtgaaaccccatctctactaaaaatacaaaaaattagcaggcgtggtggcacctgcctgtagtcccagctactcaggaggctgaggcaggagaatcatttgaacctgcaaggcggaggtttgcagtatgctgagatggtgccaccatactccagcctgggtgatagagcaagactgtgtctcaaaagaaaaaaaaaaaaaaaaagcaacctactgtatatagcttagaaagtgaggcttgttgactgtggatttcgccattgtatgatcagaaagaaatccccagtgtctgtaactgtaggtcttttcatttgggaaactcaggaaggtaaactctcctatcctggtgtaagatatgaggtatgaatgcagctttttttccccccagattgctattcaatagagatgctgtttgttaagtatagttcacattttgcttattggtataagatcccatctttattactaaattcttattttggggggagggaatctctttctagattgtatatgcttttacgtgggtctctgtctgttcatgtaccagtaccatactgtattaattattaattcttgatagtgtgttttatgacctggtagttactcttgattgctcttctttttcagagttttcctacctattcctttttgttaatttttccatatggactttggaaagatgaaatttaaaaattaatttagtgagaatttacatgttaatgaaatagaattttcttatccaaaagcatggtatgactttccatttgttcgagtctgcttttgtgcccttcaatggcgtgtgaaagttttctgcatataagtcttgcatattccttgtaatgttcactcttagaaatgttctttttggacttatttttgtttggttccattcttctattctgtatatttagtctccgtgtatctgaaataaattttatttcaag

SEQ ID NO: 5878 - DNA, 288 bp, Homo sapiens
  source 1..288: mol_type = unassigned DNA
cctttctccccctcccaccttacctcttatttctctttcccaagaattgcgatggaaacctacatccgccagaggcagctcatcatgtcgcctttgataacatcacacgtgattggggagaatgagccactcacttcagtcttgaataaagtgattgcagcaaaggaagtgaatcacaaagggcaaggcctttgggtatccttgaagctcttgcccggtgacctcacccaggttcagaagaatttttcacacttggttgatagatcaacagcaatagcccggaagatg

SEQ ID NO: 5879 - DNA, 429 bp, Homo sapiens
  source 1..429: mol_type = unassigned DNA
acacttggttgatagatcaacagcaatagcccggaagatgggctttcctgaaatcatactgccaggagatgttcggaatgacatttatgtcaccctgatccacggtgagtttgacaaagggaagaagaagacgccaaagaatgtggaggtgacgatgtctgtgcacgatgaggagggcaagctcttggaggtgcgcggcatggcccagaaatcctgctaccatcgcatccgtctttacaatcacgatagaatcttggccgtattttaattcttctttgcatcaggatgggtttgatttttcctgagaaaagaaatataaagcctgttaaatttgtgattagcagtgagcagtttcactaaggaagctatctagactcttctagactcttatttttatatttctcctgtgctaagaaatagctccagcca

SEQ ID NO: 5880 - DNA, 4844 bp, Homo sapiens
  source 1..4844: mol_type = unassigned DNA
gatggaagaaaaagagcttcaagcatccaaaaacctggtcaccttcaccccaagcaaggatagcactaaagacagctttcagattgccaccctcatctgctccacaaagctcacccagaatgttgacctgttaggcttgttaaattggcgttccaactcccagaacattaaacacaacctaaagaagttaatggaagtggatggaggagagattgttaagtttttgcaagatacactagatgcactctttaacataatgatggaaatgtcagacagtgaaacctatgacttccttgtgtttgacgcactggtatttattatttcactgataggagacatcaagttccagcattttaatcctgtacttgaaacctacatttacaagcacttcagcgccactttggcatatgtatgactccagcaagactgaactgctttttgctgcgttgaaagccttgaagtacttgtttagattcatcatccaatcccgagtgctctacttgagattttatgggcagagcaaagatggagatgagtttaataattcaattcgccagttatttcttgctttcaatatgctgatggacaggcctctggaggaagccgtcaagatcaagggggcagctttgaagtaccttcctagcataattaatgatgtcaaacttgtatttgatcctgttgagctcagcgtgctcttctgcaaattcattcaaagcattcctgacaaccagctggttcggcagaaacttaactgcatgaccaagatagtagagagcactctttttcgacagtcagagtgcagagaagtgctgctgccactgctgacagaccagctcagcggccagttagatgacaactccaacaagcctgaccacgaggcaagctcgcagcttctgagcaacatcctggaggtgctggacaggaaggatgtgggtgccactgcggtgcacattcagcttataatggaacggctgctgagaaggatcaaccggacagtgattgggatgaaccggcagtctccccacatcgggagttttgtggcttgcatgattgccctgctgcagcaaatggacgacagccactatagccactacatcagcactttcaaaaccagacaagacatcatcgacttcctcatggaaacttttatcatgttcaaggacctgattggaaagaatgtctatgccaaagattggatggtgatgaatatgactcaaaacagggtttttctccgtgctataaatcagtttgctgaagttctcacaagattcttcatggatcaggcaagctttgaacttcagctctggaacaattacttccatttggcagttgcatttctcacccatgagtcccttcagcttgaaaccttctcacaagccaagcgcaacaaaattgttaaaaaatatggggacatgagaaaggaaatcggctttagaatccgggacatgtggtataacctgggtccccacaaaatcaaattcatcccatccatggtgggtcccattctggaggtcactctgacccctgaagtagagctccggaaagccacaatccccattttctttgatatgatgcagttttgagaatgagctgatcacaaagctggaccaggaggtagaagggggcagaggagacgaacaatacaaggttcttctggaaaaactgctcctagaacattgccggaaacacaaatacctctccagctctggggaggtcttcgccctcctggtcagcagcctcttagagaacctgctggactatagaaccatcatcatgcaagatgagagcaaggagaaccgtatgagctgcactgtgaacgtgctgaacttttataaagaaaagaagagagaggacatatacataagatatctgtacaagcttcgagatttgcaccgagactgtgagaactacacagaagctgcctacacgcttctcttgcacgctgagcttctgcagtggtctgacaagccctgtgtgcctcatttgcttcagaaggacagttactatgtttatacccagcaagagcttaaagagaagctgtatcaagaaatcatatcatatttcgacaaaggcaaaatgtgggagaaggccatcaagctgagcaaagagttggctgagacttacgaaagcaaagtatttgactacgagggccttggcaacctcctgaaaaaaagggcctcattttatgagaacatcattaaggcaatgaggcctcagcctgaatactttgctgttggatactatggacagggctttccttctttcctacggatgggtccagactgtttgcagactggccatggtccttgggccacactggaagaagaactgggctaagtattttttatgcctgtgatttaacttctccaataaaccgcagctcttgtaggatatgatggtcgctaataaaatcttcatctatcggggaaaggagtatgagaggcgagaggacttcagcctgaggttgttaacccagttccccaatgcggagaagatgaccagtaccacgcctcctggggaagacatcaagtcgtcccccaagcagtacatgcagtgcttcactgtaaagccagtgatgagcttgccgcccagctacaaggataaacctgttccagagcagatcttaaactactacagagccaatgaagtgcagcagttcagatactcccggccgttccggaaaggagaaaaggatccagacaatgaatttgctacgatgtggattgaacggaccacgtatacgactgcatatacctttcctgggattctcaagtggtttgaagtcaaacagatttcaacagaagagatcagtcctctggagaatgccatcgaaaccatggagctgaccaacgagaggatcagcaactgtgttcagcagcatgcctgggaccggtccctctctgtgcaccctctctccatgctgctcagtggcatcgtggacccggccgtcatggggggcttctccaactatgaaaaggctttttttacagaaaagtacttgcaggagcatcctgaagaccaggagaaggttgagctgctaaagcgactaatagcattacagatgcccctgctaacagaagggatccgcatccatggggagaaactcacagagcagctgaagccgctgcatgagcggttgtcttcttgcttccgggaactcaaggagaaagtagaaaagcactatggggttataacactgccacccaacttgacggagaggaagcaaagccgcacggggtctattgtgctcccctacatcatgtcttccactctgcggaggttgtccatcacctcagtcacttcctctgtggtttccacctcttcaaactcgtctgacaatgctccttccagaccgggatctgatggctcaatcttggagccacttttggagcgcagggcctcgtcaggtgccagagttgaagatctgtcccttagagaggagaacagcgagaaccggatcagcaagtttaagagaaaagactggagtctgagcaagtcccaggtcattgcagagaaagcaccagaacccgatttgatgagcccaaccagaaaagcacaaaggccaaagagtctccagttgatggataatcggctatcaccatttcacggttcttcacctcctcagtcaacacccttgagcccacctccactcactcccaaagccaccaggaccctaagctccccatcgttgcagacagatggaatcgcggccactcctgtcccacctccacctccccccaaaagcaagccctatgaaggcagccagaggaactccactgagctcgctcccccactgcctgtccgaagagaagccaaagcaccaccccctccacctccaaaggctcggaagtctggcatccctacttccgagcctggatcccagtaaggatcttgccctccctgcaacaccgagtgccttagacagctgctgcctgagaactggcctccagccggtgtcctcattccatggggctccctgctgactgcatttcctgatctgggatgatgtttaccagcccaaaaccagtcatgttcttccaaaagcttctctttgatagaattttgaggccatgccacctcccttccagtccacatggaattccagaatcagtcacagcctctgattttttccaagaagagattgccttcaccattgttaaatgtcagcctgtacggcagagacatggtggtctgcacaagcctggacaagttcttccatattgatggtggagcaacccctgtaatctactccttggaaggattttttgctttgcttatgaaaagctgtgcttgagacttaggtacttttctcacgtggacacactgatcccatcccatattgcatcttggaagagatggatatcaagtacactttggtagctgaaataatcatatctttctgatgtctattgtatctcctttgaggaaaagaacacacatttttaatggagattggctgctttcaggtatgtgtgtctatcattgaaagagcatggactcaaacatcagccctgagttcttgagtccacccaactcccatcttcttgtggcacaggaaagctgccctctccctctcccaccacactcctgactaatggccttcactgcgtcgcagtcactccttccctacggacttctttgaagctcttccttttgcacatacggctttttttttttttttttttttttgtcctattacctcctctgagcgcaaatcactggctacaagggacttaccagtctggattcagcagtttcttttctaaaacccatttgggtgactcagcagccgcatctgctacctgattttatcctggagaatacagtgcaatatttctctttga

SEQ ID NO: 5881 - DNA, 780 bp, Homo sapiens
  source 1..780: mol_type = unassigned DNA
cagaatacgtcatgctaatgggggtcccccaaaactatttgttgagtcagtggccacagtgagctctcagtgaacctgagcaatctgagttattaagaaggcactcatccctgcacagccacattcatcttttaagtgttatgactgatcattttcaactattttcttcataaagttatatattattctgtgagaccattttccacttttggacaagagattgctttgtagggaaaagccaaaaagagatctaaagacaaaactcatctatctgaggttccttaaagaaagtgaaactgagtcagaaggaatggagtcaaatcctgtgttccctgcagggtgccactgcggtgcacattcagcttataatggaacggctgctgagaaggatcaaccggacagtgattgggatgaaccggcagtctccccacatcgggagttttgtggcttgcatgattgccctgctgcagcaaatggacgacagccactatagccactacatcagcactttcaaaaccagacaagacatcatcgacttcctcatggaaacttttatcatgttcaaggacctgattggaaagaatgtctatgccaaagattggatggtgatgaatatgactcaaaacagggtttttctccgtgctataaatcagtttgctgaagttctcacaagattcttcatggatcaggcaagctttgaacttcaggtaggcatgtgactcacctacctgcttctagaattcttggccatggcaagagaactatatgaatttggaaaat

SEQ ID NO: 5882 - DNA, 459 bp, Homo sapiens
  source 1..459: mol_type = unassigned DNA
tctccagctactacagagccaatgaagtgcagcagttcagatactcccggccgttccggaaaggagaaaaggatccagacaatgaatttgctacgatgtggattgaacggaccacgtatacgactgcatatacctttcctgggattctcaagtggtttgaagtcaaacagatttcaacagaagagatcagtcctctggagaatgccatcgaaaccatggagctgaccaacgagaggatcagcaactgtgttcagcagcatgcctgggaccggtccctctctgtgcaccctctctccatgctgctcagtggcatcgtggacccggccgtcatggggggcttctccaactatgaaaaggttcgcttggtcccagaatcccctagggattcacagacctgggtgtctgtgtgcctccctctgtgccatttgccactgacaaattcatttcctacagctgctc

SEQ ID NO: 5883 - DNA, 1836 bp, Homo sapiens
  source 1..1836: mol_type = unassigned DNA
cagttacagtttcctggaggaagtggatattttcctaagcacttgggctatatcagagaacagaataataccatacattccagaaaatgttgtcatcttcagcttaatactaaaaccctgaacaaaaaaagttttggccaggcacggtagctcacgcctgtaatcccagcactttgggaggccgaggcaggtgaatcacgaggtcaggagatcgagatcatcctggctacagtgaaaccccatctgtactaaaaaatacaaaaaattagctgggcgtgatggtgggtgcctgtagtcccagctacctgggaggctgaggcaggagaatggcgtgaacccgggaggcggagcttgcagtgagctgagatcgcgccactgcactccagcctgggcaacagagcgagactccatctcaaaaaaacaaaaataaaaaaaataaagtttttgcttcagaacaccttgtggagctcttgaaacttctggcgagggcgtcacctgtgtgatgtggggtaagaagtcttcttcgttctatccgcagaaaccatagaatgtggctttcatcagttggttgaccaggttggcttaggtgttacagtgccagcaacatttccatgagcttccttgctcagtgcctctctctgccgcctgcactttctgtcatttctaggctccccatcgttgcagacagatggaatcgcggccactcctgtcccacctccacctccccccaaaagcaagccctatgaaggcagccagaggaactccactgagctcgctcccccactgcctgtccgaagagaagccaaagcaccaccccctccacctccaaaggctcggaagtctggcatccctacttccgagcctggatcccagtaaggatcttgccctccctgcaacaccgagtgccttagacagctgctgcctgagaactggcctccagccggtgtcctcattccatggggctccctgctgactgcatttcctgatctgggatgatgtttaccagcccaaaaccagtcatgttcttccaaaagcttctctttgatagaattttgaggccatgccacctcccttccagtccacatggaattccagaatcagtcacagcctctgattttttccaagaagagattgccttcaccattgttaaatgtcagcctgtacggcagagacatggtggtctgcacaagcctggacaagttcttccatattgatggtggagcaacccctgtaatctactccttggaaggattttttgctttgcttatgaaaagctgtgcttgagacttaggtacttttctcacgtggacacactgatcccatcccatattgcatcttggaagagatggatatcaagtacactttggtagctgaaataatcatatctttctgatgtctattgtatctcctttgaggaaaagaacacacatttttaatggagattggctgctttcaggtatgtgtgtctatcattgaaagagcatggactcaaacatcagccctgagttcttgagtccacccaactcccatcttcttgtggcacaggaaagctgccctctccctctcccaccacactcctgactaatggccttcactgcgtcgcagtcactccttccctacggacttctttgaagctcttccttttgcacatacggctttttttttttttttttttttttgtcctattacctcctctgagcgcaaatcactggctacaagggacttaccagtctggattcagcagtttcttttctaaaacccatttgggtgactcagcagccgcatctgctacctgattttatcctggagaatacagtgcaatatttctctttgatt

SEQ ID NO: 5884 - DNA, 1042 bp, Homo sapiens
  source 1..1042: mol_type = unassigned DNA
tggttgaccaggttggcttaggtgttacagtgccagcaacatttccatgagcttccttgctcagtgcctctctctgccgcctgcactttctgtcatttctaggctccccatcgttgcagacagatggaatcgcggccactcctgtcccacctccacctccccccaaaagcaagccctatgaaggcagccagaggaactccactgagctcgctcccccactgcctgtccgaagagaagccaaagcaccaccccctccacctccaaaggctcggaagtctggcatccctacttccgagcctggatcccagtaaggatcttgccctccctgcaacaccgagtgccttagacagctgctgcctgagaactggcctccagccggtgtcctcattccatggggctccctgctgactgcatttcctgatctgggatgatgtttaccagcccaaaaccagtcatgttcttccaaaagcttctctttgatagaattttgaggccatgccacctcccttccagtccacatggaattccagaatcagtcacagcctctgattttttccaagaagagattgccttcaccattgttaaatgtcagcctgtacggcagagacatggtggtctgcacaagcctggacaagttcttccatattgatggtggagcaacccctgtaatctactccttggaaggattttttgctttgcttatgaaaagctgtgcttgagacttaggtacttttctcacgtggacacactgatcccatcccatattgcatcttggaagagatggatatcaagtacactttggtagctgaaataatcatatctttctgatgtctattgtatctcctttgaggaaaagaacacacatttttaatggagattggctgctttcaggttgtggatcacatcattgcctaattttattaaagacggagtgaagacattatttgattccactttagagactcttccaatggaggtatttgggaaacctgtcattgtgcagtagcaaatatttgtattaaaaagaggcggttttccccca

SEQ ID NO: 5885 - DNA, 1249 bp, Homo sapiens
  source 1..1249: mol_type = unassigned DNA
atgtctgccccatcctccccggatcggccttgccccagcgcgtgttcgggacgtatttccgcgtgggcttctacggcgcccacttcggtgacctggatgagcaggagtttgtgtacaaggagccatcgatcacgaagctggcagagatctcacaccggctggaggcacgtccttgtggttgggggtggaacggggcatggggctgccttggggctggagtaggggctgtccctgggtggccccgagtcagccctgtgtctccaggagttctacacggagagatttggcgacgacgtcgttgagattatcaaagactctaaccctgtggacaagtccaagcttgactcacaaaaggcctacatccagatcacgtatgtggaaccgtactttgatacctacgagctcaaggaccgggtgacctactttgaccgcaactatgggcttcgcacattcctgttctgcacgccgttcacgccggatgggcgcgcacacggggagctgcccgagcaacacaagcgtaagacgctgctcagcaccgaccacgccttcccctacatcaagactcgcatccgtgtgtgccaccgggaggagacggtgctgacgccagtggaggtggccatcgaggacatgcagaagaagacacgggagctggcctttgccaccgagcaggacccaccagatgctaagatgctacagatggtgcttcagggctctgtagggcccaccgtgaaccagggtcccctggaggtggcccaggtgtttttagcagagatcccggaagaccccaagctcttccggcatcacaacaaattgcggctctgcttcaaggacttctgcaagaaatgtgaggatgcgctgcggaaaaataaggccctgattgggccggaccagaaggagtaccaccgtgagctggagcgcaactactgccgcctgcgggaggctctgcagcccctgcttacccagcgcctgccccagctgatggcacccaccccacccggcctcaggaactccttgaacagagcaagtttccgaaaggcagacctctgagcccacaaggaccaaagctgtacctagaggaaccagcacccgggcctcagctgtctgtgctgcgaggggagtctgccctggtgcccactgggctgtggggtgaccacactgtacttggggctgggccctctgcccctgtgtccccatctgtgtgcactgatgcttcctcccttttttaatttaaaatggtttttataagcaa

SEQ ID NO: 5886 - DNA, 6358 bp, Homo sapiens
  source 1..6358: mol_type = unassigned DNA
gacgcgaggaccatggctgcctccgagcgccgcgccttcgcgcacaagatcaacaggacggtggccgcagaggtgcggaagcaggtgtcccgggaacgcagtggctccccccactccagcaggcgctgcagcagctccctgggggtcccactgactgaagttgtcgagcccctggactttgaggatgtacttctgagccggccaccagatgctgagcccgggcccctcagggacctggtagaattcccagctgatgacttggagctgctgctgcagccccgggaatgccggaccacggagcccgggatccccaaggatgaaaaactggatgcccaggtgagggccgcggtggagatgtatattgaggactgggtcattgtccacagaaggtatcagtacctgagtgcagcatacagccccgtcaccacagacacacagcgggagcgacagaagggcctcccccgccaggtctttgagcaggatgcttctggagacgagaggtccggccctgaggactcgaatgactcccggcgtggctcgggctccccggaagacacccctcgaagcagtggtgcctctagcatcttcgacctgaggaacctggcagctgactcattgctgccctctctgctagagcgggcggccccagaagatgtggaccggcgcaatgaaacccttcgacggcagcaccggcccccggccctgctcaccctctacccggcacctgacgaggatgaagccgtggaacgctgtagccgcccagagccaccccgcgagcactttggacaaaggatcttggtcaagtgtctgtcgctcaagttcgagattgaaattgagcccatctttgggatcttggctctgtatgatgtgcgggagaaaaagaagatctcggagaacttctacttcgacctgaactcggactccatgaaggggctgcttcgggctcatggcacccaccctgccatctccaccctggcccgctctgccatcttctctgtgacctacccctcacctgacatcttcctggtcatcaagttggagaaggtgcttcagcaaggggacatcagtgagtgctgtgagccttacatggtgttgaaagaagtggacacagccaagaacaaagagaagctagagaagctgcgcctggcggccgagcagttctgcacccgcctgggccgctaccgcatgcccttcgcctggacggccgtgcacttggccaacatcgtgagcagcgctgggcagctggaccgggactctgactcggagggcgagcgccggccagcctggacagaccgccgccgtcgggggccccaggaccgggcgagtagtggggacgacgcctgcagcttctctggcttccgtccagccacgctaactgtcacaaacttctttaagcaggaggctgagcgactcagtgacgaggacctcttcaagttcctggctgacatgaggcgcccgtcgtccctgctgcggcgactacgtcctgtgactgcccagctcaagatcgacatttctccggctcctgaaaatccccacttctgcctctcccctgagctgcttcatatcaagccctacccggaccccaggggccggcccaccaaggagattctggagttccccgcccgcgaagtctatgccccccataccagctacaggaacctgctgtacgtgtacccgcacagcctcaacttcagcagccgccagggctccgtgcgcaaccttgctgtgcgagtgcagtacatgacaggcgaggaccccagccaggctctgccggtcatctttggcaagtccagctgcagtgaatttacccgcgaggccttcacaccggtggtctaccataacaagtcccccgagttctacgaggagttcaagctgcatcttccagcctgcgtgacagagaaccatcacctgctgttcaccttctaccatgtcagctgccagccccggccgggcactgccctggagacacccgtgggctttacttggatcccactgctgcagcacgggcgcctgaggaccggccccttctgtctcccagtgtctgtggaccagccgccgcccagctattccgtgctcacacccgatgtggcgcttccgggcatgcgctgggtggacggtcacaagggcgtgttcagtgtggagctcacagccgtgtcctctgtgcacccccaggacccctacctggacaaattcttcaccctggtgcacgtcctggaggagggagccttcccattccggctcaaggacactgtgctgagcgagggcaacgtggagcaggagctgcgggccagtcttgcagcactgcgcctggccagccccgaaccccttgtggccttctcccaccacgtgctggacaagctcgtgcgtctggtcatcaggcccccgatcatcagtggccagattgtgaacctgggccgtggagcctttgaagcaatggcccatgtagtcagccttgttcaccggagcctggaggcagcccaggatgcccgcggtcactgcccacagctggctgcctacgtccactacgcctttcgccttcctggcactgagcccagcctcccggatggggcccctccagtgacagtgcaggctgccacactggcccgtggctctggtcgccccgcaagcctctacctggcgcgttccaagagcatcagcagcagcaaccctgacctcgccgtggcccctggctctgtggatgacgaggtttcccgcatcctggccagcaagctgcttcacgaggagctggctctgcagtgggtggtcagcagcagtgccgtacgcgaggccatcctccagcacgcctggttcttcttccagctcatggtgaagagtatggcgctgcacctgctgcttggccagcgactagacacaccccgcaagctgcgcttccccggacgcttcctggacgacatcactgccttggtgggctctgtgggcctggaggtcatcacccgtgtccacaaggatgtggagctggccgagcacctcaacgccagcctggctttcttcctcagtgaccttctgtccctggtggaccggggctttgtcttcagcctggtccgggcccactacaagcaggtggccacgcggctccagtcgtcccctaatccagcagccctgctgaccctgcgcatggaattcacccgcatcctgtgcagccacgagcactacgtgaccctcaacctcccctgctgccccctgtcacctccagcctcgccctccccctctgtgtcctccaccacctcccagagctccaccttctccagccaagccccggaccccaaggtgaccagcatgttcgaactgagtggaccattccggcagcagcacttcctagctgggctcctgctgacggagctggcactggccctcgaacctgaggctgaaggggcattcctgttgcacaagaaggccatcagtgctgtgcacagcctgctatgtggccatgacactgacccccgctacgccgaggccactgtgaaggctcgtgtggccgagctgtacctgccactgctatcgattgcacgggataccttgccacggctgcatgactttgctgagggcccaggtcagcggtcaagactggcctcaatgcttgactcagacacagaaggcgaaggggacattgcgggtaccatcaacccctctgtggccatggccattgctggtggccccctagcccctggctcccgggccagcatctcccaggggccaccaacggcttctcgcgcaggctgtgccctctctgctgagtcaagccggaccttgctggcgtgtgtgctgtgggtgctgaaaaacaccgagccggcgctcctgcagcgctgggccactgacctgacactcccccagctgggacgtctgttggatttgctgtacctttgcctagctgcctttgagtacaaggggaaaaaggcctttgaacgcatcaacagcctcacattcaaaaaatctctggatatgaaggcgcggctagaggaagccattctgggtaccatcggagctcgacaagaaatggttcggcgaagtcgtgagaggagcccgtttgggaatccggagaatgtgcgctggcggaagagcgtcacacactggaagcaaacctcagaccgcgtggacaagaccaaggatgaaatggaacacgaggccttggtggaagggaacctggcaaccgaggcaagcctagtggttctggacacactggagatcatcgtgcagacggtgatgctttcagaagcccgggagagcgtcttgggggcagtgctgaaggttgtgctgtacagcctgggcagtgcccagagtgccctcttcttgcagcatggcctggccacccagagggcccttgtgtccaagttcccggagctgctgttcgaggaggacacggagctgtgtgccgacctgtgcctgaggctcctacgacactgtggcagccgcatcagcaccatccgcacgcacgccagcgcctcgctgtacctgctcatgcgacagaacttcgagatcggccacaactttgcccgtgtgaagatgcaggtcaccatgtctctctcgtccctggtggggacgacgcagaacttcagtgaagagcacctgcgacgttcactcaaaaccatcctcacctatgctgaggaggacatggggctgcgggacagcaccttcgcagagcaggtccaggacctgatgttcaacctgcacatgatcctgacggacacggtgaagatgaaggaacaccaggaggaccctgagatgctcatcgacctcatgtacagaattgcccggggctaccagggctcaccggaccttcggctgacctggttgcagaacatggccgggaagcacgcggagctgggcaaccacgccgaggccgcccagtgcatggtgcacgcggccgccctcgtggctgagtacctcgccctgctcgaggaccaccgccacctgcccgtgggctgcgtttccttccagaacatctcatccaacgtgctagaggagtccgccatctccgacgacatcctgtcgcccgacgaggagggcttctgctccgggaagcacttcactgagctggggctggtagggttgctggaacaggcagccggctacttcaccatgggcgggctctacgaggcggtgaatgaggtctacaagaacctcatccccatcctggaagcccaccgtgactacaagaagctggccgcggtgcacggcaaactgcaggaggccttcaccaagatcatgcaccagagttccggctgggagcgcgtgttcgggacgtatttccgcgtgggcttctacggcgcccacttcggtgacctggatgagcaggagtttgtgtacaaggagccatcgatcacgaagctggcagagatctcacaccggctggaggagttctacacggagagatttggcgacgacgtcgttgagattatcaaagactctaaccctgtggacaagtccaagcttgactcacaaaaggcctacatccagatcacgtatgtggaaccgtactttgatacctacgagctcaaggaccgggtgacctactttgaccgcaactatgggcttcgcacattcctgttctgcacgccgttcacgccggatgggcgcgcacacggggagctgcccgagcaacacaagcgtaagacgctgctcagcaccgaccacgccttcccctacatcaagactcgcatccgtgtgtgccaccgggaggagacggtgctgacgccagtggaggtggccatcgaggacatgcagaagaagacacgggagctggcctttgccaccgagcaggacccaccagatgctaagatgctacagatggtgcttcagggctctgtagggcccaccgtgaaccagggtcccctggaggtggcccaggtgtttttagcagagatcccggaagaccccaagctcttccggcatcacaacaaattgcggctctgcttcaaggacttctgcaagaaatgtgaggatgcgctgcggaaaaataaggccctgattgggccggaccagaaggagtaccaccgtgagctggagcgcaactactgccgcctgcgggaggctctgcagcccctgcttacccagcgcctgccccagctgatggcacccaccccacccggcctcaggaactccttgaacagagcaagtttccgaaaggcagacctctgagcccacaaggaccaaagctgtacctagaggaaccagcacccgggcctcagctgtctgtgctgcgaggggagtctgccctggtgcccactgggctgtggggtgaccacactgtacttggggctgggccctctgcccctgtgtccccatctgtgtgcactgatgcttcctcccttttttaatttaaaatggtttttataagcaa

SEQ ID NO: 5887 - DNA, 312 bp, Homo sapiens
  source 1..312: mol_type = unassigned DNA
cgtaagacgctgctcagcaccgaccacgccttcccctacatcaagactcgcatccgtgtgtgccaccgggaggaggaactccttgaacagagcaagtttccgaaaggcagacctctgagcccacaaggaccaaagctgtacctagaggaaccagcacccgggcctcagctgtctgtgctgcgaggggagtctgccctggtgcccactgggctgtggggtgaccacactgtacttggggctgggccctctgcccctgtgtccccatctgtgtgcactgatgcttcctcccttttttaatttaaaatggttttt

SEQ ID NO: 5888 - DNA, 4009 bp, Homo sapiens
  source 1..4009: mol_type = unassigned DNA
gctgagcgagggcaacgtggagcaggagctgcgggccagtcttgcagcactgcgcctggccagccccgaaccccttgtggccttctcccaccacgtgctggacaagctcgtgcgtctggtcatcaggcccccgatcatcagtggccagattgtgaacctgggccgtggagcctttgaagcaatggcccatgtagtcagccttgttcaccggagcctggaggcagcccaggatgcccgcggtcactgcccacagctggctgcctacgtccactacgcctttcgccttcctggcactgagcccagcctcccggatggggcccctccagtgacagtgcaggctgccacactggcccgtggctctggtcgccccgcaagcctctacctggcgcgttccaagagcatcagcagcagcaaccctgacctcgccgtggcccctggctctgtggatgacgaggtttcccgcatcctggccagcaagggcatcgatcgctcacactcctgggtgaattccgcttatgctccaggaggcagtaaggctgtgctgcggcgggcgcccccttattgtggggccgaccccagacagctgcttcacgaggagctggctctgcagtgggtggtcagcagcagtgccgtacgcgaggccatcctccagcacgcctggttcttcttccagctcatggtgaagagtatggcgctgcacctgctgcttggccagcgactagacacaccccgcaagctgcgcttccccggacgcttcctggacgacatcactgccttggtgggctctgtgggcctggaggtcatcacccgtgtccacaaggatgtggagctggccgagcacctcaacgccagcctggctttcttcctcagtgaccttctgtccctggtggaccggggctttgtcttcagcctggtccgggcccactacaagcaggtggccacgcggctccagtcgtcccctaatccagcagccctgctgaccctgcgcatggaattcacccgcatcctgtgcagccacgagcactacgtgaccctcaacctcccctgctgccccctgtcacctccagcctcgccctccccctctgtgtcctccaccacctcccagagctccaccttctccagccaagccccggaccccaaggtgaccagcatgttcgaactgagtggaccattccggcagcagcacttcctagctgggctcctgctgacggagctggcactggccctcgaacctgaggctgaaggggcattcctgttgcacaagaaggccatcagtgctgtgcacagcctgctatgtggccatgacactgacccccgctacgccgaggccactgtgaaggctcgtgtggccgagctgtacctgccactgctatcgattgcacgggataccttgccacggctgcatgactttgctgagggcccaggtcagcggtcaagactggcctcaatgcttgactcagacacagaaggcgaaggggacattgcgggtaccatcaacccctctgtggccatggccattgctggtggccccctagcccctggctcccgggccagcatctcccaggggccaccaacggcttctcgcgcaggctgtgccctctctgctgagtcaagccggaccttgctggcgtgtgtgctgtgggtgctgaaaaacaccgagccggcgctcctgcagcgctgggccactgacctgacactcccccagctgggacgtctgttggatttgctgtacctttgcctagctgcctttgagtacaaggggaaaaaggcctttgaacgcatcaacagcctcacattcaaaaaatctctggatatgaaggcgcggctagaggaagccattctgggtaccatcggagctcgacaagaaatggttcggcgaagtcgtgagaggagcccgtttgggaatccggagaatgtgcgctggcggaagagcgtcacacactggaagcaaacctcagaccgcgtggacaagaccaaggatgaaatggaacacgaggccttggtggaagggaacctggcaaccgaggcaagcctagtggttctggacacactggagatcatcgtgcagacggtgatgctttcagaagcccgggagagcgtcttgggggcagtgctgaaggttgtgctgtacagcctgggcagtgcccagagtgccctcttcttgcagcatggcctggccacccagagggcccttgtgtccaagttcccggagctgctgttcgaggaggacacggagctgtgtgccgacctgtgcctgaggctcctacgacactgtggcagccgcatcagcaccatccgcacgcacgccagcgcctcgctgtacctgctcatgcgacagaacttcgagatcggccacaactttgcccgtgtgaagatgcaggtcaccatgtctctctcgtccctggtggggacgacgcagaacttcagtgaagagcacctgcgacgttcactcaaaaccatcctcacctatgctgaggaggacatggggctgcgggacagcaccttcgcagagcaggtccaggacctgatgttcaacctgcacatgatcctgacggacacggtgaagatgaaggaacaccaggaggaccctgagatgctcatcgacctcatgtacagaattgcccggggctaccagggctcaccggaccttcggctgacctggttgcagaacatggccgggaagcacgcggagctgggcaaccacgccgaggccgcccagtgcatggtgcacgcggccgccctcgtggctgagtacctcgccctgctcgaggaccaccgccacctgcccgtgggctgcgtttccttccagaacatctcatccaacgtgctagaggagtccgccatctccgacgacatcctgtcgcccgacgaggagggcttctgctccgggaagcacttcactgagctggggctggtagggttgctggaacaggcagccggctacttcaccatgggcgggctctacgaggcggtgaatgaggtctacaagaacctcatccccatcctggaagcccaccgtgactacaagaagctggccgcggtgcacggcaaactgcaggaggccttcaccaagatcatgcaccagagttccggctgggagcgcgtgttcgggacgtatttccgcgtgggcttctacggcgcccacttcggtgacctggatgagcaggagtttgtgtacaaggagccatcgatcacgaagctggcagagatctcacaccggctggaggagttctacacggagagatttggcgacgacgtcgttgagattatcaaagactctaaccctgtggacaagtccaagcttgactcacaaaaggcctacatccagatcacgtatgtggaaccgtactttgatacctacgagctcaaggaccgggtgacctactttgaccgcaactatgggcttcgcacattcctgttctgcacgccgttcacgccggatgggcgcgcacacggggagctgcccgagcaacacaagcgtaagacgctgctcagcaccgaccacgccttcccctacatcaagactcgcatccgtgtgtgccaccgggaggagacggtgctgacgccagtggaggtggccatcgaggacatgcagaagaagacacgggagctggcctttgccaccgagcaggacccaccagatgctaagatgctacagatggtgcttcagggctctgtagggcccaccgtgaaccagggtcccctggaggtggcccaggtgtttttagcagagatcccggaagaccccaagctcttccggcatcacaacaaattgcggctctgcttcaaggacttctgcaagaaatgtgaggatgcgctgcggaaaaataaggccctgattgggccggaccagaaggagtaccaccgtgagctggagcgcaactactgccgcctgcgggaggctctgcagcccctgcttacccagcgcctgccccagctgatggcacccaccccacccggcctcaggaactccttgaacagagcaagtttccgaaaggcagacctctga

SEQ ID NO: 5889 - DNA, 444 bp, Homo sapiens
  source 1..444: mol_type = unassigned DNA
ccgccacctgcccgtgggctgcgtttccttccagaacatctcatccaacgtgctagaggagtccgccatctccgacgacatcctgtcgcccgacgaggagggcttctgctccgggaagcacttcactgagctggggctggtagggttgctggaacaggcagccggctacttcaccatgccccagcgcgtgttcgggacgtatttccgcgtgggcttctacggcgcccacttcggtgacctggatgagcaggagtttgtgtacaaggagccatcgatcacgaagctggcagagatctcacaccggctggaggagttctacacggagagatttggcgacgacgtcgttgagattatcaaagactctaaccctgtggacaagtccaagcttgactcacaaaaggcctacatccagatcacgtatgtggaaccgtactttgataccta

SEQ ID NO: 5890 - DNA, 280 bp, Homo sapiens
  source 1..280: mol_type = unassigned DNA
ctgctccgggaagcacttcactgagctggggctggtagggttgctggaacaggcagccggctacttcaccatgagatgggatcttgctatgttgcccaggctgggcttgaactcctagactcatgcaaccctctcgcctcggccttccaaagtgctgggattacaggcgtgagccagcatgcccggcaactgattttccactgtggaaaaggggttttcttctctagtttgcttgtttgtatgagggcagttggtggtttctacatttaacttgcaggag

SEQ ID NO: 5891 - DNA, 566 bp, Homo sapiens
  source 1..566: mol_type = unassigned DNA
atggccattgctggtggccccctagcccctggctcccgggccagcatctcccaggggccaccaacggcttctcgcgcaggctgtgccctctctgctgagtcaagccggaccttgctggcgtgtgtgctgtgggtgctgaaaaacaccgagccggcgctcctgcagcgctgggccactgacctgacactcccccagctgggacgtctgttggatttgctgtacctttgcctagctgcctttgagtacaaggggaaaaaggcctttgaacgcatcaacagcctcacattcaaaaaatctctggatatgaaggcgcggctagaggaagccattctgggtaccatcggagctcgacaagaaatggttcggcgaagtcgtggtaagagggtgacatacccacgtgtccccatcccaccagctgctcccaccttgtgtcaaggggaccccatgaagggggccatccctagcttactttctgcctcacttttcctggagagaagtccacaaatcatcaccgtacacatgcgcctgtgcgtccccatctgtcactcgtgtttgcccctgtgcgt

SEQ ID NO: 5892 - DNA, 459 bp, Homo sapiens
  source 1..459: mol_type = unassigned DNA
ctggctcccgggccagcatctcccaggggccaccaacggcttctcgcgcaggctgtgccctctctgctgagtcaagccggaccttgctggcgtgtgtgctgtgggtgctgaaaaacaccgagccggcgctcctgcagcgctgggccactgacctgacactcccccagctgggacgtctgttggatttgctgtacctttgcctagctgcctttgagtacaaggtttgagggcgtgggcaggagatgatggaggaggcaggctaaggatgtacccagggacccagcgtgctgcgggctgagtgggaaggggtggactgtctttgtgcagaggactctgtgggactgagaggaaaggggtggactgtttctgtgctgaggcaaggaataaagtcagaagtgcctttgtgaatagaatttggaaggtggaggccgggtgcagtggctcacacctgtaatccca

SEQ ID NO: 5893 - DNA, 251 bp, Homo sapiens
  source 1..251: mol_type = unassigned DNA
caagatggctttaatggtgacctgccacctctgacccttgaccgctggcatcccccatttttcccccactctgcagagctccaccttctccagccaagccccggaccccaaggtgaccagcatgttcgaactgagtggaccattccggcagcagcacttcctagctgggctcctgctgacggagctggcactggccctcgaacctgaggctgaaggggcattcctgttgcacaagaaggccatcagtgctg

SEQ ID NO: 5894 - DNA, 1391 bp, Homo sapiens
  source 1..1391: mol_type = unassigned DNA
tgtacccgcacagcctcaacttcagcagccgccagggctccgtgcgcaaccttgctgtgcgagtgcagtacatgacaggcgaggaccccagccaggctctgccggtcatctttggcaagtccagctgcagtgaatttacccgcgaggccttcacaccggtggtctaccataacaagtcccccgagttctacgaggagttcaagctgcatcttccagcctgcgtgacagagaaccatcacctgctgttcaccttctaccatgtcagctgccagccccggccgggcactgccctggagacacccgtgggctttacttggatcccactgctgcagcacgggcgcctgaggaccggccccttctgtctcccagtgtctgtggaccagccgccgcccagctattccgtgctcacacccgatgtggcgcttccgggcatgcgctgggtggacggtcacaagggcgtgttcagtgtggagctcacagccgtgtcctctgtgcacccccaggacccctacctggacaaattcttcaccctggtgcacgtcctggaggagggagccttcccattccggctcaaggacactgtgctgagcgagggcaacgtggagcaggagctgcgggccagtcttgcagcactgcgcctggccagccccgaaccccttgtggccttctcccaccacgtgctggacaagctcgtgcgtctggtcatcaggcccccgatcatcagtggccagattgtgaacctgggccgtggagcctttgaagcaatggcccatgtagtcagccttgttcaccggagcctggaggcagcccaggatgcccgcggtcactgcccacagctggctgcctacgtccactacgcctttcgccttcctggcactgagcccagcctcccggatggggcccctccagtgacagtgcaggctgccacactggcccgtggctctggtcgccccgcaagcctctacctggcgcgttccaagagcatcagcagcagcaaccctgacctcgccgtggcccctggctctgtggatgacgaggtttcccgcatcctggccagcaaggccatcgactgcaactctagccgagcctcctcctacctcgagggttcctcctcggccccaccagccacccagctgagacccactgtgcagaagctgcttcacgaggagctggctctgcagtgggtggtcagcagcagtgccgtacgcgaggccatcctccagcacgcctggttcttcttccagctcatggtgaagagtatggcgctgcacctgctgcttggccagcgactagacacaccccgcaagctgcgcttccccggacgcttcctggacgacatcactgccttggtgggctctgtgggcctggaggtcatcacccgtgtccacaag

SEQ ID NO: 5895 - DNA, 231 bp, Homo sapiens
  source 1..231: mol_type = unassigned DNA
caccagccacccagctgagacccactgtgcagaagctgcttcacgaggagctggctctgcagtgggtggtcagcagcagtgccgtacgcgaggccatcctccagcacgcctggttcttcttccagctcatggtgagaccccctcctccctgcctggtggcaagagacccccagtggagccccttccttttttaaagagagaagccccctggccaggcatagtggctcacac

SEQ ID NO: 5896 - DNA, 554 bp, Homo sapiens
  source 1..554: mol_type = unassigned DNA
ctgggccgtggagcctttgaagcaatggcccatgtagtcagccttgttcaccggagcctggaggcagcccaggatgcccgcggtcactgcccacagctggctgcctacgtccactacgcctttcgccttcctggcactgagcccagcctcccggatggggcccctccagtgacagtgcaggctgccacactggcccgtggctctggtcgccccgcaagcctctacctggcgcgttccaagagcatcagcagcagcaaccctgacctcgccgtggcccctggctctgtggatgacgaggtttcccgcatcctggccagcaagggcatcgatcgctcacactcctgggtgaattccgcttatgctccaggaggcagtaaggctgtgctgcggcgggcgcccccttattgtggggccgaccccagacaggccatcgactgcaactctagccgagcctcctcctacctcgagggttcctcctcggccccaccagccacccagctgagacccactgtgcagaagctgcttcacgaggagctggctctgcagtgggtggt

SEQ ID NO: 5897 - DNA, 3023 bp, Homo sapiens
  source 1..3023: mol_type = unassigned DNA
ggtgcaattattgtcattgttgttatttatcatcatcagtatcattacaaaggctcagctggaaggcctgaagtgcccattatacacatagggaaactgaggcccagagaggggtcaaggcttgcacagagttgcccctgggggaaggaggcaggactcggactctggcctcagtttccccacctgagaaacaggccacataactctagtgacctcctgggggaagggcagtcaggcccttgggtggggcttaggcttgaccactggccacctgaggtaccttggaactctggccctgagtgcctcgctattctctgccttctgtgtgtcactgtgccccatgagtgcctccaatgtccttctgtattcccaccctctaccacactgttcccaatctgtgtttttagggtgctcgcttgtcccccaccctctgccctctgtcctatctcctgactgatacctgtattacctctcaccgggccctcaatgccccagcctcatgacctactcttcctggactgtctgtgctcccagccagccttgtcccatcaccccagccttgtatgtgcaccttcagggcccctgtccctctgacacccccatcctgccccccacaggaacctgctgtacgtgtacccgcacagcctcaacttcagcagccgccagggctccgtgcgcaaccttgctgtgcgagtgcagtacatgacaggcgaggaccccagccaggctctgccggtcagtggctgtgccccagggaaggggggtagggcatcccccatgggtccctcatgaatccactctcccaggtcatctttggcaagtccagctgcagtgaatttacccgcgaggccttcacaccggtggtctaccataacaagtatgtagggggacacgtgaggaacttgggggcactcatgggggtaggaggatgtcccttatatatacacataaggcagcatcgatgggaagatgggggacaggaagaagagaggtagaggctcccagagtgctaatgagggaagctgaggcagacagcagagacagtggggcctagcagcaataagggcgtggcatggcagaggtgatggggcagacagtggggaccccagcccccagcagatcccccagcccgattctgccaggtcccccgagttctacgaggagttcaagctgcatcttccagcctgcgtgacagagaaccatcacctgctgttcaccttctaccatgtcagctgccagccccggccgggcactgccctggagacacccgtgggctttactgtgagccgtcccctccctccctccccctgagccctcctcgtcccccaacctggccgcagacctgacctccagcctctccccagtggatcccactgctgcagcacgggcgcctgaggaccggccccttctgtctcccagtgtctgtggaccagccgccgcccagctattccgtgctcacacccgatgtatgtgccctggagctcctgcctgccaatgcactgtccccagaagcactcccgagtcacctgccttccttcctgtcaatcctgggaggcttgttatcctctactggtgcctccagggcccccgtgtagctcattattcccctattaatgcctctctgtgtcctacatgtcctccccaaagattcccattgcctctctgctccattcccactttagccaccctgactgccttcctgatcactgtcccctgccctcgtagtaccttatcattccccatgaatgcaccattgttaatgaccctaggcctcaaatcctcctatcctgtttcctgacctactcaatgaatattcattcaccctgtgtctccattctctgcccccgtcttggcatgtggatttccagcctgcccagtggaccctctcagtctactgggaccagggctgggggcagggtgcttggctgcacccccagaccgggctacactcacgctgcagtgtcgcaatggctggggccgctgggtgacctgatcagtcagggagggctgaccagtgcccacctggtgcctccctcccacaggtggcgcttccgggcatgcgctgggtggacggtcacaagggcgtgttcagtgtggagctcacagccgtgtcctctgtgcacccccaggtacggggtgggccgggaaccaagagtcccgccctgctcccctcttgcctgccctacgattgagtaacagttgccgatggccggggaggtctggcctcaggccttggacgtgactttggtcagctggacccagctttaagggaagctgctgattcaggcaggggtggtcttcattccctgaggccccaccctgctcactccacatccctacccaggacccctacctggacaaattcttcaccctggtgcacgtcctggaggagggagccttcccattccggctcaaggacactgtgctgagcgagggcaacgtggagcaggagctgcgggccagtcttgcagcactgcgcctggccagccccgaaccccttgtggccttctcccaccacgtgctggacaagctcgtgcgtctggtcatcaggcccccgatcatcagtggccagattggtaagcgaatgtggcctcagacctcagtttccccatccacatggcttctcagtcctgaggtcctgagggatcttctataagcccatttacctctctggccatttttctcatctgaaaaatgacctccagtcccctgcacccagagaaggtcttctgtgaccctttggcccgggtgcagcggttcacgcctgtcatcccagcactttgggaggccgaggcgggcagatcacctgaggtcgagagtttgagaccagcctgaccaacatggagaaaccccttctctactaaaaatacaaaattagctgggcgtggtggcgcatgcctgtaatcccagctactcgggaggctgaggcaggagaattgcttgaacctgggaggcggaggtgacagtgagccgagatcatgccactggactccagcccgggcaacagagcaagactccatctc

SEQ ID NO: 5898 - DNA, 3152 bp, Homo sapiens
  source 1..3152: mol_type = unassigned DNA
ggggccggggcccggggcggcggcggcgggacgcgaggaccatggctgcctccgagcgccgcgccttcgcgcacaagatcaacaggacggtggccgcagaggtgcggaagcaggtgtcccgggaacgcagtggctccccccactccagcaggcgctgcagcagctccctgggggtcccactgactgaagttgtcgagcccctggactttgaggatgtacttctgagccggccaccagatgctgagcccgggcccctcagggacctggtagaattcccagctgatgacttggagctgctgctgcagccccgggaatgccggaccacggagcccgggatccccaaggatgagtgggttcagccccacgccctctctgcctgtgattccactctgtctctgccaaccccatcaacagcccgacttcagctcctggcttggccgtgacgttggacaagccatgctttttctctgagcctccatctccccttgtctggaataggcaggacagtgctaaccttacaggctagcagaaggattcacagaggccttgtctctgtttaccctgatcttcttttgctgcagaaaactggatgcccaggtgagggccgcggtggagatgtatattgaggactgggtcattgtccacagaaggtgagtctgacttaggggcagctcagggggttcggaacccaaaagggctgagctgatgtctgcagccggtcctactgtgtatctgcccattgtccctgcaagagcaggcaaacttgtctggtggagcacaaggacggtggctttgaaggtgccatgtaggtgtgtcagaacacactggggaccccctgggggccctcagccctccctacctgcccagccccgtttcctgctaggtatcagtacctgagtgcagcatacagccccgtcaccacagacacacagcgggagcgacagaagggcctcccccgccaggtctttgagcaggatgcttctggagacgagaggtccggccctgaggactcggtgaggaagcccctggctggggtcactgaaggggtatgtgtggaggctccggcctcagcttttggtcacatgtgacaggaaatgacccaaacagccttgagctcaaaaggaattgcatcagtccccatgagtaaaaagttaggggtcataattataaacatttattgagtgcttagggtgtactgaaggcttcatatgtgtcctctgctttcatcctaggagtcagggcagccattacacccaggtaaggaaactgaggcacagcaaggttcttagaggccgtgagcctgtattttgtcaatcaacatttactgagcacctactgtataccaaccataattattccaaagattattgttgttttcattattattattattttaattaattaattattttgagatggaatctcactctgtcgcccaggctgaagtacagtggtgcaatctcagctcactgcaacctccacctcccggattcaagcgatcctcccacctcagcctcccgggtagctgggattacagacatgcgccaccatgccggctaattttgttattatttttagatgtacatagggaaactgaggcccttagagttgggggtcagagacccagtgtcacagagctgagctgggatttgatccagtgcaggaaggtcaggaagaactctctccttccctggcgacagtgaacaaagtcccagggaaggctttcattggcccagcccaggcccttggagccagtccctagggtgggtagatgtgttttgattgaccagataaggatcacctaaagccccaaatgtgggataaggagtagcctcccccagcaatggtaaaagttgggaggctctccagacagaagtttctggaaagagggtaggcaaaacccccaggtgacccttagagtgatgaccctcaccccctgaccctcaatttccccatctctagaatgagtatgaggacactctcaccagagtgaggtgaaggtgtatacagctggcactcagtgcttgcacattctccactggcagaatgactcccggcgtggctcgggctccccggaagacacccctcgaagcagtggtgcctctagcatcttcgacctgaggaacctggcagctgactcattgctgccctctctgctagagcgggcggccccagaagatgtggaccggcgcaatgaaacccttcgacggcagcaccggcccccggccctgctcaccctctacccggcacctgacgaggatgaagccgtggaacgctgtagccgcccagagccaccccgcgagcactttggacaaaggatcttggtcaagtgtctgtcgctcaagtgagtatactgacatgtctctcttcttagatgcgtgaagcaaccacatgggttccggcggggtacacactacatgagtagtgccattaccgtgtgcggccctgtcacctatgtggccacctatgtatgggcttttatgggggaaggaagacttcctttttcattatcccgagtctccaatccttaagtgccaattgtatgccaggatcagttctcagcctttcatgtatatgaacccgtcttatattcaccacaacctcatgaagtgggcacaggtggggaaactgaggcacagagtggtgacatgacgccaagaccatacaacttgtaaggctggagtctggcgcttgcctgctctgctgctgggatccagggtttggccgggaggctttggggcgggtgctagtgaccctgggcctggctctcagccgcccagggcccctccacaccagcccccggggagcagcagaagtgcgtgggaacagagttgaacaggatgtggacttggacctgagcctggccctgccgctccccaccccgagttcttgcctggatcggggcaggaaagggaggctccattctggcctgaggcctgggtgggcctcctgccctaaacacaaggattgggacctggctctgtgggctcatccagtcattcaacaaacacttattggccgggcacggtggctcccacctgtaatcctaatactctgggaagccaaggcgggcggatcacctgagctcaggaatttgagaccagcctggccaacatggcaaaacaccatctctactgaaaaaaaaaaaaaaa

SEQ ID NO: 5899 - DNA, 352 bp, Homo sapiens
  source 1..352: mol_type = unassigned DNA
ccagcaggcgctgcagcagctccctgggggtcccactgactgaagttgtcgagcccctggactttgaggatgtacttctgagccggccaccagatgctgagcccgggcccctcagggacctggtagaattcccagctgatgacttggagctgctgctgcagccccgggaatgccggaccacggagcccgggatccccaaggatgaaaaactggatgcccaggtgagggccgcggtggagatgtatattgaggactgggtcattgtccacagaaggtgagtctgacttaggggcagctcagggggttcggaacccaaaagggctgagctgatgtctgcagccggtcctactgt

SEQ ID NO: 5900 - DNA, 487 bp, Homo sapiens
  source 1..487: mol_type = unassigned DNA
agatgagggagcagaggccagggacccgtgggcctccctccagacctggaaggccacaggcccagccgggaggggaaggagagtccgtgatggcttcagaccccactggtggcagcattctcatctcctgatctgtgcttgatggggaacgcgttgggggaactggggagctgtgggcccttaaagcctcagcactcctggttctcttggccctcggcctatttatttcgttccacaatctggattttcctcatagaaagaatctgtccgctccgctgcctgagttttcccgtccccaatggccccctccctatctttccaggacggtggccgcagaggtgcggaagcaggtgtcccgggaacgcagtggctccccccactccagcaggcgctgcagcagctccctgggggtcccactgactgaagttgtcgagcccctggactttgaggatgtacttctgagccggccaccagatgctgagcccgg

SEQ ID NO: 5901 - DNA, 3678 bp, Homo sapiens
  source 1..3678: mol_type = unassigned DNA
gaccctgtcttttaaaaagaaagaaaaatatggacagcaaatatttactatgtagatgatattagatgtggtttctttttttcggactgggacataaaatggtcagatatgtccttctgataagaaatggagtacaatatatcttggaagaatgtgttttgtcagtaagccaccaacctgatttttatgctgaagtataaaggatatgcaagcatgcaaaaataattgcagtagaggatgaaatatagaggaaaacaacatagggaaggaggtaatcctcaaaagaatttcttgaggaaatttgtaagaattctcaagaaaacaccagagaagtggatgatagttcaggggttatgctaatgtcctggtgtttataccagtatatatagaatatggggaacataaagcttaattaagagcttgaggccgagcgtggtggctcatgtctgtaatcccagcactttgggaggctgaggcaggtgaatcacctaagcctgaccaacatggagaaaccctgtctgtactaaaaatacaaaattagccggacatggtggtaatcccagctacttgggaggctgaggcaggagaatcgcttgaacccgggaggcggaggttgtggtgagctaagattgcgccgttgcactctagcctgggcaacaagagtgagactttgtctcaaaaaaaaaaaaaaaaatgcttagagtcgggtgtcaaatatattagagtttaacttcccactccaccacttactaacagcgtgaccttgggcaagatacttttcctcctctataaaatgagggtgaaaataatttaatctatcacataaagttgtgataaggattgatataatacatgtaaagtggttaaccagtgtctagcacatagtaagtactcaaaaaatgttgaaagttgttatttttgttgttaatatgatttaatcataattactattagaaatcttaacactagttaataaaatctaagaggttttatatttcccagttgagatctgcatctagaagtgaactggtaaatgctctttaagaggaataaacctagtagaaggaaagaaagatcaccattgtgtgaaatactggtatgcctatatggaaatcagttaacttaaaggaagcattgtggaaaacaactgggagaggataaaagaagttagagaaatgatgtcactgtggaaatatacaactagtccatcggaatgtttcttgctaaataaagacaacaaaactaaaatagatttatgatatatttgtcataagaggtttgaaccatttagaaacatggtagatggatttcttcgtcccggacatagtcttatcacccagaggattgtggaagcagtaagtagaatcgctaaggaagaataagctgtattgtgaggagtgatagaaagttcagaaaggattcataacagtaaagaaaggtaatgctagaaaaacagcctaatttataggaaagttttttgtttttgttttttttttaattcaaaagaaaaacaggtatcatcctgtggtccaaagctctgaagaagaaataaagatgaagtgagtttttcctgcaggcgaagcaatatgactgtgcttccgtgaagcatacttccgtagtagtttgacactagagggagtgatggtaagcggatgtttggcacctattttcgtgttggtttttatggaaccaagttcggggatttggatgaacaagaatttgtttacaaggagcctgcaataaccaaacttgcagagatatctcacagattggagggattttacggagaaagatttggagaggatgtggttgaagtaatcaaagactctaatcctgtagacaagtgtaaattagatcctaacaaggcatatattcagattacctatgtggagccatactttgacacatatgagatgaaggacagaatcacctatttcgacaaaaattacaatcttcgtcgattcatgtactgtacaccctttactttagatggccgtgcccatggggaacttcatgaacaattcaaaaggaagaccattctgactacgtctcatgcctttccttatattaaaacaagggtcaatgtcactcataaagaagagatcatcttaacaccaattgaagttgctattgaggacatgcagaaaaagacacaggagttggcatttgcaacacatcaggatcccgcagaccccaaaatgcttcagatggtactccagggatctgtaggcaccacagtgaatcaggggcctttggaagttgcccaggtttttctgtctgaaatacctagtgacccaaagctcttcagacatcataataaactgcgactctgctttaaagattttactaaaaggtgtgaagatgccttaagaaaaaataagagcttaattgggccggatcaaaaggagtatcaaagggaactggagagaaactatcatcgccttaaagaggccctacagccactgatcaacagaaagatccctcagttatacaaggcagtattgcctgtcacctgccacagattccttcagtcgaatgagccttcgcaaaatggatctctaaactgaatgcacttgttttattcatctgcaaagagccatgtattcaacatcgagtgtgaaaagatctattggaaaacaacatggaatggaattctggaaattattattcattgaagaatgcagtggccaagaaaatatcaaatgtagattgttaacgcttgagaatcatggctatggtttctaatgttctggtaacaagctgttatcttttaagacattttaatgactcaaaggtacactatacatttaccattatttataccatagctaaggttaaaaatttattcactttaagttcgtattttttaatttatattaccatttatagattcattttggaaccattttaaatgtagtaatgcttattttaaaggtactattaaatatgtgaatgtttacactaattttaccgagtgggacttcaaaatttttattattgacaatggcagagaacaattaaagggttgactcaagaactagttccaaacctagcagaataaaaatcatagatagccccaaattaatgagtttggtaactgtttcaaagttattttccatttacatacccaaaacaggaatttagaattgcagaactttacttagtaaaacctttgtgtaaaataatttaaatacggggataactaataccagtgacaacaccttaacttgattaaatcttattacaccaatgatagtagtaagaacttcatgattcttagcaactaaaatgaatgatttctctgtttcaaattaaaaccagccatcagtttttgacgatgtaaaccagtaaattagaatctacttaaagctatcttgtagcaccatgaaggtaacacagctggagtttgagaaattacctattttctgacacttgtaaagtttagaagcatataaaaagtaaaattaggtgctttaattcatctaaaattatatgcaagtcatacagaaaaaaaatttgagaagtaacattttaattcttggcaagtttttccaaaacgatgcatagtaatgatttccagaacagtttagaacaatggtttttgggtagtagtgcagtttacagaatggcatcatttataatccttttcttctactgaccagttacatgaatcactta

SEQ ID NO: 5902 - DNA, 7084 bp, Homo sapiens
  source 1..7084: mol_type = unassigned DNA
atggccgagcgccgcgccttcgcccagaagatcagcagaacggtggcagccgaagttaggaagcagatctccggacaatatagtggttctccccaactgctcaaaaaccttaatattgttggcaatatatcccatcacaccacagtgccccttaccgaagcagtagatccagtggatttggaagattacctcattactcatcctttggctgtggattctgggcctttacgggatttgattgaatttcctccagatgatattgaagttgtttatagtcctcgggactgcagaactcttgtttcagctgtacctgaagaaagtgaaatggatccacatgttagagactgtataagaagttatacagaagactgggcaattgtcatcagaaaatatcataaattgggaacaggatttaatcccaatacattagataaacagaaagaaaggcaaaaaggtttgccaaaacaagtttttgaatctgatgaagctccagatggcaacagctaccaggatgatcaagatgaccttaaaagacgttcaatgtcaatagatgataccccaaggggtagctgggcctgtagtatctttgacttgaaaaattcacttcctgatgctttgcttcccaatttacttgatcgaactccaaatgaagaaatagaccgtcagaatgatgaccaaaggaaatcaaaccgtcacaaagaactttttgctttgcatccatcaccagatgaggaagaaccaatagaacggcttagtgttcctgatatacccaaagaacattttggtcaaagacttcttgtaaaatgcttatcactcaagtttgaaattgaaattgaacccatttttgcaagtttggctttatatgatgtcaaggaaaagaaaaagatttcagaaaacttttattttgaccttaattctgagcagatgaaagggttgttacgtccacatgtaccacctgctgccattactaccctggcaagatcagcaattttttctatcacttatccttcccaagatgtttttcttgtaataaagctagaaaaagtcctacagcaaggagacattggagagtgtgcagaaccatatatgattttcaaagaagcagatgccaccaagaataaagaaaaactggagaaactgaagagtcaagcagatcagttttgccaaagacttgggaaatatcgcatgccttttgcttggactgcaatccatttaatgaatattgttagcagtgctgggagtttggaaagagattctacagaagtagaaatcagtactggagaacgaaaagggtcttggtcagagaggaggaattctagtattgttggcagacgatcacttgaaaggacaacaagtggagatgatgcttgtaacttgacgagctttcgaccagctactctcacagtgacaaatttttttaagcaggaaggagaccgcttaagtgatgaagatctctacaaattccttgctgatatgagaaggccatcttctgtcttacggcgactaagacctattacagctcagctcaagatagacatttctcccgcacctgaaaatccccattattgcctaactccggagctgcttcaagtgaagctttaccctgacagtagagttagacctaccagagaaatcttagagtttcccgcaagggatgtttatgttccaaacactacttacagaaatcttctctacatataccctcagagtcttaattttgccaatcgtcaaggttctgctagaaatataacagtgaaagtccagtttatgtatggagaggatccaagcaatgccatgccggtaatctttggtaaatctagctgttcagaattttcaaaggaagcctatacagccgtagtatatcataacaggtctcctgattttcatgaagaaatcaaggttaagcttcctgctactttaactgaccatcatcacttgctttttactttttatcatgttagttgtcaacaaaaacaaaatactcctcttgaaacaccagttggatatacatggataccaatgcttcagaatggacggttgaagactggccagttttgcttgccagtctcattggaaaaaccaccacaggcttattctgtactgtctcctgaggttcctctacctggcatgaaatgggtagataatcacaaaggtgtttttaatgttgaagttgttgctgtttcgtctatccatacacaagatccttatcttgacaaattttttgctctggtcaatgctctggatgaacacctgttcccagtccgaattggggacatgcgaatcatggaaaataacttagaaaatgaattgaagagcagtatttcagcactgaattcatcccagctggaaccagtggtccgatttcttcatcttctgctagataaactgatacttttagttattagacctcctgtcattgctggccaaatagttaacctaggtcaagcatcttttgaagccatggcatcaattataaatcgacttcacaaaaacttggaaggaaatcatgaccagcatggcagaaacagccttcttgcatcatatattcattatgttttccgcctaccaaatacttaccctaattcatcatcaccaggtcctgggggtttgggaggatcagtgcattatgccacaatggctagatctgcggtgagacctgcaagccttaatttaaatcgttctcgaagccttagtaatagcaatccagatatatctgggactcccacgtcaccagatgatgaagttcgatcaatcatcgggagtaagggtttagatcgctccaattcctgggttaacactggtggtccaaaagctgccccatggggatccaaccccagtccaagtgcagaatcaacacaggctatggatcgaagttgtaatcgtatgtcttcgcacacagagacgtcaagtttcttacaaacattaacgggacgcttaccaactaaaaagctttttcacgaggagctggctttgcagtgggttgtttgcagtggcagcgttcgggaatcagctttgcaacaagcctggttcttttttgaattaatggtaaagagcatggtgcaccatttatactttaatgataaacttgaggctccaaggaaaagtcgttttccagaacgtttcatggatgacattgcagctcttgtcagcacgattgctagtgatatagtttcacgatttcagaaggacacagaaatggttgagagactcaatacaagccttgcattctttctcaatgatctgttgtctgttatggacagaggatttgtttttagccttataaagtcctgctataaacaggtgtcttcaaagctttactcattaccgaatcccagtgttctggtgtccttgaggctggattttctacgaatcatctgcagtcatgagcactatgttacattaaacttaccctgcagcttacttactccacctgcatctccatcaccttctgtttcttctgcaacatctcagagttctggattttctacgaatgtacaagaccaaaagattgcaaatatgtttgaattatccgtgcctttccgccaacagcattatttggcaggacttgtgttaacagagctggctgtcattttagaccctgatgctgaaggactgtttggattgcataagaaagtcatcaatatggtacacaatttactctccagtcacgactcagacccgcggtactctgaccctcagataaaggctcgagtggccatgttgtatctacctctgattggtattatcatggaaactgtacctcagctgtatgattttacagaaactcacaatcaacgaggaagaccaatttgtatagccactgatgattatgaaagtgagagcggaagtatgataagccagaccgttgccatggcaatcgcagggacatcggtccctcaactaacaaggcctggcagtttcctcctcacgtcaacgagtggcaggcaacacactaccttttcagcagaatcaagtcgaagccttttgatctgtctactttgggttctcaaaaatgcagatgaaacagttctacagaagtggtttacagatctctcagtcttgcagctaaaccggctattagatctgctttatctctgtgtgtcttgctttgagtataaagggaaaaaagtgtttgaacgaatgaatagcttgacctttaagaaatcaaaagacatgagagcaaagcttgaagaagctattcttgggagcataggtgccaggcaagaaatggtacggcgaagccgaggacagctcgagagaagcccatctggaagtgcctttggaagtcaagaaaatttgaggtggaggaaagatatgactcactggcgtcaaaacacagagaagcttgacaaatcaagagcagagattgaacacgaagcactgattgatggaaacctggctacagaagcaaacctaatcattttagatacattagagattgttgttcagaccgtttctgtaacggaatccaaagagagcattcttggtggagtgctaaaagtgctactacacagcatggcctgtaaccaaagtgcagtttatctacaacactgttttgctacacagagagccttggtttcaaagtttcctgaactcttatttgaagaagagacagagcagtgtgctgatttatgcctcaggcttctccgacactgtagcagtagcatcggtacaatacggtcacacgccagtgcctccctttacctactaatgaggcaaaactttgagattgggaataactttgccagggttaaaatgcaggtaacaatgtcactatcctccttggtgggcacatctcagaattttaatgaagaattcttaagacgttctctaaagactatattgacatatgctgaagaagatctggaattgagggaaacaacatttcctgatcaggtccaggatctggttttcaatctccatatgattctttctgatactgtgaaaatgaaggaacaccaggaggatcctgaaatgttgattgatctaatgtacagaattgccaagggttaccagacctctccagatctgcgattgacctggttgcagaacatggcaggcaagcactcagaacgaagcaatcatgctgaagctgcacagtgtctagtccactcagcagcacttgttgctgaatatttgagcatgctggaggaccggaaatatcttcctgtgggatgtgtaacatttcagaatatttcatctaatgttttagaagaatctgcggtctcagatgatgtggtatctccagatgaagaaggtatctgctctggaaaatactttactgagtcaggacttgtgggattactggaacaagcagctgcttccttctctatggctggcatgtatgaagcagttaatgaagtttacaaagtacttattcctattcatgaagctaatcgggatgcaaagaaactatccacaattcatggtaaacttcaagaagcattcagcaaaattgttcatcagagtactggctgggagcggatgtttggcacctattttcgtgttggtttttatggaaccaagttcggggatttggatgaacaagaatttgtttacaaggagcctgcaataaccaaacttgcagagatatctcacagattggagggattttacggagaaagatttggagaggatgtggttgaagtaatcaaagactctaatcctgtagacaagtgtaaattagatcctaacaaggcatatattcagattacctatgtggagccatactttgacacatatgagatgaaggacagaatcacctatttcgacaaaaattacaatcttcgtcgattcatgtactgtacaccctttactttagatggccgtgcccatggggaacttcatgaacaattcaaaaggaagaccattctgactacgtctcatgcctttccttatattaaaacaagggtcaatgtcactcataaagaagagatcatcttaacaccaattgaagttgctattgaggacatgcagaaaaagacacaggagttggcatttgcaacacatcaggatcccgcagaccccaaaatgcttcagatggtactccagggatctgtaggcaccacagtgaatcaggggcctttggaagttgcccaggtttttctgtctgaaatacctagtgacccaaagctcttcagacatcataataaactgcgactctgctttaaagattttactaaaaggtgtgaagatgccttaagaaaaaataagagcttaattgggccggatcaaaaggagtatcaaagggaactggagagaaactatcatcgccttaaagaggccctacagccactgatcaacagaaagatccctcagttatacaaggcagtattgcctgtcacctgccacagagattccttcagtcgaatgagccttcgcaaaatggatctctaaactgaatgcacttgttttattcatctgcaaagagccatgtattcaacatcgagtgtgaaaagatctattggaaaacaacatggaatggaattctggaaattattattcattgaagaatgcagtggccaagaaaatatcaaatgtagattgttaacgcttgagaatcatggctatggtttctaatgttctggtaacaagctgttatcttttaagacattttaatgactcaaaggtacactatacatttaccattatttataccatagctaaggttaaaaatttattcactttaagttcgtattttttaatttatattaccatttatagattcattttggaaccattttaaatgtagtaatgcttattttaaaggtactattaaatatgtgaatgtttacactaattttaccgagtgggacttcaaaatttttattattgacaatggcagagaacaattaaagggttgactcaagaactagttccaaacctagcagaataaaaatcatagatagccccaaattaatgagtttggtaactgtttcaaagttattttccatttacatacccaaaacaggaatttagaattgcagaactttacttagtaaaacctttgtgtaaaataatttaaatacggggataactaataccagtgacaacaccttaacttgattaaatcttattacaccaa
